United States Patent Application Publication US 2007/0054278 A1 - sequence listing, part 78

SEQ ID NO: 96236 - DNA, 19725 bp, Homo sapiens
  misc_feature (1)...(19725): n = A,T,C or G
ttccggtctctccttccttacccctgggcagatcacctggggaagaactgaggcaaggtttctcatccctcaggtgcagaggggttcaattaccaggcccaagtagctgggattacaggcaagcaccaccatgcctggttaatnnnnnnnnnnnnnnnnnnnnnnnnnnnnnnnnnnnnnnnnnnnnnnnnnnnnnnnnnnnnnnnnnnnnnnnnnnnnnnnnnnnnnnnnnnnnnnnnnnnnnnnnnnnnnnnnnnnnnnnnnnnnnnnnnnnnacgagctgggctcagtggctcatgccgaaaatcccagcaatttgggaggccgaggtgggtggatcacttgaggtcaggagtttgagaccagcctgggcaacatgatgtaaccccgtgtctactaaaaatacatatatatatataaattagccgggtgtggtgttggccacctgtaatcccatcttttcaggaggctgaggcaggagaatcacttgaacctgggagacggaggttgcagtgagccgagatcatgccactgcaatgcagcctgggtgacaacagtgagactccatcgcaaaaacaaaaacaaaaacagattccatctcaaaaaaataaataaataaaaataaataaaacaaaaaacaaatgtggtatggcaatgaaaatactgtgttaaagtttcatagaaaataaaagaccactcagatacaataagctgtctttttagatgagtatatttgttattcttattttatagctaagaaaccggttagaagaatgctatttgattggaccatgttgcatttctggacagtgcagctgagatcatacttcatgtgtaactccactagcctaccagggtgcctctcataaaggtaagaaatgtaaatttggcctaatatacagtttccagggcagcactgggtcaattctacatgcagtacttctatgttcatcaagggaaaccttaaggaaaggtgaaaatgcttctagaaggcaactggacaccagtgcccttgtttgttgcctttgggctcttcctctaaggccaatagtgacctgaaattactaactattccaatcaagtggacaaaatggtaccaaggtcgtcaacatcagacaaattcacttgaggacctatgtgctttgaaagacaaaactgcttttgtaaaggatactgtatttcagaaaaacataatcatattacaactaataacactgtaaaatgctgatgtgttgaatgctactttagaaaaacatgttcaaatctaggaaaaaaatttctcatagaaaactacatatcggctgggcgaggtggctcatgcctgtaatcccagcactttgggaggctgaggcgggcatatcacgaggtcaggagctcaagatcagcctgaccaacatggtgaaaccccatctctactaaagatacaaaaagttagccagacgtggtggtgtgtgcctataattcccagctactcaggaggctgaggcaggagaatcgcttgaacccaggaggcagaggttgcagtgagccaagatcacaccactgcaccccggcctacgtgacagaacaagactctgtctcaaaaaaagaaagaaagaaagaaaactacgtgtcaattatctagctagctagctaactatctagagacaggctttcattctattgctcaggatggagagcagtgggatgatcatagctcactgcagccttgagctcctggcctcaagtgatcctcctgcctcagcctcttaagtagctagggccacaggtggacacatttacacctcggttttttgtttgttttatagagatagggtttcactacattgcccaggttggtgtcaaactggagtctcactgtgtcgcccaggctggggtgcagtggtgcgatctcggctcactgcaacctctgcctcctgggttcaagcgattctcctgtatcagcctcccgaggagctgggacttcaggcatgcaccaccacatacggctaatttttgtattttttgtagagactgggtttcaccatggccaggctagtctcgaactcctgacctcaggtgatccacccgcctcggcctcccaaagtgctgggattacaggtgtcagccagcaagcctggatgagcactttatgttattaaatagcctaatccaagcagggcgcggtccctcacgcctgtaatcccgacaactctgatggccaaggtgagaagatcgcttaaacccagttgttcgaaaccggcctgggcaacatagcgagacccccatctctacaaaaggtacaaaaatttggccaggtgcgcaccgcgcctggctaatttttgtaccttttgtagagaccgggtttcatcatgttgcccaggctggtctcaaactcctgagcccaagccatccatcctcccgcctcggcctcccaaaacgctgggattacagggcccagccagcctcatgttttttttaagcagtccctccccttgcacacttggatagtttttttttattattattattttagacagggtttacctcagtctggcaggctgcaatgctgtggtgggatcatagctcactggagccttcaaccttggggttcaagtagctgggggttgaggtaggactacagagatccggtcgcgccatattgctaggttgctcttggcctgaagggatcctccagcctcggccgcgcccggacatagttttccagttttgaccgatataaacactgtgcttggtctgagttttcaactacccttctccagctagcaacacacaggacctggcggggaggtcgtggttaccaggctccactctgatgataagactgcccagctgcaagcaccgtgcagccccagtaacgtcgccgaacgccctcgcctgtgrcgtcgccgaaggcccacctctatggcgacgccgaggaacgtctctcacgcggagccaatcggaactcgcggaggggctgctggggcttccaggagggcgcatgtgcggatgactggccgcaggcggccgggcgggctgtaacccgccgctgaactagcgcttctgtgtccagaggcttcggcctggccgccgtcgcctgtaagctacgaggaggagatttacgacttggccgggcgcagcaaaggccagactctgcgcgaacaggcgctgcgcaccaaccggcaggcacctggcgggcaccatcgcacggtggcgcagaagcccctcaatggccagcgccagctgcagccgcggccgcgcagtcgtcccccctgagcttgggtacgtgcgccccacaacacctcccccagccagggcccggggacccccgggagcgtccccccgctacctggcgccactcatcctgggcggggtcggtcccctctcaggctgcctctcattagggagctgcacccccgagcttgacctctgaaggccctttgcgatagcattaagcctttgaaactttgtagcgggttagaaggggctaggaaacgaagaaaacatctttttaaaaatataagcgatcggccgggagcggtggcccacgcctgtaatcccagcgctttggtaggccgaggcgggtggatcacgaggtcaggagttcaagaccagcctggccagcatggtgaaaccccgtctctactaaaaacacaaaaattagccgggcgtggtggcgggcgcctgtaatcccagctactcgggaggctgaggcagagaattgtttgaacccgggaggcggaggttgcagtgggccgagatcgcgccactgcactccagcctgttggacagactgagataacgtctaaacaaacaaatatatgtatgtatttatatatatggaatccagcccgggaggttgagattacagtgagcagagattatataagcgatcaagcacgggaggttgaggttacagtgagccgaaattgtgccattgcactccagtctgtgtgacagagggagactctgtctctaaaaaattatatgtgagagcttttcttccagcgctcatgctcagattgaagaaagtaattgggccaggactggtgactcacgcctgtaatcccagcactttgaggggccgaggccggcggatcgcttgagctcaggagttccagactagcttgggcaacatggtgaaaccctgtctctacaaaaatacaaacaattagctgggcatggtggcaagcgcttgtagtccctgctgcttgcgggactgaggcgggaggatctcttgagcctcaatcctcgctgcagcctccacctcctgggctcaggcaatccatttcagcctcccaaagtgctgggattacaggaacgagccatcgtgcctggccttatgctatattttaatgctttttttgaaaatggaaacttttacaggcaattcacttcttcatactaatgataaggaaatgatgctgttctgtcctgttatgtgttttgtttgtgtgtatgtgtgtgtgtgtttttcttgagacagggtcttgctctattgccctggctggagtgaggtggcgcaatcatggctcaaggaatccttccccgtcagcctccgcagtagctaggactgactacaggtgcatgctaccacccttggctaattctttttttgaaatggagtatcactctgtctcctaggctggagtgcagtggtgcaatcttggctcactgcaggctggtctcaaactcctaacttcagatggtccacccacctcggcatcccaaagtgctgggattacaagtgtgacccactgtgcctgggattttgctcatttagatannnnnnnnnnnnnnnnnnnnnnnnnnnnnnnnnnnnnnnnnnnnnnnnnnnnnnnnnnctgcctcctgagttcaagcgattctcctgcctcagcctcccgcagtagctgggactacaggtgcgcaccaccacaccagggagttcaaggctgcagtgagccatgatcgtgccactgcactccagcctgggcaacagagagagaccctgactccacaagtaaataagtcaacatcatatgatctgtaccagggtacaggcaggtgctattatccccacttttcatactcgactctgagttgagtcatacatcaacctctagtaaaaaatggcatgctctcagtcaaaggggcaagcccaaaccacgtggaaaggatcttatctctcttgagagctaatataaaaagaattcctcctagatagaagcattgtgacatcagttacttaggctaaacatgcctattatgctaagtgaattattaacagtaaatactttgtgccatgttaattatcataatatgatttataatttgttttaaccttaggttatatgtaccttgaagccatttatattttggtatacttgtaatggttactatacactagactatgtgtattggactagacatggagagtcaaaaaagagtatgtgatcagagtagaaatcatgctctggcttccttcttgtctacctcctacctcaagtagaagcagtagaaaaagtaattacctaagattttttggattctggtttgtggagaagcacccttatatttaggctgatgggtggctaaattagaaagtattttttgtgatttagaattttatacggagatgttcattgtgattaattattctttgtattagcagatttttgctttttatagctgcatgatttcttgtttattattcattgattattatctattaataaagaaaaactttatttcactaaaacagtgatatataatccaagttgggttttttaataatgactgacatttttctttgggaatacattactgttaacaatgtagattattagatacattatttttaatgaatataagtggtgtaattagaaggctgaaaagaatccttggaaacattagtttaatttgatagctaagaaactgaggagaagatacttattctttgtagcatattttctaaagtcatttcattgtctcaccaagnnnnnnnnnnnnnnnnnnnntttttcccttatttcttttaggcgaatgtggattgggaaagtcgacattaatcaactcattattcctcatagatttgtattctccagagtatccaggtccttctcacagaattaaaaagactgtacaggtatggatattagtattgttaattgatgataagctggaataatattaatacacacaaagcacatgttgtaacttttattatgcttccttagaggtaagatgcaaacttgggcttagccagtgtaagatgataaatatgacttcataaaatttwaaaaaaaaagaagtacagttaatcagaagaattatcttkactagaactttccaaatttgtcctaaggactctcctagagatggcactgtgacatagtaaccagttcccctggagttgtgctgtctagtatgatagtcatttgccatgtgtataaatcaattaaaattaattaaattaaaaatgcaatttcttgtttgctccagatacatttcaagtgctcaacagccacatgtggcaagtggctgccattttgtgcagcacatatatgaagattttcatcattgcaggaaattgcattggatgatgtagagaaaacatgatttttagaaaagctattgttatttaaatacagtgttctatattagtcagtgggataataccatatcatagttgaatggcaattgcaattctgtaagactcccaagttatatgtgatctaatttactgcttctcagtctttgctatgcattccaatcctgggtatcctgtgaaatttagttcttctagtaggtctgagatgggctgtatttctacatttctaacaagattccaggtgatactgatgctgctggttggggtagatcacactttatagagcaagggactagactctagatgtgcacttcttattaaatggtacagcagcctgtagtcacttctcatcttagcaaaggtcaccgaacttcaagtaacatgacttgggtytgtatacgaactttgccacttatttgataaagttgtttaacttctttaaacccatttacttttctataaaatggagataatacctatcataaaattgtttttaagacgtactctaaaataatgtagctagataragaattctcattattgtaagaaatttaaaactgtttgctttaattttatccatttgtataaattctatctcaatcctaatttaaacctgatatttagaccttcagtttttccgtaagtcctaagtgaagaaaacaactatgaaattttagtctgaagtaattatcttagtattttataaataatacttttatttttgtttgaatwcacattgtttttgaggtatttttctgtcaactcttaaaactcctaagttcatcatgaagtttttatattatttaaagtaatctctcatttgaaatttaagactgaatataattgttttcatattatgaagtgtgttattagtgcaaataatatgctaataatttagctgtgtttcgacaatagtttattttctttcatttgaaacgttttgaaataatgaataaagatttattcaacataatttatatttttgaatctttatatagactaactsgacatgtcttccactggtaaattcattttgcctatttgaaaatattgattattgtccgttaacagtcatcagttaattcatatgtagaattgcaacttaattgtttatttgcattctatagctggcagcctgttatcgattacattgatagtaaatttgaggactacctaaatgcagaatcatgcgtgaacagacatcagatgcctgataacagggtgcagtgttgttcatacttcattgctccttcaggacatgggtcagtaccttgatacttctgattcctttttgttgttgttgcttactgttatctgtatgtgcatattttagtaatcttgaagtttgtgaagtacatacaactatcccattatgaagtaccaaatttcatgtagaaatgtcttagttgaaaagcctttttaagtcctgtataagctaagtgattttactccttagttctttattcataaggattttccctgcttcatggaaataaacagtgttgccaccatggtttgaggtctcaatgtagcaaatttagctttcatgttgaccactctgctactaattgaactaccaaatgaagacaagcagccataccagttagatatattcaaaatcaaagatgctatttattataagtctcataagagatggttatcaaaagcacttgcatgccaatgttttcttgtgccatttctttctrcaataaatctatttggcttctgtttcaccttagctgtcatagacatgtcgtttaggtatcatattgtcattastaactttttgtttattaaggcataagacctaagaaactagacattaatctgatgtgattgttctgttatagttagcctgtactccctttttttgttgtttgtacttcccctttattttgagtacatatatgtgtcattgacaactgcagatttttgcaattattattcctcagtcttttcctttgggtaagtaactcagcatacataattcagccacctgataattgtaactccaccatctctccactgaaagaactgtaatatcatcaggctaaacagcattaagttatctaatgctcacattacagtagtagtgtaaaccaattccttcaagtatacctttctcttcaatttttggcttctcactctctctttttttttttttttaatggatgggtcaatgcccattatcactctagatagataaggcagccttaattatatacttatatttttgcactgtcagattggagtggggtaaaaatgtttcttcttttatgtctaatactctttttttatttttattttatttttttgctgtgccctagaccattacataactgaagactccaaccttcaggcaggattgtgtagtacatgtttgtaactacttcacattgccttttgttgaggaaatttcagtttttattattgttatactttaagttttagggtacatgtgcacaacgtgcaggttggttacatatgtatacatgtgccatgttggtttgctgctcccattaactcgtcatttacattaggtatttctcctaatgctatccctcccccatcccccccaccccatgacaggccccgatgtgtgatgttccccaccctctgtcgaagtgttctcattgttcaattcccacctatgagtgagaacatgtggtgtttggttttctgtccttgtgatagtttgctcagaatgatggtttctagcttcatccatgtccctacaagggacatcaactcatcctttttatggctgcatagtattccatggtgtatatatgctacattttcttaatccagtctatcatttaacggtgttctcagtttacatatttaaatcactaaactgactctttgacttaaaaggctcaaaaaaagtaatctcaaaaatacagcacactgtataaccttttatgagtatttatgtagcttcttgaatttatgtttttaaatctttctcatttaacttgtcagggccttttcctgaaagccttctgagtgaaatcttaacctgcagttaagtcaataaaatttgtcagcttataaccaattttattattttagatctggactctctccaagtttagtaattctcatgaaatcacattcctcccatccctttgcggaaaattttatttcttaaaattgcatgggaaatgagagcttttttaaaagaaaagtttttatattcaaatgatatctagtggctttgcaccatttcttatttgtcacaaggggtaagatgtttaaaattgctatatcttatatataaaatgtgcctttgaataatttctcagtttaactagttttagaaatggagcaaagttttgcccattggtacatgatattgtggattaagtgaaagaatatgaggccgggcactgtggctcacgcctgtaatcccagcactttgggaggctgaggcgggcggatcacctgaggtcgagagttcgagaccagactgaccaacatggagaaaccccgtgtctactaaaaatacaaaattagccggccgtggtggttcatgtctgtaatctgagctactagggaggctgagtcaggacaatcgcttgaaccttggaggcggaggttacagtgagccgagatcacaccattgcactctagcctgggcaacaagagtgaaactcctcctcctcannnnnnnnnnnnnnnnnnnnnnnnnnnnnnnnnnnnnnnnnnnnnnnnnnnnnnnnnnnnnnnnnnnnnnnnnnnnnnnnnnnnnnnnnnnnnnnnnnnnnnnnnnnnnnnnnnnnnnnnnnnnnnnnnnnnnnnnnnnnnnnnnnnnnnnnnnnnnnnnnnnnnnnnnnnnnnnnnnnnnnnnnnnnnnnnnnnnnnnnnnnnnnnnnnnnnnnnnnnnnnnnnnnnnnnnnnnnnnnnnnnnnnnnnnnnnnnnnnnnnnnnnnnnnnnnnnnnnnnnnnnnnnnnnnnnnnnnnnnnnnnnnnnnnnnnnnnnnnnnnnnnnnnnnnnnnnnnnnnnnnnnnnnnnnnnnnnnnnnnnnnnnnnnnnnnnnnnnnnnnnnnnnnnnnnnnnnnnnnnnnnnnnnnnnnnnnnnnnnnnnnnnnnnnnnnnnnnnnnnnnnnaatatacatgtgaactaaatgttttctgttgctgacgttttgtaggcttctgaaatttaatgagacttttacaaggtttatcatttctcctaagtttaatttttaaactgacttaaatgttttttgaccctttggttatatttaagaagttgacttctctaatttccttgtcatgtttatttttaaatatttttatctttaaaagttgggatattataataagtattcagcaagtattgatttgcgtttaaatataaaatcttgttatttggattttaatactttatattaaatgcctttaagatttattaaaattttagattaattgaactctgcttttttgtcactggattaataagcaggcttgtatctgacataatagcttaataaggcagtgacaatttaaattagtcatgagtataaattgaaaaaccataacaatttagaaatctgagattgaataattcatggcatttctatttagtgttttatataatgattaataaaaagaagcaaaacttaatttttttttcaaagatggataggttcaggccagatgcagtggcttacgcctgtaatcccagcactttggggaccaaggcaggaggattgcttgaggcctcagactaggcaacatagtgacatcctgtctctacaaaaaataaaaaaaattagttggggctgggcgcagtgactcacacctgtaatcgtagcactttgggagcctgaggcaggggatcacctgaggtcaggagttcaagaccagcctggccaacatggtgaaacctcgtctctgctgaaaatacaaaaattagctgggcttggtggcggatgcctgtaatcccagctacttgggaggctgaggcaggagaatcgctcaaacccgggaggcagaggttgctgtgagccaagattgtgccactgcactccagactgggcaataagaatgaaactcaaaaaaaaaaaaaaaattagttgggcatggaggcacactcctgtagtcctagctacttaggagtcaaagtggaagaattggaggctatggtgagctatgactacaccgctatcttaattctccatgtttgctttctccccctcactgtctctttctgcctgtcagccttactaccacagtgaagtatatacagtaatctttgttagtaaaaagactggactatcctattagtcttaggagtctgatccccccaattttagtatatatgtttctctttcttcattttaaaatgtcagtcaattcaattattagtatgtcaataaaattaataacagaatgagacctttatttcatttttcgcatgtttttgtaaaaattaaggagtaccactttagaatggtagtccttttcaaaatatttctagtgtcttcatttattcttgtgaaacataaaattttagtccacagtgtattctaaatttgaggactttggttctcatttagaattgctaaaggacacaaggaaaatcacagcagcttactttttcctcaacggatatttgggcaccttcacgagtgttagataccatgctaggtcctgaggatacagatgaatgagacaaggccctcactgcgaagagtatttcagtgagaagatgggagaaacaaatacagatgctcttcgacttgggacagggttacattaacccatcgtaagttgaagatatgtttgatacaccttgcctactaaacattatagcgtagcctacagttggacaaaatcatctaacataaagcctattttgcgataacattttgaatatctcatgtaatttattgaataatatactgaaagtaaaaaacaatggttgtatggtttctattcaatgtgtattgcttgcacactatcaaaaatttgaaaaattgttaagtggaatcatagtgaggaagcatctgtatgcaggcaggcaattactgtacagcacattaagtgttgtgaccacatagaaatatgcctagtattaggttggaaaaggattcccagtggaaattggatcataaaccagtgtcatgaggatgagtaggaattagccaggccaaggagaagcaggatgataatggagggtgttccagccaaggtagtagcctgtggccagatgtcaaagtatggtgctttcaaggaattgtaagaagttcaaaaaggttggcacattggaagtaggaggcaaaggaaatgctaggaatgctaagagatgaggtcagctggagaatctatgtcttcacaagctttgtaggccatactagttaaggcatctggtctttaataagatttttggtyagggcataactcaataagatttggatttagaaagaccactctgacttcagtatggatggtttgtattacagttattcattccaaaggtcttggtggcctagactaaagtaatggaaatggagatatacatacatatatatatatttacatctatacacatactatatatatgggaagaggattagaggaggggaggaatcctaggtttcacacttgagtaattaggtagactgtagtgccattcactgagataggaagcatagaagagagaaaatgaggttcagatgagcttttgattttaaggagcccatggaacacccaggtagcatatccactgggtaaacacaaatctggaacgtaacagtgagatatgggctgtgtatgaagatttgagagtcagttgaccaattgaagataattgaaatctaactggggatgtgaagaatcttgttctcccaaactgatcaattcagtcgtattaaatactgtgtwtttcagacttaaaccattggatattgagtttatgaagcgtttgcatgaaaaagtgagtatcaccccacttattgccaaagcagacacactcacaccagaggaatgccaacagtttaaaaaacaggtgagcaggatgtgttaactcaggtttcttataccattctcataatttgcagtttttactatttttagtataatgtgttgcaatccattcctcttactgctttactgtgttgtcatttatgctgtattaaaaataactcttgaatcttctgccttagttttcccctcaaagctcttacccattatcatagtatccttatcctttgtcagtttttaaatatggctgttttaagtgtttttttttttttctttctttctttgagacggagtctcgctctgttgcccaggttggagtgcagtggtgtgatctcggctcaccgcaagctctgcctcccaggttcacgccattctcctgcctcagcctccccagcagctggtactacaggcacatgccgcacgcttggctaattttttgtatttttagtagagacggggtttcgccgtgttagccatgatggtctcaatctcctgacctcatgatctgcccgccttggcctcccagagtgctgggattacaggcgtgagccaccgcgccctgccaaatttcctctttaaagttaagaatattcaagaatatactgggcaaattatttactaaaaatcactacagaaagttgtcccatacttgggaggaaaaaggtaaaaaatatattagcattggctgggcgtggtggctcatgcctgtatcctactaagtcaggtaagtatgtgttaagtcctaaagttgtagtataggttgaacattctttttttttttagatggagtctccctctgtcacccaggctggagtgcagtggcatgatctcggctcactgcaacctctgcctcccgagttcaaatgatacttctgcctcagcctcccgagtagctgggactataggcgtgcaccaccacacctggctaattttggtatttttagtagagacagggtttcaccatattggccaggctggtctcaaactcctgaccttatgatcctcccgcctcagcctcccaaagtgctgggattacaggcatgagccaccgcaccccgcctaggttgaacattcttaaagagaaaattcaaaatgtgaattgctccaaaatctaaaacgttttgagcactgacatgccgctcaaaggaaacgctcactggagcattttgaattttggatttttggattaaggatgctcaaccggtaagtataacacagatattccagaattccaaaaaaattcaaaacacttctggtcccaagcatttcaaataagagatactcaacttgccccacccaggctggcatctctgcctcatcattaagtctatttctgttttcttatttgaaaacatacctaaaattcaggggttctttacctggggcccacagtttgctcccaggaaatctaatgaacctcctggaatcaaacattttggagagaaggccagtcacttttatcagaatgtcagatgggtcatggaccctcaagaattattttaaaaatgtataagtccagttaaaacattcacagtctcctttcctcaatgcaaaagttgccctttttgacattgcatatttagagtaaaaaaatttcattagtaagagatcctctttactagttttgtaaggagttttttgtttcttaacttgctatcttaaattattaagggttaagtaaggagttttaaataccagtaaaatcttagttataacaccaaacctcagaagtccttcctcttggcaataggtttattgtatttgtttaatctgatatttaatcttctgtgttacagtaagctgaaaccaaaattgagacatgattgttttatgtttgttgctatgatttttgaactttgttttttttttttttttaagagacaaggtcttgctgtgttgcccaactggcctcaaactcctgagctcaaagtgatcttcccacgtcatgctcctcccatatcacgtcactataggcacacaccactgcccctgttttattttgaacagttctttaatttttaggatattgtttcaagttactgtccttattggcaattttcccaccagtgacccccgtaccttgttcccagttccctctgccatgcccaggcaactttcagttgctgagctgaggctttaaaacttacatactgcttaaaaataggcaacggagaaattgattttcatctctcttttgtagtttacccttctactctcaagtaatattcgtatttgtgatacattatttaaaaataaaagtaaagaaccttaaagttcttggctccctttttcattttggttaccttaagattttttctaaagtgattctcccttcacttacaccactgaattttttaaatgtattatagaataaatatattttttgccaataatgagaaaatacatggtttccccttacaaaatttcaaagttgtttccggagagctcatttgttacgtttatgtatctatttctgaagattaaactacaataaggcaataatatagtacacttctctgtcatgcccttacgttgagtagtatgttagtgttaaatctcaaaaaaattgatctaagctgttttgcatttcccctccttgtttttaccccccaagttccggtgaaatattttttgaaaagactgggcttagtggaaatatatgtggtctgtttttttcttacagttgaaaatggtgaacattgttattttacaattctaagaaatatgttgataaggtaagtgcaagcaatcatggaaatagcatgagattttctttccctaaataagagttggacagatttactttttgccttctataaatgtagctatttaaatttatatcttcagtctagcaatgaagtaggcgctacatgtagatgattctttctccaaggttttgaagtcatgagcaaaagttacaaaataatttgtgtctagggatacataggaaaattagtctctgtactttgtcattatactttgtattgaggtttaatactgaaataactatggaaagtgaaatagaagagactctttcttaatgtaaaaaccgtgtgaaaagtatataatccaaggctagtttttgagtcaaaagctagaatttgaatgttaaaagttgcacagcctggtagctggtgagtagggcacattttacatactagaacatagtaaacaaaatcaatcttcctaccaggtaagaaaaaaatccttaaattgtgtcttgcacatctgctgaaaaagagacggaaagcctatgggagcaggacattgagaccatcctgattagaggaccaggactagtaaagaggatctcttactaatgaattagaaaagcagcagcagagaggaaatcatgaagaaatagtgtaataggactagagatgttagtaggtaaggaactaaaagggcatcaaaatgatcctcagtgttttcatgttgaggcacattccttcctctccctacctcactcctcatttcccacttctctctcttgcttctctacatctttaccacatactctctttatcctccagctttagatgtctgtcttaagttgatatctattcattttcatacctctacccactttcccaaaacataagaatctctttagctgtgtaaaaaaaaggtagtaacataaatctggataataattagaaattgtggaataacaagaaggtcattctcacaagtgagaagtgagggggaaattttaagagagtcaaacttctaccttaagaaatacagtagaaatgagagtgaattttgaaattaaagaaattggcatgtaattgatctttattttcaaaggagcaggtgtttttggtaggaactacatgataggattgattcagcagttggggttaccaggcctcacttagtagagaagagcaaatgcatgagaaggtcatcctctgggttttgagaatccaacacttcaggctctattatgaactattcccttcctcttccattcttaaggtgtgacttcaaaagaataactattaataatataatcttctatgacagtatataagtagagaatgtttaataaatcctaattgccattgcattcctcttgtttttaaatcttctatggtacttgcccagtgcttgacatggtggttttctataactttttcttgtgtattttaaaagtatacaatcaataattgcctacatacctaaaatgccatagaggggatatctagttactgagccagaggctactttattgagaaggagtctcgctctgtttcccaggctggagtgcagtggcatgattttggctcactgcaacctccacctcccaagttcaagcaattctcctgcctcagcctcccgagtagctgggattacaggcgtgcaccaccacacccggctaatttttgtatttttagtagagatgaggtttcaccatgtttgccaggctggtctcaaactcctgacctcaagtgagccgcctgcctcggcctcccacagtcctgggattacaggcgtgagccaccatgcccacccggcccagaggctactttgaatattcaaaagttcacagcctggcagctagtaaggggcctccctagtgtaagcattccagagcaaaccgaccatgcctgcaggaagaattaatatagcagaccagcaagacttttatgcctaaaaattctaaagttatatattgttaaaaagatgtatatttaatttagctcatgtctttatgacaaaggcatctagtggatatttaataagtacttgaaggaaggaaatacaataccagtattgcagatagatgtctgtaaatcccaagtaattgaaattttgcaggtcaaagaaatagtgttttcttctaagaaagaggcaagttcaaagaagtctttgctaattaagagacttaggtaaaccaaggaagacaatggaaaggaggaaaactatacaaatattttctgggtgtggagatgggtgtttcagaaatcaaatagggaaagaaaagaggagaagagagagttatggtatcagtgatgggaaatggaagagacaaattcctgaaactgtggggaaactgtattgctaattaccaaattattttgagaatggaggagtgggttgaatcataaaaggataaagcatatttaattaaatggaaataaagacttttataacctggaaaaaatcagaattatgtagtcatatagaagtgaaagtgattttagtgaaagggaaaatcattcattatctaaaatgttagatgacactaacaaaaatagcttaacaattagtaaattcaccttacttttattttacacattcatgcaaacatttcctgtaagtattcttccttagaacctttaatgatttttcagtgatgcgtgtaatatataataactaaaattaggccaggcacagtggctcacacccgtaatcccagcgctttgggaggccaagatgggagaattgcttaagctcaggagttcaagactggcctgagcaacatggcgaaacctcgtctctactaaaaatacaaaaaatagttgggcgtggtggtgcatgcctgtagtctcagctactcaggaggctgaggcgggaggatggtttgagcatgaaaggcagaggttgtagtgagctgagattgtaccaccgcactccatccagcctgggagacaaagtgagaccctgtatcaaaaaaaaaaaaacgaaaaaaatatcgggggaacccactcccaatatttcaacgtaggtttttttctgttttccataagtgtcagccagctgagaaagaaagagaaagagtacaaagagaggaattttacagctgggccaccggggctgacatcacatatcggtaggactgtgatgcctacccaagcctcaaaaccagcaagtttttattaaggatttcaaaaggggagggggtgtacgaacagggcataggtaggtacaaagatcacatgcttcaaagggcaaaaagcagaacaaagttcacatgcttctgaggaaacaggacaaagggcaaaaggcaggacttctgataagggtctatgttcaggtgcacgtattttcttgataaacattttaaacaacagaaaacaggatttgagagcagagaaccggtctgaccacaaatttaccaggatggagtttcccaatcctagtaagc

SEQ ID NO: 96237 - DNA, 119450 bp, Homo sapiens
cagaagctgggcctttagtacttgttacacagccggttgaacctgacagcagagctgggggctgggtagctggtggggagcagaggcccattctctggatcgctactctggtctactgtgtgctggcccctggctatggagataaaccaagagttgctctctgtcctcgggcagctcagtatgggcgggtaggcaggcacggatctgtaattacacaatagttcctgtagctgacccttctggggttttggaggggttagaaaaatgaattagatgggatccagggatttcttctagcttgctgagagagagatgtttgtttagccagcaaaagtttgcggaggacctactacgttctaggcaggcattaaggctatagcagggaccaacaaaaccaagtcccaaactcaatggaactcacatctagtaacaggagatacaacaggtgaagacataagaaaataatttcagacagcgagaaaggttatgaagaaaataaagtgatgtgaaggagagtaaaggaaggctgtgtacttgagatgggggtcagggaaggcctccccgaggggacatctgagctaagggacgggaaggagctgcccatgcaaagcactggggaggcacttccgccagcagaacaggcaggcgcaggcacatgcgaaaggaagtgcaaagcgcaggcaagcgcagaggtgggagtgacgagccagctcctgggcggctcctaaagtgggacaggagctctgcaggccccacagggaggcagggagctcaccttctaagccaacctggctgaagctgggagagagagttgggctcgtcctgcagccactgatatcaagcccctagatgacccaggcccaggagaggaacacagcctttggtgtctggtaaaggcctgtctcagggccatggggcttcgtgtcattggggcactggtgtgctcttacacacatttatcagcattctaggcacaaggcatagtgttaggtgacacaagggatacacaggttcacccatcagatgtcactcctcagtggctaagatttggctggggatgtggaggctttcctgagctaagatgagggggatagcagactcacctgcaatctgctcctcagtcagctggtcagcctgtaaaagcatgaaggggaaagtcagtcaccaggccggacagcacggacgcatcttcctcactcagcccaggccctcggccccagtgaggccagctccacgtgccattcccgccgggccagggaggagcatgccagagtcagggtctgaggcagagccagcgcctgatgataaagtctggtgattcagaaagctgggtaccagggtgggctggacactcaggcctgctggacgcacggcccgatgaagctgcccagacccacgggcttccaatctcaactcagcatgtgggagccacaggggcgggagaaaagcctgccccagccccaaaccagcagcgctggtgaggcctggcacaggtttgcatctcatcagtgagagccccagaggccgagtgaagggaacgattgccctggaggcctcatcaagaagctctagaaggctccaaactgaagcaggccagtccttgggtagggcagagggacgatgtctggggctatctctgctagtttctgtgtcacctatttggaggcggttggctcaggcagagtccacccaagtggcaaaaattctcctaaccggcggcccgagttgctcaagcacctaaagaactctggtcaggctggaggcaggcgctccaccccctgcgcacagtgagggcacagggccattctgttttgtttcttttgggcagaagggacaaacgtcagggagagggctgcagcgggcagcagcagaggactgaagctggcttgcactgcagtttttaaccctttccagcttgggcactctggggactggccagtgggtggcaggcagcccttgctgcatgcggggtttgggggtggggaggagatgcggggactggcttctcctgcactggtgtgctgggcatcagccaggcatagtgatcctatggggcaggagcggggctggggggttggggaggctgaatcccaacatttagctttagcagccaaaagacacattttccctggtttttgttgatgctgtgaagaaggcaccaccatcccgggaccatggtgggtctgttccccttcctttcacaatcagggaaaggggctccaagtctatagcatgttctagtctcgagtctgagagcctcagaaatagaagcagactattatgtgaatttgcagtattctacggagaggttccagaagctaggaacaaaccactgcctgcctcccctacccccatccccgtcccaaatattaacaatcactgatctaaaaaagttagaaaaaaaaaaaaaaaaacctaacggaagaagaacttgcaagccccaaataggcagaatgggaggggtaatcaaaatgatgatcacagaggggagagggcttagggagggggaaagaggaagggagaaaacggcacacatgcacattctggaaaagtccaaagtgtaaaggggaggtggggaggccaaatgaagattcttctgcattgccttcaaaaaagacagggtggttgggcttctaaatgccaacctggtagccccaggcccatgagcctcttgatccacctgccccccacctcccaccatggacaaaaaagcctggagccatcccttaggtcctgacacctgaggaagaggcttagggaaagtgagaagggaggatgggcttctggttaccgagaccaggcaatgcccagggagggtcagggaaagaacagagaggagggcagcagtgtggggaggtggctgccatcccatctgcttttcattctttcccctggcctagaatggaaaaagcgagccaggtcagggccttcccagcccactgttccgccctgcaagaagtccagctccccggacctttgggcagcactgtaaggggctgggggtgggggcgaggaggctgtgacaggctgcagactgccccgagcggctctgaaggccaccgtttgccagtctccaccaaaagactggaagatgcagatgaggcactgccatgttcagttctgtcacagggttgctgcaaataggcgtggctctgcatggagggcctgtcagatgctctccctcccatgttggagacccacttccctgcttggtcaaggaaaggtacagatctcaagcaaggttgccgcccagaaaaccgaccgcctaagaagatatcattgatccttgctcaaggtttcttccctttctagacctgaagactaaactttcaacaaaaactgtttccaaaataactcagctggtctcctgcttccttatccctcatcttaggctccagcaaggggctggacaagaaaaaaaaccatgaggtgggggagggaagagggtgtgatttctctgccttgccccagcccccagccaatgccagagagcagtgttagatgagatcagaaaccaaggccagggcccctcacccgggccaaggaggagccacagagctcaggccaaagtccaaggccagttaccagtgacttgtcccacctctaccttgctgattacaaacagaaagagaaactagttgtggccaaagcttgggtcctattctggaggtagggggcctgctagtgcttcagggccccttttagccaggttctgctgggggaaaatggggtagcggcaagaggagccatcaggtctgtgtcagcaagtatgagatctgatacacagcagcggctgcctgttctccccagccttgccagggaggatggctgcacacggttcccaggctcagcctggtggggctgtgggtgttgtgggtggcagggagtaggaaagaactagtctgctggttttctctcaaagccctgtgaattaacagacacgctcagcgagggccctgaatggaacaagtggccctcaggccgatcaaggggtctccccagaggcactctctgatcaagctctgcagcccccaccccgagggcacgggaataggcatctgattgtcactgacgccacactgtactgcactgtcatttggcacaagtgacgaggtgcagcatggtgcgtggggctggggatcatgagaaaaccggcgctcctgctgggaaaaggcagtgctcttggcctgaaaagggcagcgacagagtgaggcttctaggcttgaaaaagctggctcattcgaggcaccccaaactttgatctcccatccccatttcatgaggcttcagtgcgcaataggggcccgaacagctccgcccacctgctcccactgccccggtgtcttccacccagccgcgttcttcctgaggaaggaggacggtagaaaagcttcctccgggccctgcagcccactccccatccacactgagccgtctttgtcctggcctgtccctggagactggcagggtgctacccacatccacccccaaacctaggcccccctgactgccattcattttctccttccacctcacctcccaaccacccaagcccaagtcctcccccacccctcaccttggaaatccatcttctcttggacccaaacacaacactcccaccccgttaaaaaaattctgtctttctagagcaacagtcttaacccactagtaacctcggaaccttttctagctacttccaaattaaccccaagggtccctgtcccccgactactggcgagccccactctcaccatcccttttcaccacctccacgaccctgatccttctccgtcccggaagccttcaagagtatcttctaatctccgctgccacccaccccaggctcttcctcccataagcttgcacctcaccctcctcctcctctgcagtgctgggctctggagaccaccctcccccaccctcccccaccctcgggagtctcatctgtagaagtgaccgcccatccttgaccctctcctctgctccacaggagcccaggggtcgcccctccccgcccgggcccagctaccctccaccaccccatccaggagcagcccagcctcccttcgtcccccgttccccgcatcctctcaggaccaaacgccttcatcagggcccgaatagctcccctccccagcccatctttcttatttcgtcccctggggtccaaacacctccatcctgaaacccaacgccccatcctgggtccaaaatccttttgaggggtcccactgagggtcccgatcctccatccggggttcaaatgtcccctttaggggctcagatacccatttgtggacttaaacatcccatttggtgctaaagtcgcttctggaaacctctggtgatccagacgtcccgctctgggttcaacagcccccgacaacgcgggtagaaaagggtcccgaggctctcgccgggcccggacgccccccactctgggctctgtcgccccctcaggggtcctgccccgttaagcccgcctcagagcccgcagcctcggcgaccccccagcctcactcaccatggcgaggcccggggtgtccggagcacggggatcaaggttcctccggcggcggcagcagctgcagcagttccagctccgccgcgcgtccgcgcctccacactcactgcccgcagcgcgcgccgccgccgccgccgcctcccgccccaacggtccctcaacggccgccgcgcgcgccccgcctcgctcggccccgccccacccggcccgcgcgccgccgcactgcggctcccacggatccctccgcgccccgctccacacctacgggcccgcgaatctctcgtccccaccctgcacaggaattgggtttgccgccgggcgcgcgcgcgctcgctcccgtcgccggactactttccctcgccgcgcgccccgcctcccgggcccacttcactttcttcggcggaggggcacagctcggcggtgcgtgacgcgtccctctgtgagccgcgtcactattgggcctggcccatggcggaaatgagagcttggcgcccattggtccgaccttccctgcaatgcgtcaaactggggcgagccactgcaaggtggtggtgggtaagtctgaactctgtggccgcgtggggctttgaggagtaacgaggcgaagggggaaacggcgtcgccgttagagaagcaaatmcgtcgtttctgtggccaggaggtggtaaaaaggctggcgacaaatgcagaagggctttctcggctctcccctttaaccgacggacgatggttcaatccaaaatgctagggtttagaagctccgcccctaactgggcctttggaggtggcggggtctccaaggtgccacctaacgctcagaggttccgccctccgtggtcttgtctctgcgtcctaagacgcactcagccggtgggcgggacccctgggcccgcttcattcttgatccgctcagggtctgtgaaattaggaccatcccaggacagcctgtgggaacggggtattcattcagtcattcgtgctataagcatcaattaggcgcctgctgtatgcagggacctgagcttggctgggctggggagaccatactccccaaccagcctctccagacagacgacctctttccttattccagtgttccagccataggaggaaaaagaactgaaactttgtttataggagctcagaaaatgatcacccctgccccctcccccgtttaggataggagctgacagtctcctgcgtgtcccctccccaccatgttgatggttaagayatgggcaaacgagtcaggctggaccaatcattatgctccacctggaacagaatggagactgaaccaatgagagtccttccctggggtttggatctgcagcctgggcacaagaagccttttccttttgggtgggtccttcccatagattctgactatggtcattttcccactctgcsccctatcttgaggaacaaagtgtctagagaagaagagaaaaataaaactgacacagtggagaggtaaagaagatggccgggcgcggtggctcatgcctttaatcctaacacttgttactcagtctcaaatctcatgttaaaatgtgatcaccaatgttggaggtggggcctggtgggaggtgtttgggtcataggggtggatccctcstgaatgacttggtgctgtcctcacggtaacaagtgagttcttattctgttagttcacacaagatckgtattttttttgagacggagtcttgctcsgtcacataggctagagtgcagtggcatgatcttggctcactacaacctccgcctcccaggtttaagcgattctcctgcctcagcctcccaagtagttgggactacaggcacccaccactacacttggctaatttttgtatttttagtaaagacagggtttcaccatgttggccaggctggtctcaaactcttgagctcaagtgatccgcctgccttggcctcccaaagtgctgtyatcacaagaatacaaccatcaggagtgcctcaagggagaaatatcctctgagaatagccacagacaaagtggggaggtgggactaccatccccagccctggaaactctctctactctataacttggccaaaggagatgccaaatcagagtggctgttcgttagcaccatgctgtgggaggtttcttccatagctcccctgggaatgaacccctagccagctttcctatgctactgggatatcccctttgggacctcccccattcgggatgggagacgctctgatctttaatagagccaaggcaaacctggttttaaggtgccactgagtgctaaaaaggaggcagcaacctagcagaaaaaaagaaaccaacaggtcaattacgaagaatctgtaagcaaatggagccagtaaaagccaaaacaagccagacggagaaggctggaataagtgactaatccttcagtgcaaaggcatagatgtacattaacaacaaaccaaagcaaacagggaaccatgagctccccaaatggaccaagtaagggaccagtgactaaacctaacaagacagtaatatgtgagctttctaagaattcaaaatggcatttttaaggaaactcagtgaattccaagacgacatagaaaagcaacgcagaaatttatcagtgaaatttaacaaagagattgaaataataatttaaaaaaaacccaaacaaatcttagaactgagaaatacatttgctgaactgaaaagttcattagaggttctcaacagcagagtgggtcaagcagaggaaacaatcagtgaacttggagacgggctgtttgtaaatacatacagaagaaaaaagaaaaaagaatgaaaggaatggaaatcacctacgaaatatagaagacaaaatctaagaattattggtgttcaagagggagctgaggaggagcaaggggatagaaaggatattcaaagaaacaatggaagacattcaaaaattgcaaatatccaggtacagaaaggccagagaacaccaaatagatttgattaccccaaggcatataataatcaaactctcaaaggtcaagaacaaagagaggatcctagaaacagtaagagaaaagaaggaaataacacttaaaagagctctaatttacctggccacagacttctcaatcaaaaccatgaaggccatacaagaatactgtatcaagcaaagctattattcaaatatgaagaagagataaagtttttcccaaataaaagcagagagaattcaccactaccagatctgtattataagaaatgctctcttgaagaaagacagttccagagagttcctcaatccggaaaaaaaaaaaaccatgcaaaaagaaaaaaaattttttttgagacacgatcttgctctatcacccaggatggagtgcagtggcccaatcatagcttactgcagcctcaaactgscaggctccagtgatcctcccacctcagcctcctgagtagctgggactacaggtgcacaccaccatgcctggctaatttttgtattttctttctggtagagatggggttttgccatgttgcccaggctggtctcgaattcctgagctcaagcagtcttcccccattggcctcctaaagtgttgggattacaggtgtgagccatcattcctggccaaagaaaatatttgaaggtataaaacccattggtaaaattaggtgcacagagaaacccaggatactccaatartgtaattgtggtatgcaattcattcttaactctaccataaagcctcaaagacaaatctatcaaaaacaataatattgagctgggtgtagtctcagctacttgggaygctgaggcaggaggatcacttgaacctaggagtttgaggccagtctgagcaacacagtaagaccccataattaaaacaataatagctatagcagcttgttaaaagacaagcaaaataaaaatatgtaaattgaggaaacaaaaagtcaaaatgtgggagggaaggagataaagtgtggagtttttattcattgtttctatttttttctttgtgatctaagatgttatcgctttaaaataacttgttataagattttttttagaagcctcaaggtaaccacaatgcaaaaacctataatagattcaataaaaataaaaagtagcaagttaaaacgtactaccagagaaaatcacttaaccacaaaggaagacagtaagaaaggaaaaaagggggccaggcacggtggcccacacctataaycccagcactttgggaggctgaagcaggcggatcacctgaggtcgggagttcgagatcagcctgactaacatagagaaaccgcttctctactaaaaatacaaaaaattagccgggcgtggtggcacatgcctgtaattccagctactcgggagactgaggcaggagaatcgcttgaacctgggagkcggaggttgtggtgagccgagattgtgccattgcactccagcctgggcaataaaaatgaaacttcatctcaaaaaaaaacaaaaaacaaaaaacttgttataagatttttttataagccttaaggtaaccacaatgcaaaaacctataatagattkaataaaaataaaaagtaacaagttaaaacatactaccagagaaaatcacttaaccacaaaggaagacagtaagaaagaaaaaaagggggccaggcatggtggttcacgcctgtaatcccagaactatgggaggccaagggaggcggatcacttgaggtcaagagttcgagatccacttggccaacgtggcaaaaccccgtctctactaaaaatacaaaaattaggtgagtgtggtggtgggtgcctgtagtcccagctactcgggaggctgatgcaggagaattgcttgaacccgggaggcagaggttgcagtgagtcgagatcgcgccactgcagtcatgactgggcgacagagcaagartctgtctcaaaaaaaaaaaaaagaaggaagaaaacaaccagaaaataagcaacaaaatagcagtagtaagtccttacttatcaataataacatgaatgttaaggaaataaattatccaattaaaaggcataaagtggctgaatggataaagaataagacccaggccaygcatggtggctcatgcctgtaatccaagcactttgggaggccaaggcaggaagattgcttgagctcaggagttggagaccagcctgggcaacatagtgaacctcgtctctaccaaaaaaaaaaaaaaaaaaaatttgctgggcgtggtggctggcgtgcacttgtartcctgactactcaggaggctgatgtgggaggatcacttgatactgggaggcggagatagcagtgagccgagatttccccactgtactccagcctgggccacaaaccttgtctcgaaagaaaaaagaaaaaaggcccaactctatgctgtctacaagaaacccagttcacctataaagacacacttagactgaaagtgaagagttagagaaagatattccgtgcaactggaaaccaaaaaaaaaaaaaaaaaaaaaagcaggggtagctatacttggtatctatatatggtatcagataaaagagactacaattccaagcttgtgaaaagaaacagagcaggtcactgtacaatgataaaggggtatattcagtgagaggataacacagttggttttttttttttttttgagatagaatctcgctctgttgcccaggctggagtgcagtggtgcgatcttggctccctgcagcctggttcaagcgattctcctgcctcagcccccgagtagctgygactataggtgcttgccaccacgcctggctatttttgtatttttagtagagacagggtttcactgtgttgaccaggctggtcttgaactcctgaccccaagtgatccacccacctcagcctcccaaagtgctggaattacaggcatgagccattgagcccggcctgtttaatttttgtatatggtgagagctacagctctagtttcattcttctacgtacagttttccgattttctcagcaccatttattgaagagattgttctccccccattgtatgttgttggtgcctttgctgacaatgagttggctgtaaatgtgtggatttatatctgggttttctattctgctccagtggtctacatgtctgtctttatgccagtatcatgctgatttggttaccatagctttgtcgtctattttgwawtcacgtagtgtgatgcctttagctttgttctttttgttcaggattgctttggctattttggggtctttcgtggttctgtgtaaattttatgkttgttttttctatttctgtgaagaatgtcgccggtattttgatagggattgcactggatctgcaaattcctttgggcagtattgtcattttaacaaaattaattcttctaaaccatgagcatgaaatatctttcaattttttgtgtatgtcctcttcagcttctttcattagtgtttttatagctttccttgtacagatcttttacttctttggttaaattgattcctaggtattttatattctttgtggctattgtaaatgggactgctctcttgatttctttttcagattgtttgctgttggcatatataaatgctactgatttggggttttttttggtttggatttgttgttgttgtttttgagacagagttttgctctttttgcccaggctggagtgcaatggtgtgatctcggggctcactgcaacctctgtctcccaggttcaagccattctcctgccttaggctcccaggtagctgggattacaggcgcccgccaccacacccagctaattttttgtatttttagtagagacaggctttcaacatgttggcaaggctggtctggaactcctgacctcaggtgatccacttgcctcggcctctcaaattgctgggattacaggcgtaagccactgcacctggccaaacgctactgatttttgtatgttgattttgtatcctgcaactttactgaatttgtttatcagttttaacagttttttggtggagtcgagtataagatcatatcaggccaggcatgaggttttgccgtgttgcccaggtggctcatacctgtaatcccagcattttaggaggccaaggcaggaggatcacttgaagcaaggagttcaaggccacactggacaacagagcaagacccaacctctacaacaaaattaaaaaattagccaggcatagtggggtgcacctgtagtcctagctactcaggagactaagacagggaggtcacttgagcccaggagatcaaggctgcggtgagctataatggtgctactgcactccagcctggacgatagagtgagtgagaccctatctctaaaaaataaaataataaataaagctattgtaaaaaaaatgtcatctatgaacaaggctaatatgacttcttcctttccagttgggatgctctggaaaattagctgcgtgtggtagcgtgagcctgtagtcccagctactggggaggctgaggctggaggatcgctcaaacccaggaggtggagattgcagtgagccgagattgtgccactgcactccagcctaggcaatagagggagaatctgactcaataaataaataaatatatayataaaataaaaataaataaataaacaaacaaaaatctattaaagacttaaatccaagacctgaaactatgagattaccagaagaaatcattggggaattgctccaggacattagtctgggcaaagattttttgtgtaaggcttcaaaagcaccggcaacgaagtgaaaatagacaaatgggattgtatcaacccaaaaagcttctgcaaagcaaagggaacaataaacaaagtgaagaggcacaccacakaatggaagaaaatatttrcaaactatccatctgacaggggattaataaccagaatatataaggagctcaaacaattcaacaggaaaaaaaaatctagttagaaagtgggtgtgggccgggctcagtggctcacgcctgtaatcccagcactttgggaggccaaggtgggcggatcacttgaggtcaggggttgaagaccagcctgaccaacatggtgaaacctcttctctactaaaactacaaaaattagctgggtgtggtggcacatgcctgtaatcccagctatgcagtaggctgaggagggagaactgcttgaacccagaaggcagaggttgcagtgagctgagatcacaccaccacactccagcctgggcaacagagcgagactccgtctcaaaaaaaaaaacaaaaacaaaaaaacaaaaacgggtgtgatggttaatacagagtgtcagcttgattggattgaaggatgcaaagtattgttcctggatgttaaagtgagtgtgatcccaaaagagattaacatttgagtcagtggactgggaggggcagacccaccctcaatctgggtgggtacccaccagctgccagcacggctaggataaagcaggaagaagaaaatggaatgggcagactcgctgagacttccggccttcatctttcttccgtgctggatgcttcctgcccttgatcagtctccaagttcttcagcttttggacgtgcggactttcaccagtgatttgccagggcctttggctacagactgaagtctgcactgtcagcttccctacttttttttttctttttgagatggagtctcactctgtcacccaggctggaatgcagtggcaccatctcggctcactgcaacctctgcctcccgggttcaagcaattctcctgcctcagcctcccgagtaggtgcgattacaggcgtgcaccaccatgcccgactattttctgtgtttttagtagagatggggtttcaccatgttggccaggctggtcttgaactcctgacctcaggtgattcaccttccttggcctcccaaagtgctgggatcacaggcttgagccaccacgctcagtcggcttccctacttttgaggttttgggactggcttcttgctcctcagcttgcagacggcctattcaccttgtgatcatgtgactcaatactccttattacactccccttcatatatacatctatcctatcagttctgtccctctagagaaccctgactaatacagtgagcaaaggatctgaatggacgtttcttaaaagaagacattcaaatggctaaggggtatatacaaaaatgctcaacatcgctaattgtcagagaaatgcaaatcaaagctacagtgagctatcacctcaccccagttaaaacggcctttataaaaaggtggatgctggcaaagacgtagagaaaggggaaccctcatacactgttggtgggaatgtaaattagtacagccactctggagaacagtatggaggttcctcaaaaaattataaatagaactaccatatgatccagcaatcccatgctatgaatacacccaaaaggaaggaagtcactgtatccaagaattaaacaaaaatctattaaagactcaaatctaagatctgaaactatgaaactaccagaggaaaacactggagaaatgctctttgcattcacatgtttattgcagcactgtttgctgcaataaccaagataatggagtcaatctaagtgcccatcaaagagcgaatgcataaagaaaatgtggtatatggttgagtgaggtggctcacgcctgtaatctcagcactttgggaggtggatcacttgaggtcagttcaagaccagcctgcacaacatggtgaaaccccatctctactaaaaatacaaaaattaaccggtggtggctcatgcctgtaattccaactactagggaggctgaggcacgagaattgcttgaaccctggaggcagaggttacagggagctgagattgcgctactgcactccagcctgggtgacagagagagacgctgtctcaaaagaaaaaaaaaaagaaaaaatgtgctatatgtacacaatggaatattattcagccataaaaaagaatgaaattctgacatttgcagcatcatgttaagtgaaataagccaagcacagaaagacaaatatcgtatgttttcattcatgtgtgggtgctgaaaaagtggatctcatgaagatagagagcagataggtgattcctaccagtagccaggaagggtagggtggaggggggaaatgaagagaaattgactaatgggtacaaatgtatagctacatttggaagaaatgtaagatggaagaaataagatctggtgtttgatagatcagtagggtgagtatagtttacaataatctgttgtacatttcaaaattagaataatagaagaagacttcatgtttttagcataaagatgaatatttaaggtgatgaatatcctaattaccctgatttgatctttttttttttrttttttttttttttagacagagtcttgctctgtcgcccaggctggagtacagtggtgcaatctcagctcactgcaactgccgcctcccgtgttcaagcaattttctacctcagcctcccgagtagctgggattacaggtgcccaccaccatgccagcctaatttttgtatgtttagcagagacagggtttcatcatcttggccaggctggtcttgaacttctgaccttgtgatccacccacctcggcttcccaaagtgttgggattacaggcatgagccaccacacctggccccctgatttggtctttacaaattatataaatttattaagttaccgcatgttccctgaaaatatgtatatctgttatgtatcaataaagaaataaaatttaaaaaagaaaaaaaaattgcaacccaatgctctcaattccctttacctggctttaatgtttttcatagcagtgcccacctgctaaaataaaatataatattatcttctttttcattatatttattgtttgattctttcactggaatataagttccatgaggtcacaattttctgtctattttgtttgctgttgtatctccagtgcctaaaatagacccaggaacatagtaggtgctcaataactatgtttttttgagtcagtgtcttgctatyttgcccaggctggaatgcagttggtgcaatcttggctcattgcaacctctgcctcccaggcccaagcaatcctcccacttcagcctcccaagtagctgggactacaggtgcatgccaccaggcccagctatcaataactttatttttgtttgagatggagtctctctctatctccyaggctggagtgcaatggcatgctctctgcccattgcaacctccgcctcccgggttcaagggattctcctgcctcagcctcctgagtaactgggattacaggcatccgcaaccatgcctggctaattttttgtatttttagtagagatgggttttcatcatgttggccaggttggtctcgaactcctgacctcaggtgatccagccgccttggcctcccaaagtgctgggattacaggtgtgagccakkacacctggccaatatctatttttcgaataaataaataagtatggggagatggaaactctcataaaatgctgatgggagtattgatacaatcatgccagcgagtgtataatttaggatagactaggtcacagtgcagtaacaaataacttcaaaaatctcagttagcacaattaaagtttatctctcattcacacaaagtccactgtaaatcccagctactcttcaggccagctccatgtgttaaccctgtaacctagcatctttcatctctcctaaaggcctctatgctgccagagctggggagagagagatgagaaaatctctcaggctgggcgcggtggctcacgcctataatctcagcactttgggaggccgaggcgggcggatcacgaggtcagtagatcgagaccatcctgactaacatggtgaaaccccatctctactaaaaatacaaaaaagaaaaaaaaattaaccgggcgtggtggcgggtgcctgtggtcccagctactcaggaggctgaggaaggagaatggcatgaacccgggaggcggagcttgcaatgaaccgatattgtgtcactgcactccagcctgggcgacagagcaagactccgtctcaaaaaagaaaaaaaacaacaaaaaaaagaaaatctctcaggaggttttcattgcctcggtctagaagtgacatatgtcacttcagcttatatttccttgtccagaaccagtcgtgtggtctcatctcactgcaagtggatggagaaatatattttctcatgtgcctttgaagaaggaactggaaacagaatttggtgagtgtataccatggtctcagccacagacaaccatttgacaatgtctattggcaagttgagcatgtaggtttactaagacctagagattctcctcttgcatacatccttagtggcttgaaaacagaaggcagtactgtgtattagaaagtttactggcttgggagtcaggagacctcacttgtagaaatgtggtgtccaacatggtacttactctagtaagtatgatatgcgatcatatgaattaaaattcattaagattaattgcattaaaaatatgaagtctcagttgcactagccacgttttaagtgctcagtaaccacatgtggctacggtgttggggaggacagaagagcatgtacatcatcacagaaggttcttactggacagcactttgtacaactagctgcaccattcacaccatctctgttggagccagctttcatatgtgtagaaggaaagggttacaccagctgcatcagcatcaactgtaaacttttgagaaaatccaatttctgggccccaccccagacttactaaatcagaaactctgggattgggctccagaaatatgtgttttgacaagccctccagatgacttggaaacatcctaaaatttgagaatgttgttagactatctttaagaccaattcctcctagcttggaacttctaccactcaaaaatgtaggatactagagggtgggaagggatagggggaggcttgttagaggtgtgatccaaaagtatrtgagacaggttgcaatcaatttagaaagtttatcttgccaaggttaaggacactcctgtgacacagcctcaggaggtcctgatgacatgtgcccaaggcggttggggcacagcttcactttatacattttaaggagacatggacaccactcaatatatgtaagatgtatattggttctgtctggaaagatgggacaacttgatgcacctaccagggttggggggtggggtgcttccaggtcacagatagataagagaccaacagttgcattcttttgagtctctgataagtctttcactgaatacacaatttatatgtgagacgccatagaggagtagtcacttatgcctgagtctcgcttagtgaatctgcatttttacataaacaactgggcagaggaagccatcagatatgcatttgtctcaggtgagaagagggatggcgttgggttctgtctgtcctttgtcccccatctgtgaagataaggtatcagttatcaatttacattgccagggtgaaattcaacagaactgtttcaggataaagatcttgaggctcacaagaaatttcctttctgacatattttgagggaactgtgtagctttttaaatttttgtagttatcttatttaggaataaaacaggaggcatgtttgcctgatggatgtcccatcttgacttttccctttggcttagtgatttctggaggagatttattttcctttcacaaaggacatgaaattaccctgctctgatcatcatacattttctttattgaaatatcactatgtttcccatgaatatatgcaattatttgtcaacaaacaaaaaacccaaacaatcaaaatgtattgtcaacagaagatttgtaagagtaacattcccttgtccagggaccatggagggggaagatttcatttgacttgggtagtggccaccattttaatccatccatttaatttcttttttttgagacggagctttactcttgttgcccagactggagtgcgatggcgcgatcttggctcatggcaacctccacctcccgggttcaaccgtttctactgcctcagcctcctgagtagttgggactacaggtgcctgccaccacgcctggctaattttgtatttttagtagagacaggttttctccatgttggtcagactggtcttgaacscccgacctcaggtgatctgcctgccttggcctcccaaagtgctgggattacaggtgtgagccaccgtgcctggctcatccatttagtttctttaatgactaatgatgttaggtatatatttatgtgctccttggccatttatatatcttctttggagaaatgtctacttagatcttttgcccattttaaaattgagttatttgtcttcttgctgttgaattgtaagtgctctttatatattctggagtctagacactacttatcagattgtatcagatgatttgcaaatctcccatcctgtaggttttcttttcacttcattaatagtgtcttttgaagcacraaatttaaaatttgatgaggtctaatttgtatgtatttttttattgcatgtacttgtgatgtaatatctaagaagccatgatgtcatatctaaggttacaaagatatacagtcgtgcaccatataatgacattttggtcagtgatggaccacaaacatgatggtcgtctataagattataatactgtatttttactataccttttctatgtttaggtatgcaaatacccattgtgtttccattgcttacaatattcagtaaagtaacatgctgtacaggtttgtagcctagtagcaataggttttatcctctagcccacgtattcagtaggctctaccatttaggtttggataagtacactccatgatgtttgcacaatgatgaaatcacctaacgatacatatctcagaatgtatccccattgttaagcaacgcacgactatacatctatgttttctgagagttttccaggtttaactcttaacatttagycctctgatccatttcaagttaagttgtatatgtggtgtgaggcaggggtccaacttcctgtttttacctgtggatatataattgtgccagcaccatttgttgaaaaggcattgaatttcttcattgatttttttggcacccttgttgaaaatcagttgactatagacatatgagtttttaaaatagactctcattcctctgtgtttatgtaagtaccaaaaatcttgattactcagcttagtagtaagttttaaaattgggaagtgtaggtcctctgactttgttccttttcaagattattttggctattctggattccttgcattttcatataaattttaaaatcagcttgtcaatttctacaaaaaaggcagctgtaattttgatgtggattgtgttgaatctgcagttctatttggggaatattgccatctaaacaatattaaatcttccaattcataaacacagagtgtctctccacttatctatgtctgttaacatttattttgatgttggttttgtgcattatagtgtaaaattcttacaaagtcttcttaagttcatacctaagccttttattctttttgatgctattacgaatggaattgttttcttaattttattttcagactgttaattgctgatgtatacagaaatacaactgatttttagatattgatcttgtattctgaaaaattgctaaaattgttaattagctctagtagttgtgtgtgtgtgtgtgtagattccttaagactttcctatgtgtaagattatgtcacctgcaaatagagttttccttcttcctttatagtctgaatttttttttttttttttttgagacagagtcttgctctgtcgcccaggctggagtgcatgcagtggcatgatctcagctcactgcaacctccatctcccagttcaagcaattctcctgcctcagcctcccaagtagctgggactacaagcatgcaccatcacgcccagctaatttttgtatttttagtacagacagggttttgccatcttggccaggctggtctcaaactcatgacctcaagtgatccggctgtttcggcctcccattgtgttgggattacaggcatgagccaccacgtctgcctggatgctttttttttttttttttccttgcctgactgtcctggctagaactcccagtacaatgttaaatagacacaataagagtagacatctgatcatgtgcctgatcttaggggaaaggtttcagtctttcataattaagtataatgtcagctgtaggtttttcataaatgccctttattaggttgaggaaatttcattctattcctagtttattgagttttaattttttatcatgaaagaatgttggattttttgtaaaatgcttttttttcacctgcagagatgatcatgtacttcttgttctttagtttgttaatatggtttattacactgatgaattttcatgtcttgcattcctaaaataaatctcacttggtcatggcatataatcctttttatatgtttctggaatcagtttcgtagtattttgttgagaatttttttttttttttgagatggattatctctctgttgcccaggctggagtgcagtggcatgatcttggctcattgcaacctccaacccctgggttcaagcaattctcttgcctcagcgtcccaagtacgtgggactacaggcatacgccaccacgcctggctaatttttgtatttttagtagagacggggttttgccatgttggccaggctggtcttgaactcctgacctcaggtgatccgtccaccttggcctcccaaagtgctgggattacaggtttgattctctgcgcctggtggagaatgtttttatctatatttataaaggatattggtctctttttggttttctttttttacgatgtgtttgattttggtatcagggtaatattgacctcatggaatgaggtaggaagtgttctctcttgttctatgtttcaaaaacattcgtgagggatttgtgttgattcttctttgaatatttggtagaattcaccagtgaaaccatctgattgtggacttttctttgtgaaaacttttaaaattaccatttcaatctcttgttataggtgtactcagattttctatatttttcagtcagttttgatagtttgtgtctttctaggaatttgaccattttacctagactatctaatatgttggcacgcacttattcatggtattcccttataagcctttgtatttgtgtaaggtcagtagtgatgtctcctccttcattcttgactttaataattttagacttttcttttttcccttggttagtctagttaaagatttgtcaattttgtagatcttttcaaagaaccaaacttggtttggtcgattttctcttgtttttcttttctctgtttcatttacttcctttctaatctttattatttcctgccttctgcttgctttgggtttagtttgcacttctttttctagtttcttaagatggaagattaggttattgatttgagaccatttttctctttcaatataggcaatttgcagctgtaaattttcctccaagcactactttagtgtatcccatatgtttttgtatatcatgtgttcattttcattgatctgatttgtctttcacttaaaaaacttttttttaaacttttctttttattttttagagacaggatcttgttctgttatccaggctggagtgcaatggtgcaatcgcagctcactgcagcctcgaactcctggcctcaagcaatcctcctatcttggcctcccatagtgctgggattataggcatgagctactgcacctggccttattcttagatatttcaattttatttttttgacagagtcttgctctgtcgcccggactggagtacaatggtgtcagctcactgcaacctctgcctcctgggttcaagcgattctcctgcctcagcctcctgagtagctgggactacaggtgcatgccaccatgccctgctaatttttgtattttttgcagggatggagttttgccatgttggccaggctggtgtcaaactcctgacctcaggtgatccaccttcctcagcctctcaaaatgctgggattacaggtgtgagccactgcgcccggctggtatttcaaaaacttttgttgacaatgttaatggcatccaatttccacaactttaaagttgtggctctttgtttttttttttacatggagtcttaccctgtcgcccaggctggagtgcagtggcgcgatcttggctggctgcaacttccacctcctgagttcaagcaattctcctgcctcagcctcccaagtacgtggggattacaggtgtgtgccaccatgcccagctaatttttgtatttttagtagaggcggggtttcaccatgttgcccaggctcatcttgaactcctgacctcaggtaatccacctgcctcagcttcccaaagtgttgggattacaggcgtgagccaccgcgcccagccaagatgtggctttttataagttatcttcaattcagccagggtgacccggttggaacygctagtgcccctataggggcaggcactgatggcacagatggagatagatgctggccacagagggcctgaggcaacaacaatactgggttttactctggattctgctctggctcatacaccaccaggtctcaggcttcacctaacctctactactactacttattattattattattttttgagatggagtctcgctctgttgcccaggctggagtgccgtggcgccatctctgctcactgcaagctctgcctcccgggttcatgccattcttttgcctcagcctcctgagtagctgggactacaggtgcctgccaccgcgcccggctaattttttttgtatttttagtagagatgggttttcacagtgttcgccaggatggtcttgatctcctgacctcaagatctgcctgcctcggcctccctaagtgctgggattacaggcgtgagccaccgtgcccggtcctgtactatatattatttttataccaattttacaaatgaggaaactgaggctgcagcagacaaggaatacatagatagtgaccaaggaatrcatagatagctggaactgggacggtggcctacctggccccaatgtctaggatcttgaccttcgtgctatgtctaggatcttcttccagagctagccatgagttatctagagatctttagtagttatttaataaaaggcaggtccagcccatggatccttaaatatcccccaaagagacaccttctctccaagtgaccctcttgtccctaaaactattattagattcttggattcttagagctccaaggccaagaccttgctgggtcttcaccctcccatcctctgcagtaaaacatcccccttttcccagagagtgggcaacgagggaccaagtgggatattccagtctaccctacactgcctttgagagtatgtcagattttactttctacagatagcgacaataatatctcctattccacatgcttctagaatcaagagatggggtctatgtctcttcccttgagcttgagcagtccctactgccttgactaataaagtggaagcgatgatatgacttccaaagctggatcatacaaatgctatgcataggccaggcatggtggctcatgtctgtaattccagcactttgggaggctgaggtgggcggattgtgtgagcccaggagttcaagactagtctgggcaacaaagggagaccctgtctcaaaaaaaaaaaaaaaaaaaaagacatgccttgttctcttagaatgcttgctcttggaatccagccaccatgttgtgaggaagttcaaggagccagaggaaaggatcatatgaataggaatgaggtcccaagctcacacttcccagaaaatagctaggaaagtagttgtcttcttcaaagcagattctgatgctattcagctaacaccttgcagagcagagaactgtccctgacaaacctctaaactgcagatttgtgagtaaaataaataattgttgttcttttaagttgccaggtttgggggtgattttttattctcttagcaattttcaagagtaaaatacattcttgaatattatagtataattagataattatagaataattatagttgtaattaaccatagtggccatattatacaatagatctcttgaacttattcctcctatctaattaaaaatctgtgcccttagaccaacatctcctcaaccctccaccacctataaccattacctttctactccctatttactttaacttttttacaatctccatgcgagtgagatcatgtggtatttgtttttctttggcttatttggctggcttatttctgggttatttcacttacagtatcctccagatttgtctatgttgttgccaggaacaaaatttccttctttttaaggcagaatagtactccattgtgtctatgtaccacattttctttatccattcatctgttgatggcaacttaggttcattccatatcttggctattgtgagtagtgctgtaatgaacaagggaatacggagatctctttgacatactgatttcatttcctctgtatgtatattgagttgtgggattgctggatcttggggtgatttgttatacagccataaataactaatacaaaaaacgaaacagcaaatcggaaaatggcagggcctttacttgggcccagaaagcacttactgcattgagtcaggcccacacccatatccaaagctggtctttctaaatagtctactggagaagagtagaagctttggagccaggcaaacacgagtttacaaacctggctccaatacttcccagctgtgtgacctggggcaatataatgggcctctctgaacctcagtcttctcttctgtgaaatgggcacaatcgtaatttttctcccaaaatttgtcaggaggatttagtgggattatacatccaaagtacttagcccagaacatagcacttgatgagagctcaataactgttagccatgaatcaccctgattattagatagctggatgttggatgcctcttgctgataaacccaatcagtcctgaaaagtctctcttgagggtggattgggagccttttgagtcccgccacattccctctacgctgaagttctctgcctactgtcagagagacctgggtttgaataactcataggtcctccagtttatgtgtgaccttgggcaggagactaaacctctctggttttggaatcctcatctgtaggtagggcagtcataattccccacttaaggggttgtagtgagcatggagaatgtagaggggatagaacaatgtctggtacacaataggagaccatgacgggggctgagagcaggaggggccatcctcccatccttggtagaatatccagggatttctgtccctagttctgccctccactgcaagcctggctatttggggtggtgaaccctccagagaggaagggagggaagggggtctcctagctgggatagccctgctgttctctcattacccaccagtgggcgctctgatgaagtgaagatgacagccgaccacaaccgcgatgcccacagctaccaccatttatgtctatctgtgcgtggggatgagtgctttgattcatttaaatgagacaggactctcaatgtctttgtttttttgaaaaaatctagcagagtcacaggcttttatttccattatgtttgtgggagaaaagtgccaacgatcgtcttctggtttagagagagaaaacctacagtcatttcttccttttaataatagagagatgatggctgtcaccatggcaacagatgatcaggaagaaaaccaatcagaattgcaggcttctctgggagattatttttctcaagattggcaacaatttctaggagaatctcacaagcctcttttgttccaattatctttccaaggaccgtcttaaatgaacagaccaggtggtgacaggaactcagggctcctgaccgcacagcaaaacaagacaggcgttcttgggaatattttcaattacgttatcaggacagattctttagacagttttattatgcaaaacagtatctctttcagtgtagttgcagggaaaaaatatattcacttctattttacattttaaacgttatctttatgttccttaaattgttttttaaaaaacccttttttccatgactttttgacactccctttgttaatggttggagacttgcattttatttaatttttaaatgaatttacttatgtttttaagatagggttttcctctgtcgcctaggccgaagtgcagtggcatgtacatggctcactgcagccttgacctcctggtctcaagcgattctcctgcctcaacctaccgagtagctgggatcaaaggcctgcaccaccatgcctggctaatttttaaaagcatttttttgtagagacaaggtctcactatgttgctgaggcgggtctcgaacttctaggctcaagtaatcctcctgcctccttagctggtcttggtggtacaatcctgctgcctctgcctcttggaggcaatccctctgcctctgactctcaaaatattgggttacaggtgtgagccaccatgcgtgaagcccaagttatgtgacattaggcaagttacttagcttccctgtgcctcggttttcttgtctgtaaaatgggcataaaaaagtacctactgtggtagttttaataagtgtctacaatttatttaaattcctcttatacaaagatggattctggccaggcatggtggttcacacctgtaatcccagcactttgggaggctgaggtgggagcattgtttgagcccaggagaccagcctgggcaacagagcaagaccctgtctctattaaaaaaatatatatatatataaaatattaaatatatattaaataaatatatattttaaaaatacatatatatatatatatatatatttttttttttttttttttttttttttttgagatagagtctcactctgtcgcccaggctggagtgcagtggcgttatctcggctcactgcaagctccgcctcccgggttctcgccattctcctgcctcagcttcccgagtagctgggactataggcgcccgccaccacgcccggctaattttttgtatttttagtagagacggggtttcaccgtgtcagccaggatggtctcgatctcctgacctcgtgatccgcccgcctcggactcccaaagtgctgggattacaggcgtaagccaccacgccctgcctaaaaaaaatatttaaaaattgaaaaaataaaaaggtggattccagttcttgtcctctagaatacgggcagccctattgacttgcttctcatgaacagatgataagtgatttccgaggctagattagaaaaggtgacacagccactccctgggtctctctgtcttgggatttgtgccttgggagctctgagtcaccatggtggagagaccctatggagagagaagggagccaaggagcctttggtaccagatatgtaatttaggaaagctttaaaatgatcccacacccagccactatctgactgcaaacttattagagacctagagctgccactccctagctgggctgctcctgaattcctgactcctaggcactgcaagagataacaaatgatgatgataatgatgatgatgatgatttttgagatagagtctcagcctgtcacccaggctggagtgcagtggcatgatcttggctcacggcaatctctgcctctcgggtttaagcgattctcccacctcagcctcccaagtagctgggattccaggggtgcgccaccaagcctggctaatttttgtatttttagtagagacggggtttcatcatgttggccaggctggtctccaactcctgacctcaagtgatctgcctgcctcagcctcccaaagtgctgggattacaagcatgagccaccacgcctggcccattgttgttttataccagtgtatttgtctgttttcacactgctataaataactgcctaagactgggtaatttataaagaaaagaggtttaattgattcacagttctgcatggctaaggaggcctcaggaaacagacaataatgccggaaggggaaytagggatgtcttgtatggcaggaaatgagaggtcatgtgaaggaggaactgtcaaacacttattaaaccattagatctggccgggtgcggtggctcaagcctgtaatcccagctctttgggaggccaaggtggacggatcacgaggtcaggagatcgagaccatcctggttaacacggtgaaaccccgtctctactaaaagtacaaaaaaaattagccgggtgtggtggcggacgcttgtagtcccagttactcgggaggctgaggcaggagaatggcacgaactcgggaggcgcaggttgcagtgagccgagatcgcaccactgcactccagcctgggtgacagagcgagactccgtctcaaaaaaaaacaaaacaaaaaacattagatctcactgtcatgagaacagcatggggaaaccatccccatgatccaattacctccttcccttaacaggtggggattacaatttgagatgagatttcggtgggaacacagagccaaaccacatcaaccagtaaatcttgggctgatttgttacacagcgatagataacttactacgtcaggatcatggtaagtgagatcatgtatatgaacataatgtgtatgatcatgaatatctcgcacacagacaatggactgaaaaagagaaatcatattattcttaccattttctgcttgcttgagtgttgtagactgaatgtttgtgtcctctctgaattcatatcttgaagccaaaaccatcagtgtgatattatttggaggcagggaactttggaggtaattagatttagatcaggtcaggaggctgggacccccatgataggattagtacccttataggaagaggaagagaggctgggagtggtggctcaccctgtaatcccaacatttgggaggctgaggcaggtggatcacttgagcccaggagtttgagaccagcctggccagcctggccagcctggtgaaagcccatctctactaaatacaaaaaaattaaccaggcatggtggcgggtgcctgtaatcccagctacttgggaggctgaggcaggagaatcgcttgaaccctggaggcagaggttgcagtgagccgagatcacgccactgcacttcagcctgggctatggagcaagactccatctcaaaaagaaagaaagaaaaaaaacaagaggaagagaaaccagagctcacgttctccacgtgcacacactggggaaaggccatgggaaggcacagcaaaaaggcatctgcttgcaagtcaggaagcaaggcctcaccaacaactgaatctgctggcaccttcatcttggactccccagcctccagaactgtgaaaaaataaatgtctgttgtttaagccacccaatcttttttttttttttttaattttttgtagagacaaggtcccatcatgtggttctgcctctgctttccaacctgttgaaattacaggtgtgagccactgcacctggctgtttttaatttctttctttctttcttttttttttttaaagggatggggtctcaccctcacccaggctgtagtgtgatcccaggtcaccgcagcctcgaatttctgggctcaagccatcctcttgttcagcctcccaagtagctgggactacaggcctgcaccactttgcatagctaatttctaagttattttcaaagaaaaagggtctcattttgttgccagggtggagtgcagtggtgtgatcttggctcactccaacctccgcttcctgggttcaagcaattcttgtaccctcagccttccaagtagtgggggttacaggcacacaccaccacacctaactacgtttttgaatttttagtagagacaggatttcgccatgttggccaggctgatctcgaacttctgacctcaggtgattcacctgcctcagtctcccaaagtgctgggattacaggcatgagccactgtgcctggcctcccaatatcatatatatcatatatataaaatatgtatctcatatataatatcatatatatatatatatatatatatatatatatatatatatatgtactttttttrttttttgaggagtctggctctgtcacccaggctggagtgcagtggcacgatctcagctcattgcaaccttacctcctgtgttcaagcaattctcctgcctcagccttctgaatagctgggattacaggcgccagctaccatgcctggctaatttttgtattttagtagagacaggggttcaccacgttggccaggctggtgttgaactcctgtcctcgggtgatctgcctgcctcggcctcccaaagtgctgggmttatggacgtgagcccctgagcccggcctgtcacacacttttaaaccatcagatctcatgataactcattcactatcatgagaacagcgtgggggaaaccgcgcccatgatccaattacctcccaccaggtccctcccccaggcatgtggagattacaatttgacatgagatttgggtggagacacagagccaaaccacatcacagtgtgtggcgtgggggttggggattcctgccctagagcctccagaaggagcacatctttgattttaacccagtgcgacccgtgctagacttctacccctcagaactgcaagagagcaaatttgtattgtttaagccacttagcctgtagtcattcattacagcagcaagaagacctgaacacactggggctgaggacagagatgcacagggagggaaaggaatgagagacagaagtggtgagaatgaatgagatcggggagaacaggtgaagatggcaagagggcctgggcacagggcagccacggatcatgctcagggkagggaagaggaggtgcctggggaggctggcaagaaacggtcagagagatgacttgagcttgaaggacaaaagcccaaggctgacatctgttgcttgtgtgggcagtcaggagctcccacttctcagggatgttcccagcattgtctctgtgctgatgacttccagtgtggctgtcatgcccagccctgtggctggagcccggggccccattcagccttggttgcaattgtgtggaaatcaataactacaaattccaaaggtataaatgggaaacctgaatggagagataagggcataggtttcagagggagtatggccttgccaacaccttgaattttttttgtttgtttgtttttgagacagggtttcgctctgccatccagcctggagtgcagtggtgcaatcatagctcactgcagcctcaaactcctggttttaaataatccttctgctttagcctcccaagtagctaggactgcaggtgtgtgccaccacgctcagctaattaaaaaaaattttttttttgtagaggccagacaccgtggcttatgcctgtaatcccaggaggccaaggcgggcagctcactgaggtcagaagttcaagaccagcctmgccaacatgatgaaaccttgtctgtattaaaaatacaaaaattagatgggagtggtggcgggcgcctgtaatcccagctacttgggagactgaggctggagaatcgcttgaacccaggaggtggaggttgaagtgagcagagatcgtgccattgcactctagcctggacaacaagagtgaaactctgtcaaaaaaaaaaaaattttttttttttttggtagagagggggtcttgctatgttgctcaggctggtctagaactcctgcactcaggctatcctctaccatcgatctcctgaagtgctgggtttacaggcctgagccactgcacctggccatgactttatgttcatttaattaatcatatctgcaacaaccctgtttccaaatgaggtcacattctgagggactgggaaagagggcttcagcatatctttttgggaaacaccactcaacccataacgcttataaagagcattgtgtttgtgaggattgtgtttataatggcccacccaggtacgctaggataatcaccccatatcaacagccttagcttaattacacctgcacagtccattttgccaagtagcaaagctgttcacaagtctagggattagaacgtggatatccttggagggggcatttttctgtctaccacgccagttctctctctgagctccaggcttggctagacaagggattcctgaatgtctctctccagatgtctgctgggtactttccactcaccgtgtccaagttgatctcagcatcttcccccaccagtcctgttcctctcacatccccatcccagggatgactcctctgtctctcccagcagactcatctcctcctgtcctcctctcatccttgactcctgagccagagagctgagattctttaagcaactcaaagattcatttcttcagccaacatttcttccttccttccttgcttccttccttctttccttccttccttctttcctcctttctttctttctccttctttccttccttctttccttctttctttccttctctctttctttctttctctttcttccttccttccttcctctctctctctctctctctctctctctctttctttctttctttctttctttctttctttctttctttctttctttctttctttctttctgatggagtcttgctctgtctcgcaggctggagtgcagtggcaggatctcggctcactgccacctccaccttcagcgttcaagtaattctcctgcctcagccttctgattagttgagattacagatgcccgccaccatgctcagctgatttttgtatttttagtagagacggggttttgccatgttggccaggctggtcttgagctcccaacctcaggtgatccgcccaccttggccttctaaagtggtaggatgacaggcataagccaccacgcctggccttcagacaacatttcttgagcgcctgctaggtgccaagtcatcttctaggtactgggaacacagcaatgaacaaatcagacagcagtccctgtttttttgtggagttttccttctcatgggggggactcaggcagcaataatgtaaagacattaaatatgtggtttattatgggtttaaaaagaagctcagggccggacacggtggctcacacctttaatcccagcactttgggaggccgaggtggacagatcatgaggtcaggagttcgagaccagcctggccaatatggtgaaaccctgcctctactaaaaatacaaaaattagccaggtgtggtgacgcttacccgtagtcccaggtactcgggagtctgaggcagaagaatcacttgaacctgggaggtggaggttacagtgagccgagatcgtgccactgcattccagcctgggcgacagagggagactctgtctcaaaagaaagaaaaaaaaaaaagctcagtcctcttccccgacattttgctgatcctgcctccatgtctccctctccaggagtttgtcatcattgcgtcctcacctctaacctgctggctggttttggtaccatagtccctagcctggctcctccactcctgagccctgtgctgccctggaggaaggtggccacactgagcaactaaaaagatagaaagccaagttaaatttaaagttcagataaacaatgaggtgtttttaaataaatatatccaaaatgttgcatgggatatactcatactaaaaaagtatttgttgtttatctgaaattcaaatttaactgggtgacatgtttttataaaaaattctttttgaaaaaaaattttttttttctgagatggagtctcgctccgttgcccaggctggagtgcagtggcgccatctcagctcactgcaagctccgccccccgggttcatgccattctcctcctcagcctcccaagtagctgggaccacaggcacccgccaccaagcccggctaattttttgtatttttagtagagatggggtttcaccgtgttagccaggatggtctcgatctcctgacctcatgatccacccgccttggcctcccaaagtgctaggattacaggcgtgcgccaccatgcccagcccaaaatgtttttacgggtacagagtaagtgtatacatttatgggatacgtgagatattttgatacaggcatgcaatgtgtaattatcacattagggtaaatggggtatcccctcaagcatgtacaatttctttgtattacatacaccccaaatatactcttttagttatttaaaatgtacagtaaagtatgggtttgtttttttcttttttttttttagacagagtcttgctctgtcacccaggctggagtgcagtggtgcaatctcggctcactgcaacctctgcctcctgggttcaagcgatcctcctgcttcagcctcctgagtaggtgggattacaggtgtgtgccaccacacctggctagtttttgtattttcagtagagagagggtttcaccatgttggccaggatggtctcgaactcctgacctcaggtgatccaccgcctcggcctcccaaagtgctgtgattacaggtgtgagccactgcgcccggccctaaaatgtattgttgactgtagtcaccctgttgtgctatcaaatactagaacttattcattctatttaactgcattgttataactacgaaccatccccacttccccctgctccactacccttcccagtccctggtaaccattcttctactctccgtctccatgaactcaattgttttaatgtttagctcccacaaatgagtgagaagatgggacatttatttttccatgcctggctgattttactcaacataatgatctctggttccctccatgttgttgcaaatgacaggatctcaatctttgttatggttgaaaagtatcccattgtggccaggcatggtggttcacacctgtaatcccagcactttgggaggctgaggtgggaggatcacctgaggtcaggagtttgagaccagcctgccccaacatggtgaaaccccatctctgccaaagatacaagaaaaaatcagctgggcgtggtggtgtgcgcctgtaatctcagctactccagaggctgaggcaggagaatcacttgaacccaggaggcggaggttgcagtgagccgaggtcgtgccattgcactccagcctgggcaacagggtgagactctgtctcaaaaacaataacaacaataacaacaacgacaacaaaacagtacccattgtgcataggtaccacattttctttatccatatgtctgttggtggacactcagcttgcttccaaatcttggctgtggtgaactgtgctgcaacaaacatgggggtgcaggtatctcttggatacactgacttccttccttttgggtatatacacagcatgggattgctagatcatatggtagttctctttgtagttttttgaagaacctccatactgttctccagagtgtctgtactaatttacattcccaccaacagtgtatgagggttcccgtttctccacatcctcgccagcatttgttattkcatattttggataaaagccattgtgactggggtgaggtgatatcycgttgtagttttgattcacatttttctgatggtcaatgatgttgatgttgagtaccttttcatatacctgtttgccatttgtgtgtcttctgaaaaatgtctattctgatcttttgcccttaggcttttccaaatataagatcatattatctgcgaataaggataatttgacttcttcctttccaacctggatgccctttatttctttctcttttctgattgctgtagctaggacttccactactacgttgaagaacagtgggggaagtgggcatccttgtcttgctccagatcttagaggaaaggctttcagtttttctccattcagtatgattctagctgtatgtctgtcatacatgacttttattatgttgaggtatgttccttctatacccaattttttgagggtttttatcatgaagggatgttgaattctattaaaggctttgtcagcatcaattgaaatgatcatatggtttttttccctcattgtattgatatgatgtatcacattgactgatttgcatatgttgaaccatccttgcatccctgggataaatctcacttggtcatgataaatgtgagtgaccttgctttatctggcaacacaactatgaagtcagaaactgttcaaactaaggccaggagtggtggctcacgcctgtaatcccagcacactgggaggccgaggtgggcggatcacttgaggccaggagttggagaccagcctggycaacatggcgaaaccctgtctctactaaaaatacaaaactagytgggtgtggtggtgcaggcctgtgatcccagctactcgggaggctgaggcaggagaatcacttgaacctgggaggtggaggttgcagtgagccaagatcaagatcacaccactgcactccagcctgggtgacagagcgagacttggtctttaaaaaaaaaaaaaaactgttaaaactagaactttctacctcgtcactctgtttgccattgtttyccaccaggtggagccatggtcatatttattatcttaacatcttaacatgtttacttatggtaggatgacctgcagtggtccagcctcgtggtattcatgcccttctgggacctatacccctttgtgtgtagattgggcatagtgacaagcttctaacaaacagcatatggcagaagtgatgtgatgtcactcccggtacaggttactggaagactggtttatgtcctgctggtcctccccaccttgccttgcttgctctatggaaggggcttccattatgggaactgcctggggagaggctcatggggcaaggaactgatgcctccagccaacagccagcaaggacctgagggctgcccactgccatgagtgagtctggaggcagattttccaccctgagatgcctgcagctccagccagccccttgactctagccttgaggaacctacagccaaagccacccagttaccctcacccagattcctgactgctggaaattgtgacatcgtaaatgtttcttgttttaagccaatacatgttggtgtaatttttgttttgcctttgtttttgtctttttgagtcagtgtcttactctgttgcctgggctggcgtgcagtggtacgatcatggctcactgcagcctcggcatcctgggctcaagtgatcctcctgcctcggcctcccaaagtgccaagattacaggcatgtgccgcaatgcctggcctggtgtaatttcttatgtggcagtagataactaatacacttgttatatggcagtagataactaatacataactaataaatattcttctccccactccctctctttcccccatcactggacagtgatgtctgtgagggtagggaccattatcagtattgtaacctgtgtgtcatcagacagcacagcacagagtatgtttgtgcatgrcgttcaaaagttcgtggagtaggccaggcagaatggctcatgcctataatcccagcactttgggaggtcaaggcaggcagatcacctgagcccaggagtttgagaccagcctggacaacgtggtgaaactccacctctacaaaaaatgcaaaaattagcgggcctgatgtcatgtgcctatagtcccagytacttaggaagcagaggcaggaggatcacttgagcctgggaggcagaggttgcagtgagccaagattgcaccactgcactccagcctgggtgacacagtgagacccaatctcaaaaaaaaaaaaaaaaagatttgtggaataaatgcaggaatgcatgaacaagagttgttagttctcatataagcttttaaaagacygatgctcaagagcaagtaggaaagtgaaataccagcaaaataaaatatcttctctgsgtttgctctgggagagcaaagtaccagccaggtgtcagccagagaragagaatgatgaggagtaagatgtggatatgcatatatgtatccaggtatcygtcctggttctccagaagaacagaaccagtaggagatatagatatgatatatacacgtatgcatataaatacacatatatgctgctggagtttggatatttgactctccaaacctcatgttgcattttgatccccaatgtcaggggtgggacctaatgggaggtgtctgggtcatggaggtgaatttctcacaattggtttggtgtcagcctcttggtagtgagtgagttatctctctattagcacctgcaagagttcccctgggagctggttattaaaaagagactggcatcttcccattctcttgctcattctcttgccatgtgatttggacatgccagctacccttccacttctgccatgagtggaagaagcctgtggccctcacactgcagactggtgagtcaaatraacctcttttctttatgaattacccagtacccaggctcagattggttctttttttttttttttgagatggagtctcgccgtgtcgccaggctggagtgcagtggcgcaatctcggctcactgcaacctccgcctcccaggttcaagccattctcctgcctcagcctcctgagtagctgggactacaggcacacgccaccatgcccagctaatttgttttttgtatttttagtagacacagggtttcaccatgttcaccaggatggtctcgatctcttgaccttgtgatccacccacctcagcctcccaaagtgctgggattacaggcgtgagccaccgcgcccagcccaggtatttttttgatagcaaagcaaaacagactaagatatatgcacatacacatatatatacatacatgtatatatgtatgcatatatgtgtacatgtatttatgtatttatgtatttacttattgcaaatgaatgggcttctgccattttaggggctggctaggtaagtccaagatccacagggcaggctggaaactctcaggcaggagttgatgtcattcaaaagcaaaattccytcttcctcagggaaacctcagttctgctcccccaaaggcctttcaactgattggatcaggctcacccagattatctaggataatttacttaaagtcaactgatagtagatgtcagtcacatgtacaaaatactttcatagcaacacctaggttagtgtttgatcaaataactggatactagtgtttgatcaaattactgataaagacatacccaagactgggtaatttataaaggaaaagatgtttaatggacttacagttccacatggctggggaggcctcacaatcatggcagaagggaaaagtcacgtcttacctggtggcaggcaagagagaatgagaatcaagtgaaacgggaaacccttataaaatcatcagctctcatgagacgtattcactactacagaacagtacgggggaaccatcctcatgattcaattatctcccaccaggtccctccacaacacatgggaattatgggagctacaattcggagacaagatttgggtggggacacagccaaaccatatcatctaggtaaatggatataggaagctgaatarcacaattcataagggatgggtgatagggatttgaccatatgcattgcataagctggttgagccatctatgtaagggtgatctctctgcatctgctggtacagcctgaagtcagcagggcaggtattgggaagggaagatgggatacaaagtggggaagccagggcagacgaactgagaggatcagtgggaagccatgtrgacagacgggaccctcacagtctccaggactccaattttcatgagcggatgtcttccaggagaagtcactgctctttgatttggagttaaatgtgtacctgcaggaggatcctgtgggagctgggagaggtaggggcctggctgctgcctcacatccccagggagagcctcaaggtgcaaacaacgtgcatgacagccacagtgcctgggcctgcacccacctgcccaacacaaaagcatgtggcttctgcttcccttctgccttccacattcatgcacgttgtctcctggggcccatgctaactttcagctgcatagggaaaggcttgtgggaaacctccttcagcttaatgaaattgacacattacaaattcatgaccagtgggaactgggaccttgttcacctctttggctgtggccagaggccctcctagaagcagaaagaattgagaagtggtgcttcctgcaagcagaacctattgggaagccatctcacaagggaagctgggcaatatagtttgcaggcttctagcctggtggtacaaaggagggtgctgatgactaagaatgaagcagaaagccagcagataaacactgacaccaaaccagaggggtggaaatgctggctgacaaagtgaatgacactctgttgacctccaacaccagcacttctagatcttagggccctgttccaattctccttacatctattccttttgtcttattggttggggccctatttttcccttggtgattctcctgtcttatgaacwttgatgtcacatagacttgtagttgctctggggacaaatccattttcgtgagaacacaggttagtcatgcctccaaaatcaatcccaaatctgaatctacctccctctccccctaccctcacccaagccacgatgctctctctcctgcttgagcaaacagccttctaatctggccactcatttccacccctgctttcctcaaattttctctctacattcagccaaagggacttttataaggcacaatccagctgggcatgatggctcatgcctgtaatcccagcactttgggaggcagaggcaggtggatcgcttcagttcacgagtttgagaccagcctgggcaacacagtgagaccctgtctctacaaaaaatacaaaaaaattagctgggtgtggtggtgcgcacctgtaattccagctacttgggaggcttaggcaggagaattgcttgaacccgggaagcagaggttgcagtgagccgagattgcaccactaaactccagcctgggtgacagagtgagactctacaaaaaaaaaaaaaaaaaaagcacaatccaggtcttgtcacccctgttgaagactctccaaggctctgtcttatgcatgaaataaaataggagcctctatatcttgatctcttcctgcctcaagttgagaactcactgagtcttgctcactgggggctgtcctctggcctctctcagatcctcaagtcctccaatttcttcactaaagagctctgtactggccgggtgtggtggctcacacctgtaatcccagcactttgggaggccgagacaggtggatcacctgaggtcaggagttggagaccagcctggccaacatggtgaaaccccgtctctacaaaaaatacgaaaattagtcatggtggcgtgcacccgtaatcccagctacttgggaggctaaggctggagaattgcttgaacctgggaggcagaggttgcagtgagctgagattgcaccactgtactccagcctgggagacagagcaagactccgtctcaaaaaacaaaaaacaaacaaacaaaaatctctgcactttcactttctcttctcttctccatgcctgggcctctcctcttgtcactccccttgcccaccatggctacctcctttgtattcctttgtattccttcctgccaggtgtcaccaacttccccagccctgctacctaaagcagagtcctcctgcagtcactttccaccacatcacccagttggactttcctggtagcatgtgtttttgctccatgaaatgattgcatttctagttgtttatttagtttccacttatcctagtagaccggaagccccaggagagcccagacttggtctcgtgactgctttctgtcccatcagtgacagtgtcagcgtcctcagatctgggattattcatgtgagtccaacaccccccagagccctcaagaggaaagggagaggcggtggccggatggacacccctgcctgctcagcccttctccctgaggtctcttggatctgaacagcagcaagagatcatggcaaataaatcactcaatgcttgtgtgttttgtgcatgtttttagtgcctccaaatgctgagcatttagggtttgtttccgaggttttctgaaatacgscagggccttggtgttggaagcaaattaggatacctgttgtctgcctgtgctctgagtcaacctgaggagctctcagctgggccacgtggagtgtacacggggtgggccccacaaccccagccccagccttccttccatttgtgtttttttttttttgagacggagtctcgctctgtcgcccaggctgcagtggcacaatctcggctcactgcaagctccgcctcccgggttcacaccattctcctgtctcaggcctcccgagtagctgggattacaggcgcccgccaccatgctcagctaatttttgtatttttagtagagacggggttttgaaatgttggccaggctggtctcaaactcctgacctcaggtgatccacctgcttcggctcccaaagtgctgggattacagatatgagccactgcgccagacgaaaatcatttttaagtcttattttccaagtgttgaataagtttcctgcacagagctcctgaaatcatgttatctctaaaggtaactattgataaaataaggggttggtctgattctggtttgtactattcttaattaaaatatcggataactcacaaatgttacgggaaatagaaaacaaattggagcttagtttgtggcatatattcccaatcccaatgatcaataatgtttgtatatcatttatattagtacacagactcagtggtggctatttcatgtggtctctgaattgtacctttatatagcgtaggctctgtcctatttggcttggtaaacttacatagataaaacaagaggtgttaattgcacacagaggcctccttgttgtatggttagtaaatctagaattatgtggtggtgagcactgctaaaaccagagaattagcttctgtctggatattatgtaaggaatctagagttgtatatttggactggactctattagtctggaacgaatagaactttcttttactgcctacttttttttttgagacggagtctccctctgtcacctggaggtggagtgtagtggcgcaatcttggttcactgcaacatccgcctcctgggttcaagcgagtctcacaccttgggctctcaaggagctgggatcacaggcatgtgtcaccacccccaggtaatttttgtattttttggtagagacggggtttcaccatgcggccaggctagtctcaaactcctgacttcaggtgatcgccttcgaaagtgctgggattacaggcgtgagccaccacaccctgctgcctacttttatgggtgaattcttcctccttcaagatcctttaagtctggactgagatcctgtaaaccacagcatatatactggtttaatttcctgggagggcttgtaggatctggttctacaaatgaagttctacacatcagcctttgttccataatggtgggcttttctgactagattaactggctttattctcacatacgatattgtcagtatagccttggtagtacatttgatttgtctatatccttgcaacaatgggagccaatgcatattaaactcatgaaaatgctacattgtcaggatggatgaagttattctgcattgtcagaaaggatgaagttatttgtaataatatctacccattattctaagtagttgcaccgactacttagtcagttgatgtttttcatatttttatcagaatcattatggatctttccagatataatatatataaatatggttcagttatttattgatacattataaccataaaattcaagcacaaccaatgttctttgctaaggarcagttataatttttctaagccttacccatcataaatgcattcatctgcattctgattagaattattataatatttcagtctctgatgatttgttagcttataatttttttttttttttgagacagtcttggtctgttacccaggctggagttcagtggtgcaatcatggctcactgtaacttctatttcctgggctcaggcactcttcccacctcagcctcctgagctgggactacaggtgtgtgccacctcgcctggctaatattttttaaaaattattttttgtagagatggggtctcgctgtattacccaggctggtcttaaactcctgggctcaagacatcatcctacccctgccttccaaagtgttaggattacaggtgtgagccactgcacccggacagtttataatttatattgagatttgacacaggatatattttccagaatttggaagagtcagatggaaaaatactactgagaggctttcattccaatttcctcaagtataaatgttaaattgagagttggcagtgggtcacgaagaaaggaaaagagcttcttcctatgcgcataaaaagaaagaacatttgtaaagcaattctcaataatattaaaaataaccacaagcagatttccttcatcagtttcattttgttctatgtaaataggagtctgtttttttaaaaaatatttatttatttatttatttatttatttatttatttatttatttattttgggacygagtctcrctctgtcacccaggctggagtgcagtggcacaatctcggctcactgcaagctccgcctcccgggttcatgccattctcctgcctcagcctccctagtagctgggactacaggggcccaccaccacacccggctaattttttgtatttctagtacagacagggtttcaccgtgttagccaggatggtcttgatcttctgacctcgtgatccgctcgactcggccttccaaagtgctgggattacagacgtgagccaccgcgcccggcctatttatttatttatttttatcagatacagggttagtcgtcatgaaaraatctacttatggaatagaaagaactctggaaattctggttctgcttcsggtacagaatatcacaggtgtttacttgggaggacaatgctggtttacacggtgatatggtttggctgtgtccccaccgaaatctcatcttggattgtggctcccacaattcccacgtgttgtgggagggacatggtgagaggtaattgaatcatgggggcaggtctttcttgtgctgttctcgtgatagtgaataagtctcacgagatctgatggtttttttgttctttttttytggctgagcatagaggactttattgatggtacatgacaaggtggggctccctaggcccctccctcttcgggggatcggcatggaaactgtgaggaggggagattcgcagtgtgrtgggggactgagtgtggcagggactccccagcagtgaggacctctctgttcctcycatgctctctctggagctggtggtctgggggtcttactccttggaggccatgtgggccatgaggtccaccatactgctgctgtagccaaattcatcgtcataccaggaaatgagcttgacaaagtggttgttgagggcaatgccagccccagcattgaaggtggaagagtgggtgtcgctgtcgaagtcaggggagacgaactggtgrtcactgtggcccaggatgcccttgagggggtcctccaatgcctgcttcatcattttcttgacatcatcatatttggcagggttttcccagatggcaggtcaggtccatgaccaacacgttggcagtggggatatggaaggccatgcctatgagcttcycattcagctcaaggatgaccttgcctacagccttggcagtgccagtagaggcacggatgatattctggagagtccgacggccatgatgctacagtttcccggaggggccatccacagtcttctgggtggcagtaatggcgtggactgtggtcatgagtccttccacgataccaaagttgtcatgggtgaccttggctggggcactaagcagttggtggtgcaggaggcattgctgatgatcttgaasctgttgtcatacttctcgtggttcatgcccatcacgaacatgggagcgtcagaagagggggcagagatgataacccttttggctcctccctgcaagcgagccccagccttcttcctggtggtgaagatgccggtcgactccatgatggactcagcaccagcattgccccatttgattttggaggggtctcgcacctcgaaaatggtgatgggatttccattgatgacaagcttcccgttctcagccttgatggtgccatggaatttgccatgggtggaatcatactggaacatgtagaccatgtagttgaggtcaatgaaggggtcattgatggcaacaatatctactttactagagttaaaaacagccctggtgactaggctcccggttccaacaaatccattgactccggacttcaacttcactgtggtgtctcagggacgtacgtggctggcaaagcacaagaagatgcggctgtctgttgaacgggaggagcagagagccaatctgatagttttataagggggagtttccttgcacaagttctctctcttgcctgctgccatgtaagatgtgcctttcgccttccaccataattggaaggcctccccagccccaygtggaactgtaagtccactaaacctctttttctttataaatcaccatgtctcaggtatgtctttatcagcagcatgaaaacagactcatacacatgggaaaacctgaacccagtgagcctatttcttgaagtgtcaatagctcagggtatcaggtattgtctattcatcgaggcactttgactctcctttgtccaagacccaatttctggcctgtagtttccagctaaccttcaggaaagcatgaaaggaaagcagaagtcacttattgattgtaggactaaataatgatggggaatttactacagtgactaatactatctaytaagaagaaaacagaatgctctattagggcatactatataattattccaagagaattagatcaatgtttctcctgggggcaagaacagattatggacactgaagatattgacacatcaccatcctgtaaaagtggacagtctctgagatatatttataatagtgacatttaatgcacaaaattaatctaaggaaggctgaactcatctttttagtttgaaagcatttttcacattgtgtgttcaaaaatcagggaggtttttacactattgtagaatcattttaaaaacagaagcacatcaaatataggctgggcgtggtgcctcacgcctgtaatcccagcactttgagaggccgaggcaggtggattgcttgagcccaggagttcgagaccagcctgggcaacattctccagctgaggcaggagaatcgcttgaacccgggaggcagagattgcagtgagccaagatcacaccacagtactccagcttgggcaacagagtgagactctgtcttgaaaaaaaaaaaaagcatatcaaatatacttaagagttctagcatcctgccctgtgtgtgtatttcctatggtgggttacaaggtgagggaacagatctttggtgctttggccatccaggaagggccaaagattattttgaatgtacaaacatcttgatgatttttaacttttctgaatttatagtctgattttatgaaaggaaacatcaaaaagaattgtccaaaatactgatcacttgactaaaataggtgcataattgcctaagagaaaggagtaattatagcttggctaccctattaaccataatgacaatcaagatattcaaaaataggccaggcacagtggctcatgcccgtaatcccaactctttgggaggctgaggcaggaggatcamttgagttcagcctgggcaacatagggagactctgtctctacagtttttttttttttttaattacctgggcattggtggtgcatgcckgtgatcccagctgaggtgggattatcacttggctctgggagttcaaggctgcagagagccgtgattgcacctctgcactgcagcttgggtgacagagtgagaccttgtctcaaaaaaaaaaaaaaaaatagtaaatataggccaggaacggtggctcatgcctgtaatcccagcactttggtaagctgaagtgggtggatcacgtgaggtcaggagtttgagaccagcctggccaacaaggcaaaaccctgtctctactaaaaatacaaaaaattagccaggcgtggtggtgcgtgcctgtagtcccagctactagggacactgaggcagaagagtcacttgaacctgagaggcggaggttgcagtgagccaagatcatgccactggactccagcctgggtgacagagtgaaactctgtctcaaaaataaataaataaataaataaataaataaataaataaataaataaagtagaaggtaactataagggaatttagctttttgtaagtgacaatcttttactgcacgttttaaaaaataaacaattcaacaatatgactaaggtcagcaaaaaggaaaaaaaagttaaatcttctcaaacaagaatatttagtaaggcaagaacctctgctacccggacaaatttcacagaaagtaaagaataacttttttactatgccttgctgagagcagactgaatactttaagatccctttgtcattttaaagacagaaaaaacatcaaattctagttttactgtttttgcccatcatccagatggcatgatacagtctgtttttctttctcattttctttttaaaatcttatatattaacccatacttatacattatccaggtgttcaaagattattcattaaatagctcagtattagtttgagtctataaagttaaaaagaatcttatatagtatgtttaagctrgcactacagtatgtcataatcctattttcactgagtatatgttctatgttggcatttactttttctcagcactttaaaaatatgattcattgtcttctgattgagaagtcagctgtcagctttaataatgttcctcttttgaaggtaatctacccttttttttatatgactgcttttaagacttttctctttgcctttgtcttttaggagttttactataatgtgtctgtgtttgatttcctttgtgtttattttattttgagtttgaaagacttcttgaatttgtggattggtgtctttcatcagttctgaaacatttgcagatgttatgtctttcgatattgcttctgcaccatttcctctctgtatgtcttcagggactcttcagaagtcaacrcacctctctgagacattgagcaattagtcttttatagatcaggcttatggtttccttagtaagaaaatttcctcaaatgcttggtaagtttttggtctatttgcttccaatcaattrcatttatgagtcccacccctaaagatctcttccagatataattcttaagcatttagatttttattttttctttttgttatgggaaatttcaaactgtccaaaagcagggagaatgtataatgaaccttcttatgttcaatgattgtcaatatatgtcagtctcatttcatctatatactcctgctttcccttatgattggattattttaaaacaaatttcagacatagtatttaacctgtaaacacttcagtatgtatctccaagagataactactactaaaaacataattacaatatcattacaatacccccccaatactaaaaatattttctcttaattttttttgagacagggtcttgctccattccccaggctggggtgctgtggcatgatcacggctcgctgcagcctccacctcctcgattcaagtgattctcccacttcagcctcccaagtagctggaattacaggcgtatgctgccatgcctggctaatttattcttcttctttttttttttttttgtggacatggggtcttgctatgttgcttaggctggtcacgaattcttgggttcaagcaatcttcccaccttggcctcccaaagtgttgggattacaggcatgagccactgcacctggcctgtactttcttaatatcgccaagtattyagtcagtgttcaaatttgtccaattgtctcataattttaaaacattttcaatcaggatcaaaacaaagcccatatatttcattcaactaatacacctccccttctttttttctttgtgatttttaaatagctttatttagagaaaatccatgtatcatataatccatccatttaaaggttacaatttgatggcttttagtatattcacagagttgtccaactattgccattatctaattctagaacatttcatcatcccaaaaaagaaagcccatgccggttggcagccccagcaaccactcagtttcttctttttctacagatttgcctattatggttatttcatataaatgaaatcatacaatatgtgggcttctgtgtctggcttctttcacttagcataatgttttaaaggttcatccatattgtagcatggatcattatttaatttcttgcagttattttttggagaaaccaggtcattttctcctatagcttttccacattctgaattctgctgactgcatccatgtggggtttcttaatgtattcctctgttccctgtttatcctgtaaactagtatttagaactagaagctcaatcaaatttaaatctcactctttggcaagacaactttacagatggtgcagtgagcttccataaggtgtctgtaagccattgatagttcctgtgatcactccatatttatagcagctatttgagaccattggaaacaacaatcttgaatggaacaataatatatgaaatcagatttttgcttctggtctgattctccttttccggccacaaaatcttaatgtcaattctcaaaaaggcttggaggctctctcttgttgtttagtaaccttgtcaatctgtaagactccaagcctctagactcacaatacatttagatgttaggytaaagaaagaaaatgcctctttcctttgctgaattttacttctgtccatttttgtttgtgaactggtcaattcttgcctgggagcatttctgacttacgattttttaaaagcagcaggaagtagccagaatacatcaatatcctgccttttaaaaaccattcacccacagacatatagatcaatggaatagaattgagattccagaaatgaactctcacattcatggtcaattgattttcaacaagagtgccaagatcatttaatgggggaaggaatagtctttttaactaatggtgctgggataattggatatcaacaagcaaaagaataaagctggaaccctacctcacaccatatacaaaaattaactcaaaacaaatcaaagacctaattgtaacagctaaaaatatacaatcttagaagaaaacatagagtaggtcttgatgatcttaaactaggcaatggtttcttaaatatgtcatgaaaggcataaactactacagaaaaaaatagataaatgggacatcatcaaattgtaaaactttcacactttgaagggtaccatcaagaaagtaaaaagacaacaaactgaataggataaaatatttgtaaattatatatatagtaagagtctagcatccaagaaatatgtatatatattatataactcttgcaactcaacaacaacaaaatataaacaatcccaatttaaaatgggaaaataatttgaatagacattacttcgaagaagatatacaaatgatcaagaagtgcatgaaaagaaggcaacatcattagtcattaggaaaatgcaaatcaaaatcacaatgagatactttatacccactatgacggctttaataaaaatgacagacaacaacaagtcttggaaaagatgtggaaaaaattataattctcttgcattgctggtggggaatgtaaaatggcatagcaactttggaaaccaacttggcagctcttcaaaagttaaacatagagttaccatatggcccagcaattccactcctagatatatacccaagaacatatgttcacacaaaaactcatacatgaatgtttagggcagtattatttataagattcccaaaatagaaataacctaaatgtctcccaactgatgaatagataaataaattttaggatatccatacaatggaatgttatccggccataataaaagaatgaaatttgaatgcatgatacaacatggatgaacccataaaacattatgctcagtgaaagaagccagacacaaaaggccacataatgtatgattctatctttataaaatatccagaataggcaaatctacatagacagaaagtaggttagaggttgccaaggcctgggggtagaagagaatggagagtgattactaacgggtatggggtttctttttagggcaatgaaaaaggtcaagcattagattgtggtgatggttgcacaactttgtgaatatataaaatacactaaattgtatactttaaaagaggtgaattttgtagtagatgaatgatatctcaatttaaaaattataacaacaaattattccctaagtaacgattacagagttctgtttggggtgattaaaagttctagaaatagatagtggtgatggtttcacaacattgtgaatgcaattaataccacttaattgcacacttaaaagtggttaaaatagcaacttttatgttatatatattttactacaataaaaaatcctattttttaacagctccctaaaccatagatttcataagtatgtggactctcttccatgttattgcagatgatttttctaccaaatgattttacacagccccataggggtcattggccacaaggtttgcaaaatctgtttgtttgttcgtttgtttgtttttttgtttgtttggtggttttttttttttttttttgagatggagtctcactctgtcgcccaggctgcagtgcaatggtgcgatctgggctcactgcaacctctgcctgccgggttcaagcaattctcccacctcagtcaactgagtagctgggattacaggcacctgtcatcatgcctggctaatttttgtatttttgtagagatggagtttcaccatgttgcccaggctggtcttgaactcctgacctcaggtgatctgcccacctcagcctcccaaagtgctgggattacaggtgtgagccaccatgaccagccaaaaatctgtattttaaattacttgttgcctgattgttaagccaatgtcacatattttagggttttgttactgcagtgccactaccaggtgccaagttatgtgttagtcagggtacaggctaagctatgaataccaaaaaacctcaaaatacaatgacccatgattctggatatgatgaaattgtttatgaaagaccaatagtgctgctaggagtaatttgaaatgccaattaaaaatgtaaaaagcagcaatgattatttcaaagcattggtgagctgctaaggcaactaggagtcaagagaacaaaatctcaaatatgggggaacagtatagagagctgagctgagccaacattttgcagtttctgtctccagggcatttgatgcttctgggtatggggaaggagactgaagatctgggcaaaagagttgggcagaagaatccttctcagacacccaaagagcaggaaggacaaaattagacttgaaggactaggacctggggaaaggagaagttaaaaagagcctaatgattttctggttcctgtttgaggacattgcagaactctgaagctacatggggtagagtctaagaagccaggaagaaagcctctgaaaagcagaatagagtttcagcagacttgcaatgctgaagagacaagaagagttcaagagctgccaggatcatggacccccaggttataacccaggctccaggttgaaaatccatgagcaagtgcaaactagatatgcatggtgcctttccaaaatggcaacccagtctagattcagcccagtttttgactgaattaaagtgatgagcaccactctatctgcataaagataatttcctctctggggcagtatgtacaatttttcatgtacaatgcctgacattcaatagctagacatgctagaggcgagaccaaatgactgaaaagcaagagaaaaaacagatagtatacatagacccatggataatcttaatattggagttaccagacaaggatcttacatagctagaattaatatgctcaagacaaaagaaaaaaacatgcagggattatatgaaaggatgggtaattttaccagagaaagggcaattctagagtagaaaagtaccataactgaaattaagaattcagtaagtggaacacttatatactgttggtgggagtgtaaattagtacaatctctatagaaaacagaaaacagtatgyagatttctcaaaaaactaaaaatagaactaccattcgaccctgcaattccactatggggtatatacccaaaggaaaataaatcattacatcaaagaggcaaagatagctgggcatggtggcctcatgcctataatcccaacactttgggaggccccaacacttgatcaccrgaggtcaggggttcaagaccagcctggccaacatggagaaatcctgtctctactaaaaatacaaaaagattagctgggcatggttgcatgtgcctgtaatcccagctactcaggaggctgacacacaagaattacttgaacacaggaggcagaggttgcagtgagcagagattgcactactgcactccagcctgggcaacagagcaagactccatctcaaaaaaaagaaaaaagatacctgcacttgtatgtttacagcagcactatccacaatagcaaagatatgaaatcaacctaagtgtccagcaatggatgactggataaagaaaattatatatgcgtgtgtgtgtgtgtgtgtggtgtgtatgtgtgcacacacaatggaataccactcagccataaaaaggaatgaaatcatgtattttgcagcagcatggatggaactagaggccattttcttaagtggaacaactcagaaacagaaagtcaaataccccgtgttctcacttataagtggaagctaaataatgtgtatacacagatagagtgtgaaataatagactgggaagagtgggagggtggtagggggcgagggatgagaaatgacttaatggatacgaagtacaccattcaggtaatgattacaccaaaaacccagatgtcaccactatgcaatatatccatgtaacaaaactgcacttgcaccccttaaatttatacaaataataataacaaggaattcagtcaatgtgctttaacaacagattagacacagcagaaggcaggatgaatgagctggaagtcaggccactagaaaatatctagactgaggcacagagaaaataaaagaagaaaaatataaaagagagtttaagacagtgaaaatagctaatgaaagactgtggcttaactaagatgaacttttttctctctctctctctccctctatccaaaggtaggtggctggtctggggcaggcagacacttttgcttcatgagggtgttcaggcttgtgaattggctttgatatctttaagaaatggcttctctctttagttatgttcctgctgtagttgttccccagccaggaaggagaaaggaagacagtcaagggccagcatctttatttataggaactgaccagaagctgtacacatcacttgagctcataagggcttgaacttaggtgcatgagcttacttagttatcaggaaggctggcaggtgttttgtttctttttttctttctctgtctctctctctctttctttctttcttagagatggggtcttgctacactgccaaggctggtctcgaactcctgggctcaagcaatcctcccaccttggccacccaaagtgctgggattacaggcatgagccaccatgaccagcccagatgttgtttctaattgggcagccacaatcatcttattactaaagggaggaatgggagaatgaattttaataaaaagaaagtgtttctgctacttggattactatgcaggagttagacacacagggctttgtagagcacagtaataagtgtagactagagccagggaaggaggaactgcgagtgccatcaaaagagacatgatttcccagactagaagcctgctccttgggacccacactgggtgaggtttcctattcccatatttagtgcgagtggtgagatcccagatgtggtgagcctgtggtatggaggcccttgactccagtgaccctgatgtgagctcctgtgagtcccactgggtcttttgcamacccaatcaatggtgctrctttgtgatgggggcttctttgtcatccacaaggacccagggaagactgaggctgaggactgccggagctacactggaaagggtctcaggcacgctcttcaccttcttagaggcctcttctcctaacaatgtctcccctctggactgtcttaagtcagctcagagtgccgtaagacaataccacagactgggtggcttaaacaacagaattctgttttctcacagttctggaggctgcaaatgtgagatcygggtgccagcatgttcaggttctgaggagggctctcttcttggtttgcagacagccaccttctcactatgtcctcacatggtcagggagacagctttctcttctctttttaaaaaaaatattttttatttttttagaagtggggtctcactctgttgcccaggctggtctcgaactcctgggctcaagtgatcctccagcctcagcctgccaaagcgctggggttacaggcatgaaccactgcacctggccctttctcttcttataaggtcatagtcctatcagattaggatcctaccttgtgactttatttaacctaattacctcctaaagactcttatctccagatacagtcgtattgggggttggggcttcaacatatgaattttggggataaggggacacaattcagwccatagcataagacctctgttccctgcctgcagcaatttctggcctcttgtttccaggtggttaaactgatgctggggagcaaaacctttaaggacccttttggccgtgccctggtgtattagaccattttcttttcttttcctttctttttttttttttttgagatggagtctctctctgttgcccaggctggagtgcmatggcatgatgtcagctcactgcaacctccgcctcctgggttcaagtgattctcctgcctcagcctcccaagtaactgggattacaggtgtgtgccaccaggcccagctaatttttgtatttttagtagagacagggtttcaccatattgaccaggctgatctcgaacttctgacctcatgatccacccacctcagcctcccctgctgggattacaggcgtgagccactgcgcctggcctattagtccgttttcacactgctgtgaagaactgcctgagactgggtaatttataaaggaaagaggtgtaattgactcacagttccacatggctagggaggcctcaggaaacttacaatcatggctgaaggcaaaggggaagcaaggcaccttcttcacaaagcggcaggaaggagaagtgcccagtaaaggggaaagagccccttacaaaaccattagatctcactcactatcatgagaatagcataggggaaaccacccccatgattcaattatctccatctgtctctcccttgactcatggggattatggcgattacaattcaagatgagatttgggtggggacatgaagcctaatcatatcacctggggaggtgtccatgaaaactgctggcacctcagaactatttatttctgctttcaggtaacaaggaagactttgggaccctgrggagtatggctgcagcagtcttaagctttggacaggggcttagagtggtggctcatgcctgtcatccaagcactttggaaggcccaggtgaatggagcccaggagtttgagaccagcctgggcaatatgttgagacctagtctctaaaaaaatgcaaaaattagctgggtatggtggcatgcacctgtagtcccagctacttgagaggctgagacaggaggctcccttgagcctgggagattgaggctgcagctactgcactccagcctggggaactgagtgaggtcctgtctcttaacacaaacaaacaaaaacctttggacagcaaaagcccatctcctcttctcctcaggcacatggctgcctggctggggactacatttcccagcctcccttgaggttggctgcagccacatgactgggtcctccccagtggcttgcagttggacatgacttgcgcaatttccactttacctgctttaaaggaaatgtcttgctctgaactttctcttttttccctttcaccaagtcactcayaggtggcacattcaattatgcaaatgctgacagagcatgaggtcagtggytctcaaagtgggcatcagaattccctggagagtttgttagggcacagttttctgggtcctgcccccggagcttccgacttagtaggtcttgggggaacctgggaatgtgcatttcctatgaattgccagaggctgctgctggtctcgggactacactttaagcaacaatccgaaagaatctgggttcctgaatgatggccacacgcacagcctcacaaggtcattcaccccggagctactatgggaaagagarttcaatttgtttttattgtttaagctacactattgtcttacaataagatggccagtgaatttttgtttctcctttagccagtttgacttagatttctgttgcttgcaactgaaaatgccctgatcatcatatgtaacattgactgcttttgatttactcattcagtaactatttattgaaastcccacgctgagtgctttttatttatttttactgtttttaattattttttttttatgagatggagcctaggctggagtgcagtggcttgatttcggatcattgcaacctccgcttcccgggttcaagcaattctcatgccttagcctcctgagtagctgggattacaggcatgcgccaccatgcctggctaatttttttttttttttggatttttagtagagacggggttttgccatgttggccaggctggtcttgaactcctgatctcaggttatctgctctcttctgcctcccaaactgctgggattataggcatgagccaccgcgcccagccccaggtgcttttgaaagcactgggcatacagcagtgagtgaagcagtgagtgagtaaaaagttcctgtcctgtcctttcagagattctgatctttgtgtaaggcagcacacaatgaagtattttaaagacaaaatatcagcaaattctcaaagcaactttgagaagcagacatcattttgaaatcccattctacagataagtgcgctgaggctgcagtagcaaagctggagtttgaacctagatctgtgcgagtccaaaggctaaattctctctctctctctcttttttttttttttttttttttttgagacagagtcttgctctgttgcccaggctggagtacagtagtgcgatctcagttcactgccacctctgcctcctgggttcaagcgattctcctccctcagcctcctgagtagctgggattacaggtgcctgccaccatgcccagctaatttttgtatttttagcagagatggggtttcaccatgttggctaggttggtcttgaactcctgacctcaagtgagcctgcctcggcctcccaaagtgctgggattataggcacgagccaccacacatgactcaaaggctaaactcttgagagtgggccatgctgccccaagaagctccactggatttatttgaaggtccttgccaaatcagttggggaaaaaaaggcagattcagcccatggatccttaagtaccactcgaagagtggcatgcttttcccaaatgtcaccttttgtctttaaggcaaaggtggtgccagatcttcagctctcatgtctcctgcacaaactctcccaggcgtgagaagagactccactctgcagaaactctgtctctaagggggaagtgacagtcagagaagggaacagggatattactgaggccagaaggcccctctcccctcagtgaggcccacgctcgtgcccaaagcctgtctgtcttcctaaataatgcagtgtggaagagtagaggctttgcagccaagcagacaggatttcataaccctggttccagtacttcccagtgtgtgatcttggaccatcaactgggcctctgaacctcaatctcctcctctataaaagtggcacaatggccgcaggcggtggctcacgcctgtaatcccagcattttgggaggccgaggtgggcggatcacttgaggtcaggagtttgagaccagcctggccaacgtggcgaaacactgtctctactaaaaatacaaaaattagccgggcgtggtggtgggcacctgtaatctcagctattcaggaggctgaggcaggagaatcacttgaacccaggaggcggaggttgcagtgagccgagatagtgccattgcactccagcctgggcaacaagagcamaactctatctcaaataaaacccagaaaaccaaaaaaaaaaaaaaaaaaaaaacccaaaacaaaacaaaaagaaaaaacaaaaacaacaacaacaaaaaatggcacagtaatagcttaattcccaagcttgttcaggattttgtgggtcaggaatgtgaaaagggtttgactggatgttcatttctgttccacgtggcatcatgtgatgagggctggaggacccacctccaagatggcttcttcactcccatgtctggaagcttcaattctcctgggccttctcacagctccatgctcttaggggagctgcaattctttttttattatttatttatttatttatttgagacggagtttcgctctgtcgcctaggctggagtgcagtggccgcgatctgggctcactgaaagctccacctcctgggttcacaccattctcttgcctcagtctcccgagtagctgggactgcaggcgcctgccaccacgcccggytaatttttgtatttttagtagagacggggtttcaccgtgttagccaggatggtcacgatctcctgacctcgtgatccgcccgccttggcctcccaaagtgctgggattacaggcgtgagccaccgcgcccggctggggagttgcaattcttacacagtagcctgggagccaaagagatcacgacggaatctgctggttcccttaaaatgtagatccaggcctggcggtgtcacttgtttgtttgtttgtttgtttgtttagacagggtctcgttctgtcacccaggctggagtgcagcggcgccatcatagctcaccgcagcctctacctcctaggctcaagggatcctcttgcctcagcctcccgagtagctgggactacaggtgcgggccaccacgccagcctatttttaaaagttatatttttggccgggagtggtggctcacgcctgtaatcccaacagtttgggaggcggaggtgggtggaagtcgggagttcaagaccagcctgaccaacatggatataccctgtctctactaaaaatacaaaattagccacgtgcggtggcggacccctgtcattccagctactcgggaggctgaggcaggagaatcgcttgaacccaggaggcggagtctgtggtgagccgagatcacgccattgcactccagcctgggcgacaagagcgaaactccgtctcacaacaaaacaaaaaagttatttttagtagagttggggtctttctgtgttgcccaggttggtcttgcagtcttgggatcaagcgatccgcccacctctgcttctcggtgttggaattacaggcgtgagccgccatgcccagcacagtgtcacatctgtcatattctatgggtcaaagcagtcaagggttctttctcaatcagactaagaccaacaggaacaagcttattgtattaatttgctagggcagccttaacagacaagaagggaggtgagtcgccttttagtttaagtagatacggtcatgctattctctaattggccaccagatggcgcgctggacttactattagtacagtttgtaattgcccttccgagagtggccaccgccactcaagcgactggacactggactaagtgcttctgttaatttggataagacaagactctcactttctttgataaaatataaatctagaagagccctaggcttttattgcatcatgatcatggaaggagagaaatgatccttttctgatttgccagagaaaaccaaccagtatttattctttaggaaatacagagatgctatttaacctcctggtcaccatagcaacaaataatcaaggaagacaaccaatcagaatgcaggtttctttgggaggttctttttttttttttttcagatattgcaacaatttctaaaaaaatcttagactcttttgttcaaattatcctttcaaggaaagacacaaatgaacagagttaacaaatgaggctggtaacaggaaaattaactggagctcctggctgcacgggagaacagaatgaatgtttagggtatgttctcaatgtgccactctattaaaattgatttttttttttttttttttttttttgtagacagagtcttgctctgtcacccaggctggagtgcagtggcgtgatctcggttcaatgcaaacttcgcctcccaggttcaagcgattttcctgcctcagcctcccgagtagcagggatgataggtgcctgccaccacgcccggctaatttttttgtatttttagtagggatggagtttcaccatgttggccaggctggtctcaaactcctgacttcaagtgatccgccctcctcggcctcctaaagtgaaaaaactaattatttagagcaatttcatgatgcagaatagaaccccttcctatacagctgcaagagagaacgggcttttttttttttatgtttgaaagcactgactttgctaagcgtggtggctcatgcctgtaatcccaacactgggaatctgagatgggaggaccacttaagcccaggaggccaaggctgcagtgagctatgtttgcaccactgcactccagcctgggcaatggagtgagaccctgtctcaaaaaaatgcaataattaaatataataaacacttgaaacaaactttataggaaccacagtctcaagatgaagagttacattccagaaagaatccacacaagaccactgggcttaacattctgtcttataggcaagctttttgcttacaattcacccaggaaataaacatgatatatatagatccaatgtccattctttgtttttatttgtttttttttgtttgtttgttttttggagactgagtctcactcttgtcacccaggctggagtgcaatggtgagatctcagctccctgcaacctctgcctcccggagtcaagcgattctcctgcctcagcctcccgagtagctgggattacaggctcctgccaccacgtccggctaaatttcatatttttagtggagacggggtttcaccatgttggccaggctggtctcaaactcctgacctcagatgatccgcccgcctcagcctcccaaagtgctgggattacaggcgtgagccaccgcgcccggcctcattttttcattcattcagtttacatttactgagcatctcctcagtgccagtataattcaggaacatagaagtgaacaattcgaacataggtttctgctcatatggaccttaccatcttgtaacctaattagaaccttcccttgcctgcctgggaaacacctgtgcccacagtccctccagtcccgagtttcccattgtgacaaatttaattgtgttccctccaaattcctgtgttgaagtcctaacctccagtacttcagaatataactatacttggagaaagggcgtttagagaggcaattaagttaaaatgaggtctttagagtgggcaccaacccaacatggcagatgtcctcataagaagaggaaatttaggccgggcgcagtggctcacgcctgtaatcccagcactttgggaggctgaggcaggtggatcacctgagcccaggagttcgagaccaggctggccaccatggcaaaaccccgtctctactaaaaatacaaaaattagccaggcgtggtggtgggcgactgtagtcccagctacttgggaggatgaggcaggagaatcgcttgaayccaggaggtggaggctgcagtgagccgagattgcaccactgcactccagcctgggcgacagagtgagactctgtctcaaaaaaaaaaaaaaaaaaagagagagaagaggaaatttagacacagatggtacagagggaagaccacgtgaagacacagggagaaggcggccatctgcaagccaaggagagaggctgcagaagaaactaatcctgccaacactgtgatctcagattctagcttccaaaattgtgagtaaatsgatttctgttgtttaaaccacccagtatatgtgccctagcaaactaatacacccaccaatatctttggaactagctgccaacagcttcaactatagtttttgttgttttgctttgttttattttttgagacagggtcttactctgttgcccaggctggagtgcagtggcgtgatcacggctcactgcagcctcaacctcctgggctcaggtgatcctcccacctcagcctctcaagtagctaagagtacctgtgtgttaatttttttttcttttatttgtagagatgggytttcaccatgtttcccaggctgttctcaaactcctggcctcaagtgatccacccgccttggccacccaaagtagtgctggggttatagaggtgaccgactgtgcccagccttaaaccatagttttaacgaagccagaatctaagtatctgaaacttgttttaaaaaattttctggccaggcgctgtgggtcatgcctgtaatcctatcactttgggaggccaaggcaggcggatcacctgaggtcaggagtttgagaccagcctggccaacatgacaaaaccctgtctctactaaaaaatacaaaaattatccgggtgtagtggcgtgcacctgtaatcccagctactcagaaggctgagacaggagaattycttgaatctgggaggcagaggttgcagtgagccaagatcaagccactgcactccagctttctcaaataataataataagtaaataaaataataaataaagaaaatttccaccagtagatgagtaacttatccccatgcatacacacaattttctgttaacttttccacagatgggaagtgcatgtatctttttttttttttttttttgagacggagtctcgctgtcgcccaggctggagtacagtggcgatctcgcctcactgaaagctctgccccccgggttcacgccattctcctgcttcagcctcccaagtagctgggactacaggtgcccgccaccatgcccggataatttttttttttttagtagagacggggtttcacggtgttcgccaggatggtctcgatctcctgacctcatgatcaacccacctcagcctcccaaagtgctgggattacaggcgtgagccaccacacccggctgtgcatgtatcttatactcctgggaagtgcttcccaaaaggcttctgggtttctgtttcctgcccaaatcacagatctatatatatmtgattccctcagctaaatcttttgacacaagaaacccattttaggtccttcaacttccatcaaatgctacagtgtggttaagggtgcagtcttagtttccacagctgtagaactgggtactgacatgatctggtggtgtccccacccaaatctcagctcgaattgtagctcccataattccctcatgttgtggcagggacccagtgggagatagtggaatcatgggggcggtttcccccatgctgttctcatggtagtgaataagtctcacgagatctaatggttttataagggaaaaccccttttccctggctctcactctcttgtctgccatcatgtgagacgtgacttttaccttctaccatcattgtaaggcctctccagccacgtggaactgtgagtccattaaaactctttcttttgtaaattgcccagtcttgggtatatctttatcaccagtgtgaaaacagactaatacaggtactattgatgtcaatcttacagagttgttgtgaagattgaatgacataataatagcagcttattgttactatgttctagatattatttgtttcagctctttattgctgcataacaaactaccccagaatgttgtggtttaaacaataattattgaccaggtgcagtggctcacgcctgtaatcttagtaatttgggaggctgaggcaggtggatcacttgagcccaggagttcaagaccagcttgggcaacatggtgaaaccctgtctctacaaaaaagtacagaaaaattatccaggtgtggtgatgcacacctgtagtcctagctacctgggagattgatgtgggaggatcgcttgagtccaggcggtcgaggctgcagtgagccatggtcgcaccactgcactccagccttggtgacagagtgagaccttatctaaaaaaaaaaaaaacccaataattattttattgtctcttacgattctgtgggttaacagggctcaacaggacggtttccctgcttcctgcaatgttggttgggctgcagtcacatgggggctggaacacccaagatgagctggaacacccaagatggggcactcacatgcctgccagttgatgttgactattggctgggatttcaactggggctgtcaactgtagcaactacccatagcctctgcatgtggcttgagcttccgcagcatggtggctgggttctcagggacagtgtcccaacagcaagtgttctaagagtcagtaagcagaagctgccagtcttcttgaagtctacatcccacatcagtaacaatgttacttccatctcattctataaactccacctctggatggggagaaggataaggaatttgtactcatctttatttaatcatgctactcgagaaactttacatgtattaactcaacgaatcctcaatctcatattggcattactgttattataattttacagttgaggatgctggggtagagaggtctccggtcagggcagtcgtgctgttctgtgattgtccagcaggggcgctccacacgcagtcatcaacacacgcaggattcccacagtgttcctacatcctcatagctatggcttgtgtttacatcgcaccaggggcatgctaaatgctttgcgtaaaaaatcacgcctgaaattcacaagaatgtcctgaggttgagttttacaggtgaggacgttaaggctcagggagttgaggccaaacataacacgtggcagagtgagactcagaccaggaccctctggctccaaacctgtgccyttggccacttccccacagtgacaacagcagcaataactgcgtggctcacgcctgtaatcccgcactttgggaggctgaggcaggcagattgcttgagtccaggagtttgggggaccagcctgggtaacgtagtgagacctatgtctagacaaaaagttagccaggcgtggtggcatgagcctgtagtctcagctgcttgggaggctgaggtgggaggatcacattagcctgggaggcagaggtttcagtgagctgagattgcactgccatactccagcctgagcgacagagtgataccctgtccctcctctgcaaacaaacaaacaaacacaacagctaattggtatagaagactctctacataccaggcacagggtgtgtgtgtgtgtgtgtgtgtgtgtgtgtgtgtgtgtgtgtgtgtataagttacaataacaaccctataaagcacaaaatagtatccttcccactttgcaaataaacaaattgagacccagagaagttaagtatctatccaaggtcacacaggtggtaagcagtggattcaggatttgagtctaggaagcctgagttggggagaggggttggggagagtcagatatgagacagaaaagcaagacttacttgtttatttattcatggattcaacacatattcattgagttcttacaatatgccaagcactggggacacaacaatgaacaaaatctgtccccacggtggtcacagtctggtggaggagacaagatctcatcagccacatgggaagaggtgttgcctctgatgggggggcgggcgatgtgttagattattttgttgttccattcgctgcctccctgtaggaggatataggtccctgactgtcgccatgtggcttggggtacccctmcgggaggggatgcattcttaccccaaagaggcaacttgcgacttgcattggtctgtgttgtatgagtggccatgctgtgagcccctgcagaaaagatccaaacaggggctctcccttctgcctgacccacagccactactaccaacatgtatgtgaaaataaacctttaggcttggcatggtggctcacacctgtaatcccaacactttgggaggctgaggcgggcagatcacttgatgtcgggaatttgagaccagcttggccaacgtggtgaaacctcatctctacttaaaaaaaaaaaaaattagrtgggcgtggtggcgtgggcctgtaatcccagctacttgggaggctgyggcaggaggatcgcttgaatccgggaggcagaggttgcagtgatccaagatggcgccactgcattccagcctgggtgacagagtgagactccatctcaaaaagaaaaaagaaagaaaagaaaagaaagaaaagaaaaaaaagaaaagaaaccttaatcgttgcaaggcactgggacttcaggggtctttgttactgagataaacacagtgacagccctccaaggtagggagtgagttgggactacagtcacagcaggtaacttgttgttcatgtaacctcagaaccagcctaatccggttcaactttgtggaataaaatggtgagttgctttttcagttgccatggacccccaggttgaagttcacatatgctgagcaggcccagatgagccaaacacgaaaccatgggtggaacctaagtgttcagaccaaggaatgggacaagtaagaagtggacaccagactggtcacggtggcttgcgtctatcatctcagcactttgggaggctgaggcgggagaatcacttgtgtctgcagttgaagaccaggccccggggggccgtgtgcgccctcttggccaggggcttcctggacgccttgccctcaggctcccatgccttgctctctgtgtcctcgaactctgctactgctgcccctgcagctgcctttcccgactttatgtcctcactggcagcctggaaagctgcgtagtcccttggttgcctttggtgtatttgaatttcccacctccccacccttttcctctttccctcttccccaggtggtgctcccggctgcagcaatgcctgagccgccagatgcgcaccaccagctccaggagccacttcgctctttttgtcctttttgtctcttttaatcctcgccccagaccctgaggaggccaggctcagccttcttcctccagggagggggttctggctgcgccaaggtgaaaatgcactccagaaggttcctgtcatctcaggctttccgcgggaccacggtgtccttggacaggacagacaagacctgcgagagggcatcgttttttctttctcattcctccagcccaaagagtcgatcacagaagcaattttttctttctttctttctttctttctttctttctttctttctttctttctttcctttctttctttccttccttccttccttcttttttttttttttttttttgatggagtcttgctctgttgcacaggctggagtacagtggcgcgatctcggttcactgcaaactctgcctcccaggctgcagtgattctcctgcctcggcctcctgagtagctgtgattacaggagcccacgaccacgcccagctaatttttgtatttttagtagaaacagggtttcaccatgttggccaggctggtctcaaactcctgacctcaggtgatctgccttcctcggcctcccaaagtgctgagattacaggcatgagccaccgcaccccgcctcagaagcgattttcaacacctcctggcagcttttggtgtctgaagggctggtacaggccgcagtagtcaggaactcagggtcctccagccccgctctgtgacctggtggttgcacccgcccactttctgaagctttacagcccttcagcatctcattcaggtatgtctctggtggccagaagagccaccatatgggagtcactgctcctgccttctttgatggtcaagtgcatcaaatcagagggctttcttccatcatctcctgtttggctttgtctgtcctggtcatcaggggcaagaactccataggaccacctgcctcgtctttgtggcttcagagggtccacttcttgtgaacttgctccctggctgctgcctggagcgctgtgtacagcctgctgtcattgtcatctctgctcaagccccctcatctgcctcctcgatcttgatgtccaagctctcctggggaacttccttggattccttctttgccaagggaaatggacatgtccctcgggccctcttttagcttccggctcgatttctgtgacccctactcttcttgttactatcgcttgtagccccaggaggggcaccggccttccccatgactgtcccaacccctcagcctgggtctttgaagcgggaggggtgggcacctccccgggggtccaaatcaccacggcctgcatgggcccatcatccagcagcaggcgtctcatctgcctcaggaacctcgtgtcctgtgcatggtccttccacagaaccctccagatcccatccttgcccaggacctctgtggggatggcagcgtgattgacgtcctccacaaactccaccagggcggcctgggccttcttatccatcaagcccttcatgtgttgcagcccgaacgtgcccaggggcaggagggtcgactgcaggacggcttcaacatccacctgctccaggccctccaggatcccggtgaccagcagggccctgtgcgcgtccatgtccaggcccctggcactagtcctgcaaaaggctcatggccatggtgccgcccactgggcactgatcttggggcaggagggagcctgagatagggatggactgcagtgcacggtgtcaatgacaccctggcaagccacccgcagggcttagagtcccagtttcagtgaatgtggcaatgctggagtggggatgagggctcgggcgtcctggatgcctgctggccagctgttcacagtgacctttccccaggacccctccccagagctgtctgaggatccgcaggagactatggatctgttctccagggatgctcatggrtccctttgagagcagcggctccctctcagagctaccagatgaggaaactcctcccgctccagccacatggggacacccccctccccgttgccccttaatcctgatggttcttctgtgccccatcacccaccgcaggaggcctgggctctgggaggggcctgtctctccctcctccattggctactgctgtttccatgacaaccgttttcaggctgttgcagggacagagcattttttgttataagaagcccactgaaaacgagactatgcatgtrgtttgtttactggggtctttcgtgactctgggagacaggcctcacacagagagccaggcttagtcagtgggactgggtgggcctccctctggggcatcaggctccagatctagggtaagtttgatgtttaggacccagtgtgggccaggtgaaacagagactgagtgaaggttgtgcggcgggctgggcctgatgcaggggcacagattctatccaggtaaaaaaactaccaccagccgggcacggtggctcatgcctgtaatcccagcactttgggaggccaaggcaggcagatccaagctcaggagttcgagaccagtctgaccaacaggatgaaaccccatctctactaaaaatataaaatcagctgggcgtggtggtgggagcctgtaatcccagctacgcaggaggctgaggcaggagcatcacttgaacctgggaggtggaggttgcaacgagccgagatcgcgccattgcactccagcttggatgacaaaagcgaaattctgtctcaaaaataaataaataaataaataaataaataaataaataaataaataaataaaataaagtaaaaaatcacaactggctgagcgcggtgactcatgcctataatcccagcactttgggaggccgaggcaggcggatcacttgacgtcaggagtttgagaccagcgtggccaacctggtgaaaccctgtctctactgaaaacacaaaaattaaaaaaagaaaagaaaagaaaatacaaaaattagctagacatggtggtgtgcacctgtgatcccagctactcaggagactgaggcaggagaatcatttgaacccgggaggcggaggttgcagtgagccgagatcgcgccactgcactccagcctgggcaacagaacaaaaaatgaaaaaccacgacctctgggcagccactgctaccatgaccctgctggagcctgctgtgcagtgggaagtaggcggggtgctcaggtgaggacttgctggtggagggaggtgggaatctttgggcttcaggaagaacccctgggacacctgcaaattatcatgtcatgacacccaggaggtccctttcatgtcttgctaactgtcccaccagcacccccagggtggcctcagttctttcctgggctgcaccccgtgtctgggaacactgtcatggtgagccaagccccaggccctaggatgagccccagggttcattcattcatcccttcttccacctggacaacataatggagagaaaaatcagctgtttcgtatcttcagcccaccccatgactaagctgctggtctgacctctgtgcaagcttgggtctgtcctgcaaatgcagggattgagaatatgcctgccagacagatctgctccagggatggtgataccgtctctaccaggcagctgtcatcttgttccctgttgacaagagacccagagccccaggaacaaggtgaaaagactcaggaatatggcaaatgatggtgccaaggtctaaaaactccagaagaccctttccctctccccctaactcctggtccagcatttggagccagatgtactgactggcaggacactgagaagccaccccccaccctgcttcccttgggggctcagagaatgctttgaggagtgggatacacaggactgtttaggtcccaagtacagaaacccaagttagccatgtttaagcaggttagtgaaaaaggaattcattggctcatattactataaagaccagggttggctgggcacggtggctcacgcctgtaatcccaggactttgggaggccgaagtaggcggatcacgaggtcaggagattgagaccatcctggccaacacggtgaaaccccgtctctactaaaaaaaaaaaaaaaaatacaaaaaattagccaggcctggtggcaggcgcctgtagtcccagctactcgggaggctgcgtcaggagaatggcgtgaacccaggaggcggagcttgcagtgagctgagatcgcgccacagcactccagcctgggcaatggagcgagactctgtctcaaaaaaaaaaaaaaaaaaaaaaaagtccagcgtggctttggcttcaggcatggctggttctagggttccttcattcattaatttagccctggacccagggctgactcctattggatgaactggatcatgtgcttgcccctgccccaatcacagtgaccagggagggaggaagcgtactgactggccaggcttgggtgggcaggggattgggtgagccctgtaggagtcacctggaaggagagtggggagggggattctctggagagaaatggaggtgaatcattcaggagagggaagtggactctgggctggaaagcaggagactctgccctaaaggcatgatggcattagtgagactcactgtacctggcctggggagggactgaagggagtatgggaccctctccaggagccctagggccttggcttccaacagagtcctggcagcatcccccgacagcctcagcaggatgaattttgggggtcctgggagcctgaagcgtgcactcttggctagcgggtccgggatcttctcttcctggctgtgggtgtttgttggagaatgtctcaatttctggctgagggagagggagagggtgtcactcattgagtgttcatttatttaaccccgtagacttcactcatccattcattcattcagtctttctgtagtgcctgtgcagggctctggggacacgatgatgactgaagccctgcctcctggagcgcagggaaagcctggattcttaggggaggtgagtcggaagagatggagctaaccctggatcaggacaggcttactcagaggaggtgacattgagctgaagggaggaggtgaccatttgtgggaggtgggggtagggaaagggaagaagtgctttcgaggcagccaatgggctaagyttccagtgactaaatggggaacaggatgtctaaggagctgggggtggaagggtgtggctgagcctcgggatgggggttgggcaggaggtggcagggccaggcacagagggcattgtggtttggtcacgtcaggctatgaccaaggaacggaaggttgtggggttaccaaggccagagctggaagcttctctgcagcttatgtgctgtgtgacactgggaaagttaaatgacctctctgagcctcactttcctcatttataagatattctcagaattgctgtgttgatttaggcacgtggataatttagcataggtactggtcacagtagggctttaagtatcgattattggtgtcaatccttattttcataattcccttttgtgtgtagaacgggctgttgctgtatgaggaatttgctgggtcagagcgccctctggtgggcgtggggagccagttcagggaagaaagatgaaaccagaggttttgattttaaagggcaccaccctccctccccttcttattctgtcccttcctccctttctttccctttcttccctccacatgcattcaccagggtctgatcctgcctagatggggactgaaacagcccaggtcctaccttcccggggggtttacagcccggtagggggaggcagaggaaccccacctgagtagagcttaacactggggagaaggtgggactgcgggatacagggcttcataggaacccgacttgttcccggggcactggggaactagagaaaattttggaataagggagggggagggtcaagtttgcgatgtcatgtgratgaatgggacgggtgaggctgaggctggacccgacggggaggccgcagaaggcgtgggctgaaagcgtggaatggtgtgggctgaaggcgtgcagggcgtgggagggggatgttggggcaaagtccaggaccctagcccactcctagtttgggagaggagtctctctcaccctcagggttcgtccccagcctggtgatctgctgggagctgccagccactcatctcttgaactggcccaggcctggggccctgtgtccccaggcagagctcccatagttccccgttagcctagagggtcacagctkccagtcccccagtgtgggtcctgccactcatgggccctggtgggcctgagaatctagtgggcctcctggggtaggctctgtccctgaatgggcagaaacaacctttcagctctcacagtggggtgacatagtggacgagggatgggggatgctgggtctctggacgcatgcctgggggtctccctagggggttgatggttttggccttcaggcagaaagaacctggtggcaaagttccagaggttagcggagcctagcatggaggcggtgagtggggctgcagtgtgtgtgcgtgggggttatgatgaagctgcagggagcagatcacgcagggccgtggggagagccagggctttctgcgggaggctctggggagccctgggaggttccgagtagggaaaggacagggtcaggtttgtgccttaggaacacccctctggaagggcaggacaagaggctgtgaggccaggtggaggctgagccaggaacgtgggcaggagaggccaggtcagggctgggtggggctggagggtgagaagggaatggctggatctgagagatgttcaggaggccgacttggcagaagaagtgaagtgactgccgggctgtgggggctgaggggtcgggaggagtccaggatgaggctcagtctcagctgggtgatggggtggaaggtggacttccctgggatgggagcagcctgcttgggggttgctgctgaggctgcgtcagagttccgggcaacagcagcctttgggaggggccccttaccccccaggaccccggatccaggctctcaggagtcctggggctgggcaggcagccagaggggcctggcactgagctggcacggaggagaacggccctgctggcccaggcccctcgctgtctggcaggcagtagaaggcacagagccccaggctccagggctgtgggaataacaataagaagaataatgacaactcaccttggccaggtgcggtggcgcatgcctataatcccagcactttgggaggctgaggtgggcaggaggtcaggagttccagatcagcctggccaacatggtgaaacctccatctctactaaaaatacaaaaattagctgggggtggtgtcaggcgcctgtaatcccagccactcaggaggctgaggaaggaggattgcttgaacccagaatatggaggttgcagtgagctaagattgcgccactacactccagcctgagtgacagagtgagactccatctcaaagtaataataataataataattacagctcatcttaattgagccctgcggtggccaggtatgccatggcgtttcatctccctaggggctgggagatggctaggaacagccctgtttgtttcatagaggaagcatattaatcagagttctccaaagagacagaatcaacaggatatgtgtagacagagataggagaaggggtttattgggcaactggctcattcaattatggaggcggagaagtcctgaggctgtgtgcaggctggagaccctgggatgcagggagtgtggctcagaacaagtccgaaggcctcagaactggggaagccaacggtgtaattctcagtccgaagccaaaggcctgaggatttgaggggcagctggcgtaagtcctggagtccaaggctgggaagcctggagttgtcgctgcctgcactggttcccacgggggaccaggagctgagcccatggtcctcagacgggcaaggtgtrtgattttaatgtagttatagctaaggttgatgaagtgtgccggtgtgagcagcttagctatggacagttttggggtgcagaaaccaagacttggaggttaaacatgtccagggttgcaccatcagcactggtgcccgggcggcctgacttccgcgttcatggaatccagggctgggcagcctggggacagccgctgtgcccccacctcggcctcagtgtgcacgccccttccctcccacccaggtggtcaaggtgaagccccacgacaaggatgccaaaatgaaataccaggagtgcaacaagatcgtgaagcagaaggcctttgagcgggccatcgcaggcgacgagcacaagcgctccgtggtggactcgctggacatcgagagcatgagtgagtcaggcctggatgctccacgctccagcccagaacattccacacgggccttctccattccctgggggtgggggtgggctcaagggtagccccttgttctgcccccaggctgctgtctgtcgctcctctgcctgtgttccagggcgctccatccgcagcccaaagctccgtctcatgattcccaatgggcgaggtcaggagctgcaacaccccgctgatatggcttggctgtgtccccacccaaatctcatccccacccaaatctcatcttgaattgtaactcccataattcctacatgttgtgggagagacctggtgggagataattgaatcgtggaggcagtttcccccatactgttctcgtggtagtgagtaagtctcacgagatctgatggttttataaggggtttcccctttcacttggttctcattctctcctgcctgtcggcacatgagacgtgcctttcatcttccgccatgattgtgagacctcctcagccacatggaactgtgagtccattaaacctcttattctttatgaattacccagtctcgggtatgtctttatcagcaatgtgaaaatggactaatacaccttccctacccaccagcatcacccctgcccgggcccttctccatgctggcttcttggccactctgtcatcctctcctccctccctctctgccggcagtagccccgcccccacaggctgtgtctggttcacctctaggtgctgagaaggtccagccattcatcccacagatgattattgagcatctcctatgtgccaggcactgtcctaggcactgggggtacagctatgaacaaaacccttcctgtccgcatggagctgatattctaggaggcagataagatgatgaacaagtcacaaaatgaatcgtgctaagtgccataaaactgaatagggtaaaggggggcgggtgaaggaagagaaggaggtcaggaagaggcctctgggccagacctgaccagagaggggactctycactcgctctgtccctctctcaatctgtgtgtccagagccaggtccacctcatccctgggagcaagacccccttcccccttacagtggccgtggtcgctgactctcgtgtctcccctgttcacatgccagccatcgagggtgagtacagcggacccaagcttgaggacgacaaagtgacaatcaccttcatgaaggggctcatgcagtggtacaaggaccagaagaaactgcaccagaaatgcgcctaccaggtaatgcacctgtcaggtaccgggcacccgggaaccctgggatggcatcacagcactgccaggcgcgggcactgagcaaaatgacaggagaagggcagccacaacagccaacaccaaacaggagtcgtggtcattatggattggcagtaatccctcccaatattcagatacaataaactatctctacaaataaagccaccaaccttggctcacttgttcagaagatagcaccgttagagaaatccaagaagcaccaaccctctcactacacatgacactgacttcctttggtggacagagctccaattccttgtartggtgtctctgatttagaaaaggctattatgggccaggcacagtggctgacacctgtaatcccagcactttgggaggccgaggcgggtggatcacttgaggtaaggagttcaatgccagcctggccaacatggtgaaacttcgtctctactaaaaatactaaaattagctgggtgtggtggtgcacacctgtagtcctaggtacttgggaggctgaggcaggagaattgcttgaacccaggaaggggaggttgcagtggtccaagatcatgccactgcactcctgcactccagcctgggcaagagagcaagactccatatcaaaaaacaaaaacagaaacagaaaaagaaaaagaaggaaggaaggaaggggctattataaatgctctaaaactttagaaaaaaacttcaatgacactgttaatttcctccaaggcttacaaaccgaggtttctagccttgcttcaataatttcacaaaatgtatgagtctgagctactctaactgcccaaaaaggaggtataatgaatgaagctgtcatttctgtgttaatatatcaagaatttttgcccacacttcagaggattttaaagaacagatgtaaatcttatcagataggtgatactttttccatttatttatttagttggttacatcttggctcctgggaatctctcctctggtgaattttccaacccttggctatattattctcctcctagtcatgatattaacctccctgggagttgcatcctcttaagggtttccaatgcctctcaacagccactgatgcaactaatgacacccatctgcattagacaacttggagaacctaaggactctaccacatatgtctaagatgactatgcagctatcaaaaatgactatacacccatctgtcccagccaatagcactcccagaaagtaatgctatacgatttcattaccccctcagcttgctatgtcaaaaggggaaagttgttaaaataaaatggggggagccaggcgcagtggctcacacctgtaatctcaacactttgggaggccaaattgggaggatccttgagcccaggagtttgagaccagcctgggcaacatggcaagactccatctctataaaagtaaaaaaaaaaaaattagctgcacaaagtggtgcatgcctgtggtcccagctacttgcgaggctgaggcaacaggatcacctgagcacaggaggttaaggctacagtgagctgcgatcgtgccattcactccagcctgggcaaccgagcgagaccctgtttcacacacacacacacaaaactagggggggtggatccggactgagaattccccaagaagacaaaatcaggccacataagcaaaacctaaggtactctgacttttgaatgtaagcgaaactcaacttagatctcgatctctctctcaatctctctcccttgttttttttttttttttctgagatggagtctggctctgtcgcccaggctggagttcagtggtgcgatctcggctcactgcaagttccgccttctgggttcacgccattctcctgcttcagcctcccgagtagctggaactacaggcgcccgccacctaattttttgtatatttaatagagacggggtttcaccatgttagccaggatggtctcaatctcctgacctcgtgatccgcccaccttggcctcccaaagtgctgggattacaggcgtgagccaccacgcccggctatctctctccctttctttcctttctcctttcctttctctctttctatctttctttctttctttcatggaatcttgctctgtgacccaggctggagtatagtggcatgatctctgctcactgcagcctccatctccggggttcaagcaattcttgtgcttcagcctgccaagtagctgggattacaggcacgcaccaccacgccctgctaatttttgtattttgtatttttttttttttagtagagacggggtttcaccatgttgctcaggctggtctcaaactcctgacctcaagtgatctgtctgcctcagtctcccaaagtgctgggattacaggggtgagccaccgcacccagccagcttaggttatttcttacaaatgcctctgataatcataaacgaaacttaagttgccttccccaaatgatataagaggattgcttttaaccagtcccgtgcaatctggaaacctccactgtatagacagtcactgtaaaggttaaaccacttcctgatttttgctttctcagccatcctgtaacaacatgcctctgagcttcttactacctgggttgagrtctcctggattgtgccctgtccccacttttttttaatgacaacaaacttttaaatatttattcattggatctgattttgttttggacactggcatgcaaaggggagggagatggtcataggactgttgtcaacgttcaaaagcaaaacaggatttatatgagaaaggtaagagaagggagagaaaacttcatactgaagtctgggtgccctggctcacacctgtaatcccagctccttggcagactaacacgggaggatcactacaggccaggaggtcaaggctacagtgagccataatcacgccattgcactccagtctgggcaacagagcaagactctgtctcaaaaagaaaagaaaaatacaacttttgactgaaaacaatgaattgtgttttcacattttgggggtcaaattgattatccagaaactagaaaagagcaggatgactggaggagtgaaagaaagcttttttttttttttttttttttaagagacaggtcttgctatgttgcccaggctggtcttgaactcctggcctcaagcaatcttcctgtcttggcctcccaaggtgttgggattacaggcattagccactgtgcccaaccaagaaagcaatttctgatacttgggattttccagaaaacctgaagagcttagctgtggagcgtttgtaggaggctgtctccatgacatctgctgtgacctcctgttggcaatggcccatagttagcccaggtgaccccattccttcctcaagctttcctcaaggtctgttttttcggtttgtttgttgtttttgagatggagtcttgctctgttgcctaggctggagtgcagtggtgcgatcttggctcactgcaacccccgtctcccgggttcaagtgattctcttgcctcagcctcccgagtagctgggactacaggcgtgggccaccacgtctggctaatttttgtgtttttagtagagatggggtttcaccatgttggccaggctggtctcgaactcctaacttcaggtgatccgcccacctcagcctcccaaagtgctgggattacaggcgtgagccaccgtgcccggcccttcaaggtctattttatctccttctatgtctatatccacagtaatatctatgtctacattgatgtttatgtctatatccatgtctacgcccacagctctatcctaatctatacctacaccataggggctgctatatccttattggtagcttatcctctatctgcaactatatccacatctccatctacattcagatcagtctccctctctctgtctatgtctgtgttcattttctagagctgctgtcataaattctcacaaacttggtggctaaaaataacagacgcttattttctcacagttccggaggccagatgttcaaaacaaagatgccagcagggccttgttggctctgaaggttctatgggagaatcctttcttgcctcctccagcttctgggggctcttgatgtctcttggctccagtctctggccttctcttcttctctgtgtcttttcttttgctgtgtcttttttttggagggggcgggacagggacagagtctcgctccatcgtccaggctggagtgcagtggctggcgcgatctcggctcactgcaacctccgcctcccgggtttaagcgattcttccacctctgcgtcccaagtagctggaattacaattgcctgccaccatgcctggctaatttttgtatttttagtagagacggttttcaccatgttggccaaggctggtcctgaacccctgatctcaagtgatctgcccacctcagcctctcaaagtgctgggattacagacatgagtcaccgcgtccagccaggtttcacttatttctgtagattcttggtccaaccaacaagtttcccacaatttattgcattatttaaaaaaatatctatcatcataaaaataatacgtctgatattatttttctataatattctaggcattattatataatattctaggtggtattattattctaggcatactattaaacacagaaagaaagacacggaggtcagwagccttcaaagatggctactaacaattcctcccttccctgtacacacgcatcactcctcccatcaccaggggggtctacttcccctcccctccatyctgggcaggcctcgtgacttgttttgaccaatagaatgtagcagagtgatgcgtcaatttcaagcctaggccttaagagtccaggagactcccactcttactcacgtgcatgccagctgccatcttgcaaggaagctaaagctgggttacaaaatagtgaaagcccaggtgaatgcagagaggctgtgtygggaagaatcagcctattaccagctgacattagccacacaagtgaccgagggagagaccagcagcagaaccacgcagtcaaccctctgaatgctagtaagtcattgtttgaagcccctaaactctagcgggttgtgaacagcaatatatggctgaagcagacacccctcccttaagcccccagcccagagaggaaccctgctaaccttttgatgcaggtcctaccagatttgttttttcctgtgcttatacatataataaaaaaaaatccacaaaatagacatcttggcttatttttacatttcaggaaagctgttcagaatgattttattaatagtacagctgcagcaggaagaggaaatatagcaaaatttgcctcttaaccaccaagagtcatgctgagctcttcatagctatgaaaatcaaagacccaaatttacagactttgcacatttgtgctgagttactttagtactttgtctacaggtctccacaggcccagtggggaggaacagttatttcttaagcaccttccaaaaatttttgaaccagaaaaaaagtatcagtttcaaaatacagaagaaactggcaaaatcacagttaactaatacatcattaaatatttcatagtaaatcaagtcaagtaattgttaaatatttctatcatgtctttttttttttttttttttttttttttttttgagacagggtcttgctctatcacccaggctgaagtgcagtggtacgatcacagctcactgcagcctcaacctcctgggcccacgtgatcctcccacctcagcatcccaagtagctgtgaccgaaggcatgcaccaccacacctggctaatttttttatttttatagagatgggtctccctatgttgcgcaggctgatttcaaactcttggcctcaagcaatcctcccaccttggcctggggattacaggcgtgagccaccatgcccagcctccgtgtctttacatttgagaacaatttgtaggttagctttgtctttgtttttttagagatgggggtcttgctgtgtagcccaggctggactcaaactacagggctcaaggcattcttcatctcagcctcttgagtaggtttgactacagtcatgtgccactgtgcccaactacctttgtccgggttcctaggaattctccagaaggcagaatgagtacaaagaaaacacaggcaagtttctgttaaagagttacctgtggccacagttcctctggaagtttaacatagagttaccatatactatgctatcgccatccccaaattcatatgttgaagtcttaactcccagcacctctgaatgtgactgtatttggagatgggggtctttaaagaggtaattaaggtaaaatgaggccgggtgctttggtggctcacagctgtaatcccagcactttgggaagctgaggcgggcagatacctgaggtcaggagttcgagaccagcctgcccaacatggtgaaaccctatctctactaaaaatacaaaatttgcctggcgtggcggcacatgcctgtgatcccagctccttgggaggctgaggcaggagaactgtttgaactagggaggaggaggttgcagtgagccgagatcatgccattgcactccagcctgggcaacaagagcgaaactttggttcaaaaacaaacaaaaaaaaagtaaaatgaggtcccatgtgtgggcccttaatccaacctgactggtgtctttatgagaaaaggggaccaggacacagccccatgcagagggaagaccatgtgaggatacagggagaagacggccgtctgcacagccaaggagagaggcctcaggagacaccaacctatccaacaccttgattttrgacttctggcctccagaattgtgaaaaagttaatttctgtcattgaagccacccattctgtgatagtttgttacagcagtcctcagcgcgtagaatacgatgccatttgtatgacagacagtctcattgtacacacgcgtgttaatgtgtgagtatccctgtggggcgcagagatggctgggggagttccccgctgccctgctcaaaaggtggagcctgrcccgccctccccaaccctttccttgaccttgycataatcactgtggtctttataagctttgcctgccagttccctctgagacttcatttcctcccaggactgggtcctgcgctcccgtctcgctttaaactaagtaagaacatttatagaaaatgcaaggcccggccgggcacagtggttcacgcctgtaatcccagcactttgggaggccgaggcgggcagatcacgaggtcaggagttcaagaccagcctggccaacatgatgaaaccccatctctactaaagacacacaaaaaattagctgggcttggtggcatgctcctgtaatcccagctactagggaggctagggcaggagaattgcttgaacccgggaggcagagtttgcagtgagccgagattgtagcattgcactccagcctgggcaacagggtgagacttcatctcaaaaaaaaaaaagaaagaaaagaagccgcaaggccccaggatagaggacttcaaactttgttttggtgctaccaaaagtgtttttgaaaactgtctcctcatcatatcaaatattttcatcacataaattgaaaaaagtgtattattattattttttttgagatggagtcttgctctgtcacccaggctagagtgcagtggtgcagtcttggctcactgcaacctctgcctcccaggttcaaacaattctcctgcctcagcctcctgagtagctgggattacaggcgcccgccatcacacccaggtttcaccatgttggccaggctggtctcaaactcctgacctgaagtgatccgcctgcctttcctcccaaagagctgggattacaggccaagccactgcacccggccatggctactaagttcttaggacataaatacttgggttgtttagacctcacctgatgaggaattgaacagttaggtatttatttggggctgctatgaagaaatgacggctggtacattgagcaagttcagggtgatctgcacagggcacaggggttgagagcctgggctctgggctcagaagaccttggtttgccacctcactttgccattcctgggctctgtgcaacctctgtgcctgtaaaatgggactcgttcagagttatgggattagtgacaaaagcccttgtaaaatattcagacaatccctggcctgtcttaggaggcaataaatgttagctttatgaatttatttatttaaccaaaatggactcattctatgtacatatttctaccagttttttttttcttcacttactattacctggacattttttccagcctccccaaagggacctagattgttttttctaataaatgcacaatttgactgttacttccctcttcctcagtctgcacccttcagttttgttttttgttttgtttttgtttttgtttttttttgagacagagtcttgctgtgtcttgcaccccaggctggagtgcagtggcacgatctcagcycactgcaacttccacctcccgggttcaagcgattctcctgcctcagcctcccaagtagttggaactacaggtgtgcaccaccatgcccagctaatttttgtatttttagtagggatagggttttgccgtgttggccaggctggtctcaaactcctgatcttaggcagmccacctgccttggcctcccaaagtgctgggattacaggcgcgagccactggcgcctgacctcagggtctttttaaaataagaatttccaagaccttgaggttccctgggctcccctaaacctgggatacagacctacaaaagcctgccctttcctcatcagaaaataggtccttgttctcctctcccagaccctcaccctgtagttacttttccctcttctggggaaggagttccatttcctcctcctagcatttgaagtctctgtgtcctgccctggcaaggccccttgcagggtaaatctcagttctgccacctccatgtctcgcgacccaggacaggtccctcaattttcctgagcttcagtttcctaatctgtatcacagggataaaataatagaacccgcatccctgggctgctgtgacactttcagaggttagcccctaaggctatgaaraatctgccttaaagtgtgcaggctccccgggcagtggcagtggggagggctgcctggctagaggccccctttgcatgagctgcccccctccatcctcatcaaggggtctaacacccagtcaccactctctcttttgagaaactttgccacaaacaggacaaagagctgtgaagtcacagaggcttgagctggaagtttatctgcagtttggatgctgtgcgacttgggaaaattaaacaccctccctgatccttgctttcctcctcctctaccttggctgggtctcatctagcagttgatttagagatcaggtgtgtgaagcacttaacaggggtctgacaagcagtagggctgatattagcagttattcacattgttattgttattcctttctccttaggtgggggcggagggggcwcgttttggtggtgwagggaggacacatggtagatgcattgaattctagattttttctgccctctagtgggcatgaggagccacagctctgggaaaaggaaaatacatccaccctttaaacagttacgtgaattcattcttttttttttttggtaagacggagtctcgctctgtcaccacccaggctggagtgcaatggcacgatattggctcactgcaatctccacctcctgggttcaagcaattctcctgcctcagcctcccgagtagttgggactacaggcgtgcgccaccacacccggctcattttttgtatttttagtagagacagggtttcaccatgttggccagggtggtctcaaactcctgacctcaggtaatccaccagcctcggcctcacagagtgctgggattataggtgtgagccacggcgcacggccctttcttttgtttaataaaccttctcgagccccttctccatactggagacccagcagtgaccatgacaatactggacctgccctcttgggactcaaagtccagtgggggagagagaactgacaaccccaaggggacacccgacccagtccacgtgctttagactggatgaaaccagggagaagggttggccagagctttctttccagatctggagcacatggtgaagggctgggtgttgtcttgagggcactggggagccatagcaggttccaggcagggggaggaacaggggcaaatttgtgctgccatgggtgaaatgggtgggatgggggaagactggggatgggagacctagggctgagagggggataaggaggcgcctggataaggggtggggccatgggtgggggaataccagggcgaagcccctggctcggaggagagggagggcctcgccctcttgtggtctaagggaggaaaggatggtctccagccagatgccccacctcattcaggccttcctcactgggggccccatctggagttctcctgtgcacaccacagcccagagattccagtaagtccggctgcctgggacaggccgccaggtcggccaaggatgaccaagaaaacaccatttggccccatcctggggagaaagaatgggcatttgtgtggccaggattaggggtggactaggggaggggacgtgtcagtgtgtgtgtgtgagtgtgtgtcagggtcggggtgatggtgtgtgtggacatgtgagagggtttcagtgggtgtggcatatgtgtgtgcaaaggtgtgtgaatcggtatgctggatgtgcaagtgtgtgtgaacatgtcggtgtatctggatgtgtgtgttagaatgtgactaggagtgtgagcatgattgtgtgttttgtgagtgtgttggcycctgtgtaagtctgtgtgtgtaggtgtgtgcctattagtgtgactgtgacactagctgacaggagcccacggccacaccttgaacccgacaacccctgccctcagtctctgcaaggacccatcctcagcatgctcccaaattttgggtgtcaccttcagtataatcctcacatattggggacttcccaaatacagggtcaccagcttctcatgtagccaaaaccaaataaatgcaaaatgagtaaaaacaaacacaaaaatgaaaccaatgtgaagaaaggaaaacataaaaccaaagaatgggtgggagagaattgcaaactaaaacgaggattttaaatggaaaacstggccaggtgggcagctcatgcctataatcccagcactttgggaggccgaggcaggcagatcacttgaggtcaagagttcgagaccagcctgcccaacatggtgaaaccccgtctctactaataatacaaaaattagcttgcgtgttggcgcgcgcctgtagttccagttgggcaggaggctgaggtgagaggatggcttgagcctgggaggcggagcttgcagtgagctgagatcaggccactgcactccagcctgggcgacagaggcagactccgtttctaaatacatacataaataaatagaaaacatttacgtttggatatatcccacttcctcacctaactgtccccactcttgttcaggttctggccccctggtggaagtcgggcaggcaccctcccggggctgacactggggagcaacatgaagtcaaattttcatcccatttctcagatgaggaaactgaggctcagaggtggggaagagctcgaaccccggtctgtcggcccctctgatrgccacccccttgtccctcgggcgggttagacccgatgtcgcgctggtccctacaacaccatccccaggggctgaatgctcaagcccctccggcggttcaagcagggagaggagcgcccgagacacgcggctaggagggaggaaggagagttccacagacaacaggcgacgcgctcgtgttccccaccagggggcgctgcaggaccgctggctaaagcgccggctcagaacgccctggcccggtggcttggcctagtggtccttagcctggcttgtatgttagaatcacttgggagtgcttaaagatcccaatcttcaggccacaccccaaaacagcggaatcagagtccctgggagtggagccagggcatcggtattttgcaaatcttcccctaagtgattccaaaagtgcagccagattgggaaccactgacttatagaggttttcatgacaatgctaagagaacgagatccctattttcaggtacataagtgaaggccccaacaggtaattaaccagccgaaggttgtaagtgacagcaggggctgggggtggggtgagcccaggcaacagcactgcaaatatccctcccacaccaagccctgtccccatctcttgtatgcccctgccccatcccccagctccccactttagaagcaataatgtccccactcgtcctctccctgggaaggtaaaggctaatttggagtcaagactccagttttctggggcgatttcatcaaaaatcctgctgtctgggctgggtgcggtggctcatgcttgtaatcccagcactttgggaggccaaggcgggtggatcacttgaggtcaggagtttgagatcagcctgaccaacatggcgaaaccctgtctctactaaaaatagaaaaatyagttgggcgtggtggcatgtgcctgtaatcccagctacttaggaggctgagtcaggagaattgcttgaacccgagaggcagaggttgcagtaagccaagatcacaccactgccctccagcctgggtgacagagtgagactccacctcaaaaaataaaataaaataaaataaaaaagaaaatcctgttgtctgaaaccataaccatgaatttgggaactgaatttaatcctccttgagttaaaaataatgaatattgttgctgccatctctggattacaaaagtgcccatctcatagctgagcccttggctgatgctcttgtggcgtcccaggggcagagatggttgtgtccattccagagaaacacagatttagactcttcaggtcttttctctgccagctgttgccacagggcacactgtggggcatggtatccaagacgattgctatcagttctcctgccctatgagcccactacctttcccatcaagagatgggatctctttctcctcagcttgaatctgggctagccttacgacttggttggaccaatagaattcagcacaaatgatgtgatacaagttccaggtgtagcccttaagagacatggcaggattcaccgcctccctgttagaagccagccgccattgtttaaaacttcagctgaattaaatttaaagtttaattgaacaatgaacaatttgtgaattgggcagcccccagaatcacagcagattcagagagactccagggatgcctcctggtcagaacaaatttatagattaaaaaaaaagggaagtggctgggcgcagtggctcacacctgtaatcccagcactttggaaggccaaggcgggtggatcacgaggtcaagaggtggagaccatcctggccaacatggtgaaactccatctctactaaaaataaaaaaattagctgggcgtggtggtgcatgcctgtagtcccagctactcaggaggctgaggcaggagaatccttgaacctgggaggcggaggttgcagtgagctgagatcgcgccactgcactacagcctggcgacagtgcaagactccatcgccaaaacacacacacacacacacaaaaacgggaagtgacatacaaaaatcagcagtgaggtacagaaacagcaggattggttacatgttggtgtttgccttatttgaacacagtttgaattaggttttcgatcttgtctgcctattaagctaggttatagcttgtccacaaggactcaaaaataggagtatagaatccttctcgggccatatttagtttgctttaacaccatgtaagaagcctgacccctgtgatcctgccatggtatgaggaagcccaagtcagccatgtggacaggctgtgtgaagaaagagatgccagacagtccccagccattagaatcatcccatccgaggtgccagacatcttaagtgaaggaaccatcttggacatccctaccctaatggaagcccatcaagcagaagaaccagccagctgaacccagtcctgattgcaaaatcaagagaaaaaatatactgccactgctttaacccacaaagttttgggggtggcatgttttattgcaatagataacatccacacgaaaactcaaaaccaacccatggctcccatctcacccacagcaaaacgaaacgtttttatcagagcagtagggccctgaatgcctcccattcctgcattgttcttttgactctccaatgggccaagctcccctaagtgccttagtacttactgcacactgtaccttgtctccccatgtcttgcccctcagttccttctgctctctgctcctgtgtcaccttctcactgagatcctctttgagcacccctgcacccactttacaccatgttaatattaccttggcacttacacttgacatgttatgtagtttatttcttcaaatatatatatatatatatatacacatacatatatacgtgtgtatatatatatatacacgtatacacacacacacacacacacacacacacacatatatatatatagagagagagagagagacagacagagccccgctctgtccccagggctggagtgcagtggtgcaatcttggctcactgcagccttgacctcctcggctcaagctattctcccacctcagcctcctgagtagatggggctacaggtgtgtgccaccaggcccagctaatttttgtattgtttagtagagatggggtttcaccatgttgcccaggctggtttcgaactcctgggctcaagtgatctgcccaccttggcctcgcaaagtgctgggattacaggcatgagtcactgtgcccagccactatatatatatatatatatatatatatatatatatatatatatatatatatattttatcacttatccatgtcacctgtgacatcagttccatgagggcagggatttttgtgttttgtttgatgctatgtccccagtacctagaacatggtttggcacacagtagatgctcaataagcatttttccctgcagtaactgaacttggtctcctctccctaatactcagatccccatggtgccagcccccaccctcttggtacccagtatcatcttttttttttttttttttgagacggagtcttgctctgtagcccagggtggagagcagtggcatgatctcagctcactgcaacctccgtctcccaggttcaagcaattctcctgcctcagcctcccaagttgctgggattacaggctcccaccaccatgcctggctaatttttgtatttttagtagagatggggtttcaccatgttggccaggttggtctcgaactcctgacctcagacgatccaactgccttggcctcccaaagtgctgggattacaggcgtgagccaccgtgcccggcccagtatcatctttttaaacaattttactacaggctgggcgctgtggctcatgcctgtaatcccagcactttgggaggccgaggcgggcggatcacgaggtcaggagatcgagaccatcctggctaatacggtgaaaccccgtctctactaaaaatacaaaaaattagctgggcgtggtggtgggcacctgtagtcccagctacttgggaggctgaggcaggagaatggcgtgaacccaggaggcgaaccttgcagtgagcagagatcatgccactgcactccagcctaggtgacagagcaagactctatctcaaaacaaacaaacaaacaaaaaacaattttactacagtccttccaacactttattacaaaaactttcaaacatagagcaaagttgaaagatttcacaacaagcgcccctatccccacctcctagattctaccattgacattttatcatgcctgctgtatcacaggtgtggctgtatcccatatccatcaagccatcttttcttgtgcatttcaaaataaattatagattatctgtccactgccctcttaatgcttcatatcattaactaaggtttaatatttgttcttttgagagaagaatgtaaaatacacacaataaaatgcacagatctcaggtataaattcactgagttttgacaaatacatacccctgaaaaaccaaatgcctgtcaaaatacagaactcaggccaggtacgggggctcatgcctgtaatcccagtactttgggaggccgaggcgggaggactgcttgagtccatgagtttgagactagcttgggcaacatggcagaagcctgtctctacaaaaacatacaaaaattagctgggtgtgatggtgtgcctgtcatcccagctactcaggaggctgaggtgggagaattgcttgaggccgggaggctgaggttgcagtgtgagctgagatcgctccactgcactccagcctgggtgacagagtgagactccatctcaaaaaaaaaaaaaaaataccgaacaccccatcatcccagaaagttcctgcatgttcctttccagccagtccccgaactccagaggcaagcactgctctgatttttttccaccataggttatagttttgcctgtcctagaatgtcatacaaatggaatcatagaaagatgtatgcttttagctaagtgcggtggctcacacctgtaatcttagcactttgggaggccgaggcgggtggatcacctgaagttgggagtttgagaccagcctgaccaacatggagaaaccccgtctctactaaaaatacaaaattagccaggcatggaggtgcatgcttgcaatcccagctactcgggaggctgaggcagcagaattacttgaacccaggaggcggaggtcgtggtgagttgagattgtgccattgcactcccacctgggcaacaagagcaaaactcccatctcaaaaaaaaaaaaagatgtacacttttgtgtcttgcttctttactcatgaggctatcttgaacttaaaccagggtctttttccaaggaaaagctttttctggcattgtccatctcttgactaattccttccttctcaggccggtgtcccaagggtccagtcatgcaaactatttgaaaaactaaagacttttttatgtggtcccctgggatactctggtctttggagacctcttcattccttgtcttaaagcagaccctggtcaacttgggtcactagctgtttcctcccaggagtggtgttttttttgttttgttttgttttgttttaacggagcttccctcttgtcatccaggctggagtgcagcagtggcacgatcttggctcactacaatctccaccttctgggttcaagtgattctcctgcctcagcctcctgaatagctgggattacaggtgcccgcgccgtgcccagctaatttttgtatttttactaagacggggttttaccatgtttgccaggctgrtctcaaactcctgacctcaagtgatccgccctcctcggcctcccaaagtgctgggattacaggcgtgagccgcggggccccgccccaggagtgggttttatcccttgggaccttgattttgtttctcacaacccctccggccccccagagccattactcgtcctacagcacctcatgtgtctcctccttggtgcatgtcacatcttactgaatgcttgcttttattgtttttcatttgtgtgtgtgtgtgtgtgtgtgtgtgtgtgtgtgtgtgtgtgttttgagacagagtctcattctgtcgctcaggctggagtgcagtggtgcgatctcagctcactgcaacctctactttctggggtttaagtgattcttctgccgcagycccctgtgtagctgggattgcaggcacccaccatcatgcccggctaacttttgcttttttagtaaagatggggtttcgccatgttggccaggctagtctcgaactcctgacctcaggtgatccaccggcctcggcctcccaaagtgttggaattacaggcgtgagccactgcgcccagcccagctttttgttttcttttgcaaatagtgggttaacattttttagcattttctaaggtggaacatgatgaggcttgactaaggttgaaatccatatttcatggtccgctctagtgtgaatggaatcactgatacacttcatcctatatcttgcttctctgcaacaatagaacatggccagttgccaggaaatacattgggacccagctcactgtttttcatcatcacatgaaaatccacagaaagtctgtgaagtaatttattcactcttttcatcattatgaattcgtagttattagtggttcatatctgatctccctatgatgtcagccaggccctggtctgatgtagtcacagtcatatcccacacgtgtgggttctttgtgtttgctaaatgattaaatgaacaaatgaatgaatgagtgctgaggagggatggtgctgctgaaagtctgcctagtatccctgttagaatcagaggtttggagccagacacggtggttcacgcctgtaatcccagcactttgggaggccaaagcgggcagattatgaggtcaagagatcgagaccatcctggccaacatggtgaaaccccgtctctactaaaaatacaaaagttagctggacgtggtggcaggtggctgtaatcccagctacttgggaggctgaggcaggagaatcacttgaacccaggaggcggaggttgcagtgagccgagatcacgcgactgcgctccagcctgctcacagagcaagactccatctcaaaaacaaacaaacaaacaaacaaaagaatcagaggtttggagtcacagagacctgaggtcaaattgatgtctcaccacttcccagttgtaaaagaccttccaccctgcgtgtgtgtgcacacacacacagcctcagatttctcatctgggaaatagagataataatggggctggctttacatgactgtggtgaagattaaatgaagcaatatattaaaggctattctagccaatgtctggcataagatcatcccttggcatggtgtgtgtgatgttataattcctcctttcctttcttcctccatctgttcaatacaagatttactgagcaccatgttatactatcctctttgtattatagaaatgttattcacatttaacaatatattattggagcaacagaaagagctaaaatacctttaggaattgcattgggctctgttcaaaaaagtcaacaattagccgggtgcggtggctcacgcctgtaatcccagcactttgggaggccaaggcgggcggatcacaggtcaggagatcgagaccatcctggctaacacagtgaaaccctgtctctactaaaaatacaaaraattagccgggtgtggtggcgggcgcctgtagtcccagctactcaggaggctgaggcaggagaacggcgtgaacccaggagmcggagcttatagtgagccgagatagtgccactgcactccagcctgtgcaacagagcgagactgtctaaaaaaaaaaaaaaaaagtcaacagttgtggtggtaaaagcacaaacagcaatgagaaaatgggaaaacactatgaacaggatatttaaagaaggggatttccaaataaactaaaaaagagatgtgcaaactcatttgtagttggagaacaatgagctaccaccttatgcccatgagatgggcaaatcctagaagcctggacaatctccagaggtgggagtgggcactgggggcacaggaatcctcatatgtgagcaaatagggacattcattgcactgagtgacttgtaggacttggtagagttaggaatacgcagaccctagtcaggcgcagtggcccatgctgtaatccggcactttgagaggcttaggaaggagaattgcttgagcccaggagttcgagaccagcccagacaacatagtgagaccctatctctacaaaaatttttttaaaataagcaagacgtggtggtgcatacctgtagtctcagctacccaggaggctaaggcaagaggatcacctgagtgcaggaagtcaaggctgttgtgagccatgatggctactgtcactcggtgacaaaaataaataaataaataaaggaatatgcagacccaagcaattctgctcctgggacctatgccaagggcagtctcagtgtctcattctcattcaacatcataagaaaatgtgtacaagaacatttatggtagagtatttgtgctgtgtgtatgtgggagcaggagatggatctgggtgtgcactggttactttcgctgtgtaacaaaccaaccctcacttagtgtcataaagcagcaacatctcattatgcccatagattccatgggtccatagttatgaaaggggatggcttcttttggccccataatgtgtggggccacagctgggatgaccccaatggctagggtctggaatcatctggaagcttcatcactcatatgtccggtgcctggtttgagatgatttgaagactggacttagttggagctgttgacttgagcacctacatgcagagctctccatgtgagttgggcttcctcacggcatggcagctaagttccaagcagtaattattccagaagaaccaggcaaaagccttttataactaaccttggaagtcacctagcatccagctaaccttgaaagacacagagcaagtggatgtacactagcagttgaggtagtcacaaactcacccagattcagcttcaaggaaagaggaggtagatctcacctctcagcagagttaaagaacttgcagcaatgtttaacaaccatgcagccccattcagcaggtgaaattaccagcaagatacagaactgggatcaatcttagacacgttactgctgagtgctaaaaaaaaaaaaaaagaaagaaaaccgcacacacacacacacacacacacacacacacacacacacacacacaaaaccatgagaaacaaaaagagatagatcatggaaaacaagttatgcaaatttagcctagatgcccccaaacagcaatgcacattttgcaggaacacatgaaaataaaaggacagccatcacaaaatgaaaagtgaaaaggaatgggagagggggatgaagataakatggcatttctaagacgtggaggcaggcggagttgacagctccttggrtgtaaacgtgttgaaaggcagacctgccattcgtcaccctccagacacacgggaggtaaattgattttgtgttgaggatgtgctgatctggtttccctggcaacactgctctgaggcgaaaagagaggagcagaaagacaacggaggggagatgggagatgagtctgcagtgcacctaactcccatgattcaactgtaacttgctggagaaacacgcacacacacacatgcacacacacacgcacacacacatgcacacacacacgcacacacacacatgcacacacacacgcacgcacacacacgcccggctgaaaaatatggtttttctgttttgggccctagggaacattgtgttatattctcgagtatgtatattctccaacgatttggtctcaggacctctcaaattattaagaattatcaaggaccctaaagagcgtttgtttatgtgggttatatgtgtcgatatttactctattaggaatctctcctgataaattaaaagaatatggtatttgttaaccctttcaaaaatagtgagccatgattgagccattgcaccccacctgggtgacagagtaagaccctgtctcaaaaaaaaaaaaaaaaaaaaaacgagagagagagaaaagaatagaccctgagccccaggccccgtgcacgtaagatctaacggtgaccagccaagtagggccatctggagcctgaaaatctcctgcctagtaacaaacatgttacacactcatgtagataacatatataaataggttttttttttttgagacagggtctcactctgtttcccaggctgaagtgcggtggcacaatcatggttcactgcagcctcaaacctccaaggttcaagcaattctcctacctcrgcctccccagtagctggtattacaggcatgggccaccacaactgactaatttttctcgtattttttgtagagatggggtctccttatgttgtccaggctggtctcgaactcctgggctcaggcaatcctcctgtcttggtctcccaaagtactgggataacaggtatgagccaccttgcctagccctaaaaatagatatatttcccaaaacaaaacaaagttagtgagaagagtggcactgtagtattttggtgtttttcaactcactttgatatctggctcaacaatccttgacctgcctcctggttcagtcagctgcaatacggcacggcatgtagcctctggaaaattccactgaacactggtaagagagtaagagtgaaaagacaaataatggtttagtattatgaaaatggtttttatctgatggatgccctggaatgtccttgcaacccgtagaggtccccagaccacactttgagaacccttgctctggccgggggcggtggctcacacctgtaatcccagcactttgggaggctgaggcgggcggatcacgaggtcaggagattgagatcatcctggctaacacggtgaaaccccgtctctactaaaaaaattaaaaaattagccggatgtggtggcaggcacctgtagtcccagctacttgggaggctgagggaggagaatggcgtgaacccgggaggcggagcttgcagtgagctgagattgcgccactgcactccagcctgggcaacagagtgagactccgtctcgaaaaaaaaaaaacgaaaacaaagaaagagaacccttgctccaatagcgccatttccagttaagcagattcacttgtatttttctcgaacacaaaatgagggggagaagaatttcgaacaattttttcaagcgatcctcccacctcagtctcctgagttgctgggactccaagtgcatgccatcaggcccagctaatttttgtatttttagtagagacggggtttcaccatgttgtccaggctggtcttgaactcctggcctcatgtgatccacccgcctcggtctcccaaagtgctgggattacaggcgtgagccaccacgcccggccttgaacgctttacgccctttcttccagctgtttccattggaaccttacaggcagtggcttggtcagtcataggctcatctctgcctaagaagagatcatgattccaggggaaatgcccagggcgggactgggcaggacatgttggggatcctgatgtccctgcctggctggtccctgtaagatcttctgtgcacagggcttggggttcatagtctatccttttttttttttttctttttttttgagacagggtcttactctgtcatccaggctggagtgcagtggctcagtcatggctcactgcagcctcgacctggcaggcccaagcaatcctcccacctcagcctcctgagtagctgggattacaggcacctgccaacatgaccagctaatttttcttttctttttttttttttcagacgggagtctcactctgttgcccaggctggagtgcagtggcgcaatctcggctcactgcaagctctgcctcccgggttcacaccattctcctgcctcagcctcccaagtggctgggactacaggtgcccaccaccacacctggctaattttgcgtatttttagtagagacggggtttcactgtgttagccaggatggtcttgatctcctgacctcatgatccacccacttcagcctcccaaagtgctgggattacaggcatgagccaccatgcctggccatgaccagctaattttggtatttttggtagagatggggtttcaccatgttgggcaggctggtcttgaactcctggcctcaagtgatctgcctgccttaacctcccaaagtgctgggattacaggtgtgagccaccacacacagcccaacatatgaattttattttattttattttattttattttattttattttattttattttatttatttatttagagacagtcatgcctgtcacccaggctggagttcagtggtacaatctcagctcactgcaacctccgccttccaggttcaagcggttctcctgcctcagcctcctgaatagctgggattccagccactcaccatcacacctggctaatttttgtatttttagtagagatggggtttcgccatgttggccaggctggtctcgaactcctgaccacaagcaatccacctgcctcagcctcccagaatgatgggattacacgcgtgagccaccacacccaggctccaacatatgaattttaaagagacataattcagcctctgtacctttgggtcctcttataaaccagacgctctcctggggagtcccctctgcattccagcgtgccacctcatcctgtcccacggtgagaatgaaatctttgtcccagtaacactcagggccaggcactgttccaacacacacacacacacacacacacacacacacacacacacacacatcccgcttaaatcctcacaacctcacgataaactggggccacagagccatgaagagacaaagtgacttgcttggttattgggcaaatgtaaaagactaacccggatggcactttgatcttggacttccagactctggaactgggagaaaatagatttctgttatctaagccatccagcctgtgacactgttgaaaaatcagtctacaatgatctgggtccagaacctaactccattttagcacttacagcggctttgtgggaagtaggaaagactcttgctctgcgttgaccattgctaaaagcatcccttcagcccctcaaatgactcaacatagagttaccatgtgccccgggattcctctcctaaaagtgtctgcccaagagaaatgaaaacatatgtctacatagaaatttgcacacagcatatccatcatgctcctatgttcctagcatattcatgatagcccaaaagtgcaaacaacccaaatgtccatcaactgatgaatggataaagaaaatttgatttatccattccatggaacattgctcagccataaaaagaatggaggctgggtgcagtggctcacacctgaaatcccagcactttaggagaccgagatgggcagatgggcaggcaaactcctgaggtcaggagtttgagaccagcctggccaacatggtgaaaccctgtctgtactaaaaatacaaaaataactgggtgtggcggtgggtgcctgtaatcccagctactcgggaggctgaggcaggtgaactcggagaactccttgaactcgggaggcagaggttgcagtgagctgagattgtgccactgcaccccagcctgggtgacagagcgagactctgtctctaaataaatggaacagagtattggatgacacttgccacacaacactgaacaaatgatrctgagtgaaagaagccagacacaaaggaacaacatattgtatgactccattcatatgaaatgtccagaatggggaagtccgtagagacagaaagcagattagtggttgccgggggctggggggagattagagggttggagggtgatggctaagcagtgtgggatttctttttgaggtgatgaaaatgttttaaaatcaatcgtggtgttggtcacacaactctgaatgaactaacagccattgagttgtgcactttaaatgggtgggttatatggtatatgaatcttcatttttacaagaatttcacctgtggttatccacaacgacttagaaaagtgtcagcttcatcgggcatgatggctcacgcctgcaatccctgcattttgggaggccaaggaaggaggatcacttgagcccaggagtttgagaccagcctgggcaacataacaagaccccatctctacaaaaaataaaattagccaggcgtggtggtgtgctgcagttccagctactctggaggctgaggtgggagaggtgcttgaagccaggagttcaagactgcagtgagccatggtcatgccactgcactctagcctgggagacagcaagactctgactctaaaatacacacacacacacacacacacacacacacaaagtgcaagcttcctgtttctctttttgttgtgttttccaatcttgcagttataaataacagttgtgctgagtgtattcacacacacacacactctctctctctctctctctctccccctaattaattcttgcaaacaaattcccaatggccctgtgtggctgctgagcccttgaaatacggctactccaaagggactcattatgaaaagagagtgtctgatagctcataaataattgttttacattgacaacttgtgcaaatgacaacactttgtatatttcgggataaataatatatattctttattttctttttctttttccttttccttttttttttttttttttttttttttttttttttttgagacagggtcattctcttgcccaagctggagtgcagtgtagcatgatcatctctcacttcagccttgatctcctgggctgaagcaatcctcctacctcagcttcctgagtatcagggactacagatgtgtgtcactaagcctggctaacttttgtattttttgtagagacgaggttttgccatgttggccaggccggtctcaaactcctgggctcaagtgatctgcctgcctcggcctcccaaagtgctgggattacaggcgtgagccactgcgcctggccaaaatctattcttaaaattcatttttcttccctcttttctatttattgaaggtggccccctaggaaattttgtattttttgtagagataggttttcaccatgttgcccgggctggtctcgaactcctaacctcaagtgatctgcccgcctcagcctctgaaagtgctgggattacaggattacatggtgagtcaccatatttcttctttttttagatcaatagatgcagaaaaagcagctcgttttttgttttgttttggtttggtttggtttggtttggtttggtttttttgagacagcgtcttgctctgtctcccaggctggagtgcagtggcgcaatctcggctcaatgcaacaacctctgcctcccaggttcatgtgattctcctgcctcagcctccaagtagctgggattacaggcgtgcgctaccatgcccagcctagattggagattcaaatgtcaaaaatgacactttgtaatcccagcactttgggaggctgaggtgggtggaccacctgaggtcagtgttggctggctgcaactaggagttttaacattgcacgtgcggttcgaatttggggctggcattctattcctgctggacaacgctgctctggagaaaagagtcacatcacatccatctgtggatcaggaagatcagaggaggaaaaagtgggggaaaataggagtgagtaagcggtttgcccagttgctgtggtaaccttgcagttaaactctccttaaacataaaaaaatccaaacacaaaagtaaggggttgggcctggtggcaaaaacaaaaaactcgaggtgttttggtttcctatttatttgtttattaacagatgctttgggctgagcacggtggctcgtgcctgtaatcccagcactttgggaggccgacgccggcagatcacccgaggtcaggagttccagaccaycctggccaacatggtgaaaatccatctactaaaaatacaaaactaggccgggcacggtggctcacacctgtaatcccagcactttgggaggccgaggcgggcggatcacgaggttgggagtttgagacaaggttgcccaacatagtgaaaccccgtctctactaaaaatacaaaaaattagctgggcgtggyggcgggcacctgtaatctcagctacttgggaggctgaggctggagaatggtttgaagccgggargcggaggttgcagtgaaccaagatcacgccactgccctccagcctgagtgacagtgcgagactctctctcaaacaaacaaacaaacaaaaaactagtcaggcatggtggtgcatgcctgtagtcccagttactcgggaggctgaggcaggagaatggctttaacccgggtggtggaggttgcagtgagccgagattgctccattgcactccagcctgggcgacagagcaagactccatcrcaaaaacaaaccaacaaaacagatgcttttataatggtaagttctcaacaaatacttctcttagccatctttcatggagcaccagctgtgggccagctgctcttctaaatgctttcctggattattccctttaatcctcatgagaaccctttgaggccaggcatggtggctcaccatgtaatcctgtaatcccagcactttcagaggctgaggcgggcagatcacttgaggttaggagtttgagaccagcctgggtaacatggtaaaaacccatctctacaaaaaatacaaaaacttgccagacgtgatggtgtatgcctataatcccagctacttgggaggcctgtcatccttgctactcaggaggctgaggcaggagaaccgcttgaacatgggaggcggaagttgcagtgaaccaagattgtgccattgcactccagcctgagtgacagagcaagactccatctccaaaacaaacaacaacaaaaaaacaaaaccctttgaggtagggatgatggttgagatataaacctaccagctggtctacagagccagattcatatagagtaggggacagcctcatggccaacaagggacagagaagcaaatgcatgtttacagtagctatgactgacgttcacacgccccagtctgctgtcccagtcaagggaaatgctttcttgcaaaattcatgcctggtctcacaatcatacatatgctcaaagcgtgtgcaaaaccacaggatttattgtgcatgcatagttcagaatacaggaacgtgtatgggagtgagggccggtcccatcgagtggggcctgtaccctgcaagtgaggcccatataccctgaatggtgtcttgctcacaggtggtgcctgggcccccctatttgatactgagacccatatacrgtgaatgaggccagtatcccgagtaagtcctggtcctacgctgcaaggccagtgccctttgatttaggcctatataatcctgaattccacctggcccctggaagggggaattgtaacccccagtgatgccggtaccctctggaaggaggcctctatcccctgaatgaggtcgggtatccttgagtgatttctggccctctgtggtttcggccttgttttttgctggttaatgaaagtggtgcttccaggccccaagtccttgtcatcgggacctttaagaaaagcgtctcaggccacagcgacgcagaccccagctcaaggctgcaccgttgccatggagacggttgggcgggggacaggggagggtgtgcggctccctctgcgcaggcgcacgcgcgagcagccgcgtcgcagcggaactgctgagattcaggcccagggtgcgcgctcagacgcggcgcgagcgccaggcaagctgcggctgctacctcccacgcctctccaggtgcactcggcgccgcccccctgcacctggctgcggtgccgagtcactcaggcctgtgtcagggagagagggagggagctgtcctggaaagcagacacgtaagccccccgcggatcctcagacagctctggagaggggtcccgggggaaggtcactgcgtccagccggccagcaggcagctagagcccccgagccccgagccccactccagccttgccacattcaccggaaccgggactctaagccctgcaagtggctttctagggttgcattgacaccgtgcgctgcagcccacccctatctcgggctccctgctgccccaagatcagcgccaagggggctgcaccatggccatgagccttttgcaggactggtgccggagcctggacgtggacgcgcacagggccctgctggtcaccggcatcccggagggcctggagcaggcagacgtcgaagccgtcctgcagccgaccctcctgcccctgggcacgttcaggttgcgacacatgaaggctttgatgaacgagaaggcccaggccgccctggtggagtttgtggaggacgtcaatcacgctgccattcccagggagatcccaggcaaggatggggtctggagggttctgtggaaggaccgtgcgcaggacacgagggtcctgaggcagatgagacgcctgctgctggatgacgggcccacgcaggccgcggaggctgggacccccggggaggcacccacccctcccgcttcggagacgcaggcccaggattctggggaggtaacagggcaggctggctcgcttcttggggcagccaggaacccaaggaggggccgtcggggtcgcagaaacagaaccagacgcaacaggttgacccagaagggcaagaagagaagccgaggaggacggccgtctgctcccgcgaggagtgaggccgaggactcttccgacgagagcctgggcatcgtgatcgaggagatcgaccagggcgacctgagcggagaagaggaccagagcgcgctgtacgccacgctgcaggccgctgccagggagctggttaggcagtgggcgccctgcaactccgagggggaagaagacggtccccgcgagttcttggctctggtcaccgtcaccgacaaatcgaagaaagaagaggcagagaaggagccagctggggccgaatccatccgcttgaacaccaaagaagacaaaaatggtgtccccgacttagtggccctgctggctgtgagagacaccccggacgaggagccggtggacagcgacacttcggagagcgactcgcaggaaagtggggaccaagaaacagaggagttggataatcctgagttcgtggccattgtggcctataccgacccgtcggacccctgggcccgggaggagatgttgaaaatcgcttctgttatcgagtcgctgggctggagcgacgagaaagacaagcgagaccccctccgacaggtcttgtccgtcatgtccaaggacactaacgggacccgcgtgaaggtggaagaggcgggccgcgaggtggacgccgtggtcctgcgcaaggmcggggatgacggggacctccgggagtgcatttccaccttggcgcagccggatctccctccccaggcgaagaaggctgggcgtggcctcttcgggggctggagcgagcaccgtgaggacgaagggggtcttctggagctggtggcgctcctggctgcccaggacatggcggaggtgatgaaggaggaaaaagaaaacgcctgggaaggcgggaagtacaaataccccaaaggcaaactgggggaggtattggcgctcctggccgcccgggagaacatggggtccaacgaggggtcggaggaggcttcggacgaacagtccgaggaggagtcggaggacaccgagagcgaggcgtcggagccggaggacagggcatccaggaagccccgggccaagagggcgcgcacggcccccaggggcctgactccggccggcgcgcctcccaccgcttccggggcccgcaaaacccgcgcgggcggccgaggccgaggccggggcgtcactcrcgagaagaaagccgggagccggggctcggcccaggacgacgccgcaggaagcaggaagaagaaggggagcgcgggcgccggggcccatgccagggcaggcgaggccaagggccaggcgcccactggatccaaggccgcgcgcgggaagaaggcccgtcggggccggaggctgccccctaaatgccgctagtggccccccaagaagccgcccaggctgcgagcaggccccgcagggcacccgcccgcctgtggcccccgccctcccctcccctcttcctgtcctccgcagacgcaatctcctcgcttcacagcgcgcccgggccgcgttttgccagcgtcacgttcccctctcgggccctcgcaggccgggggcgccagcgatcccgacggaggaagcccggatgggaggaggaaagagaagtgggcgcccgaggcagcagcgcagggccgagatggggacgcgccaagtggaccaggattgggggcccgggttgcccccggagggggtgtgtgtgtggacgccgggcacctgcagaggcgagcagggctcttcgtggcgctctcggggcctgcgcctggcaggtgctgtaggccgctgtcgcccctaccccagtctgactgggccctgggtctgtggtggaggctcagtcaccagccgcgcagcgcgtgtcagggcgcaactctcagccaggggaggccccagctcccagccaggggaagagatgattccagaaaggaaagtctgagagatagaaggcggttgggaaggggaggaggaggaaaggggagaggaacggtgggagaagggaaagaggaggaggagggggaggggggagcagagggaagacacatgccagccctgcctactggggcgcccctgataacaaaggaaccagccccaggccaaggccacctgcccctgaccacaagttgaatttgtcactcagactgcagtgtttcccaacattctaattatttgcagaggtgttcaatttggggtaattcacttaaaatccagttttggttcttctgggctgagtgggccctggcccctcccataggctgtggctcccctgggtgccccctctccagtggagctgacccaccgctcagcgctggccttgcagcccttactaaaagacttgaaagtccctgggttcaccccctgagtgaattaaaggccagaggggccccgaagggcactgtgagggacagaggctcacctgggcagtgcagaagccggccgcgtgtccctccttacaggggatgaaatgacctggggaggaaaccccagccctgccctggaggttccagagtaggcgggccggtgctgtgaggcttcacaacctgctgtcccaagcacgcttgagttgtatgtgagtctgtgccgtgccgtgccgtatgcttcagctcctgcaaccccggctgagctcgatttttacctaaatatcagtctccacgggaccccaccttcattcatgccttcttgtccctggggcaatgtgtgtgcttcctcgtcccaatttccattccctggcagtgaggagcccatcgtgccagggggccctgccccacttgtccctgggaaggaataggagggtttgggtgtgacctcacagtccagaccagactgtcccagtcctatgtcagggacacccagatgtagaagctgactgagacctgctgcagggcgtgggtgctcccctctgcttggaggctgtccctggacagtgacccacccactgaggaccaggctgggtgtaccttgagctgggcacagcagcctgtggtgttgcctgtgggtggggagggccccaggtgtgcttctcccgtagcagtcctaggcttctctccctgtgccctgtgtcacctggatcctccagtaaagtgaaattcagcactgtactctctctgtgctctgggcagtggggcaggcggggtgtgggagcgtgggccacagatgtccacggtcttgactgtggtttgcccagaatacctgggaactgtcctgtcactggtttacatacactgtcctttgctgcttcgggatccctgcctggctctccctaccccccagcatcatctcaccccttgcagatctgagccagcttccactcccacccctgatgcctccccacttccagcctcagctccgaagcccctggacacccatggagaccccgcccagccaatccccaccctagcttccacccagatacactctgccaggccacagctgcaggcactctccccccagcctccacccctcacctgtgccctggacctcagactcagctttccatcctacctgagttttctgcctccctccatcctgtgtccccccaccatacatggctgccagagacgtcctcttagaagtcacacctggggtctgattgcgtccctcgcctccccagatcccccaaggtctccttcctgtgccgtcatatctgcagttcttaggactgtctagacatgctttgttcaactaggtaatcacacggggtaaattggatttaaatgtaattaagattaaataaaaatacacatgcatgtcctcagtcttcccagccacgtcacaagtgctcaagagccacacgtggccagtggctaccgcattgcacggtgctggtgcaggacatggccatcgcatgcagctctccctcgcagctcaggtctacacactccacccccatctcaccctctgccttgtttcccactgccctctctgtgtctcctgtggcttcagccacccaggtctctgggacacaccaggcatattcctgcctcatggcctttgcactgctcttcctgcagcctggagtgcccttccttgggctataggcgtggctccaaccttcatgtcactcagacctttcttcaaatgccacattcctagggagggcttccctgaccacctataaaaatgtaactctttgtggccggccaggcacggtggctcatgcctgtaatcccagcactttgggaggccgaggagggtggatcacgagggcaggagttcaagaccagcctggccaagacggtgaaaccccgtctctactaaaaatataaaaattagtctggtgtggtggtgcacacctgtaatcccagctacttgggaggctgaggcagaagaatcgcttgaacctgggaggcagaggttgcagtgagctgagatcgtgccactgcactccagcctgggtgacagagcaagactccgtctcaaaaaaaaaaaaaaaaaaggaaccctttctgcacttcctccctttatttttcagagctatgactgccccctggcacaccgactgtacttgtcagggaggttaatagaggaaattggtgactggggtattgcaatcaggaagtgcaaaaacagggagatcgttttgtcccaatattagcaatgcagggagctgctccctcccgagggctggaggagccacttgggaaaggctggtgatcagagccctagtgtaggactgccaagttccacgcacggggccggcttgcttgaggagagacccgggagcccctggttcaccgcagtgaccgccagctgctgctgccaccacggcctgagcattcccccaaatggcgtccctttcctcctgctttcaaactccccccagcgccccgtgggcttgcagcagcagcagcccctgcagagggccctgagcggtggctgtggggacctatgcggcatgggggcaggtgggcgtggcggggagaggcgcggcagagcggcttagggccagctccgtagggaaaaagtgtggcttggcctttccccttcgtgtccccagccccaacaccgtgcctggcacgcggcggcggctgttatttgttgaatgactgacggtcggaatgaaccacgcggactgggtgagtcagatcccagataggcctggtggggaatgtgctggaaagaaacattgttttcattccctcattcctggagggagtgctccggcggggatggggaggagtgtttggggtcgaaggagcagccgcgtaaaggccttgagatcctgcagggaagggtcccggtgcacagagaccagcacaggctgcagcagccgggtctgtcccgcgcgtggagcctctggcgacgggtggagcggagcgcggttgccccctcctgggagagaaggcgactgtctgggaggagccctcagcgccatccgcgcagtccatgagatttatccagggctggcgcgtcccaggccctgttcttggtgcaggaaacaggaccctcccgcagggagcatgcggtggggaggctggggttacgctccctagatgaggacgaaatccatgcattagggggtgagacctgctgggggacaaaagtccggcaagcagggggcccgaggagggccggggcaggagagggtttgcagtcgtcataaacgggcctgggaaagtggcctgggaagccctcactgagaaggtgacaagtgtagtggcgcgatcacggctcactgcagcctcgaattcctgggctcaagcgatcctcccaccacttcagcctccctctagagtagctgggaccacaggcacgcgccaccaagcctagctactttttgcattttttgtagagacggggtctctgaatgttgcaaagacccgaaggacgtgcggccggcggttgcctgggggaagtccatgaccggggtgtaggaagagccagggcaaaagcttcccaagccaagggtatgactgtagggggttattagcgtgtaattactgcccctcccatgccaggctaagtgctggtggagtggaggcagtgatgccaaagaaggccgcctgcctccatggtggtcgctgtctggctggattttcacctgaggcagcaaatgagcatgaagaggtccctggagtagggcgtgcagactggcagggcctcagggcctcgttaagcgctggggagccatgggagggatttgaacaggagagggagaggtttatgctttaggtctgtcgtgtgcagggtgcaaggctggagcaggaggaggctggggcgggaacctaggggacaggcctaaggctggaccggcgcagggtggtggggatggcaggaagtggttgaagagttttcaggagcctgatttcagctgaccaggtgactggcgggctgaggttgtgtgtgtatgtgtttgtgtctctgtgtggatctgggggtggacacattcgaatgtatatgtctgtgcgtctttattggctctgtagagaggagggcaggatgaaggagggaagaggatgaaggcagattttcaccctcatttcccagatagagaaaccgaggctcagagaggcaaggaagggagctggaacccacgtttgtcttactctacggctccctcgaataatcggccctcccggccccaggggagggacggaatggtcctcccccaaggatgaggccaaggtatcctggggtccagaccccagaccctccctcacctcttccctctcccccctcccccgccacctccccaccgcgaagaatcccggggtccagaccctttcccctagaggctgaacttgtcttggcccctcggcctgcttaagcgggaaatgagcgatccccaaactctgggaatgtggccacgtcctagaactgcgccgcagacgacgacccttccctttgcccccgcaacctacgactccagagcaggggaagaatccgcgcgagttgcgatgcccgctgattccaccaggaggcaccccagttccgccgtttaaaatcgtggggccacggcgctttccccagcgctttaaagggacaaccctccctggtctttgaacgccaggctggggaaagcggactttcctgcaggacagcggttctcaaaatcaggtcctggacctgcgtcaacgtctcctgggaactagatacacattctcgggcccaccctagacctacagaacccctttgggggtgaggtccagcaagctgcattttcaaaggacccccaggtgcctgcgatgcgggactagtttgagaaccacggctgtggcgtctgatggtctctaggacccctagggtcgcggttgtgagccccggctgcccattgcttggaatcaccggggagctttagggactgttgctgccccagccgtgccctgcaccattcagagattccgagagcggctgccgagatctgcaggctggacatgggctctgggtcattccaggggcagccggggtgggcaccgctgccctggggtccctgt

SEQ ID NO: 96238 - DNA, 60550 bp, Homo sapiens
taattccatcagaatacaacaaatgcagaatttttttaactaactgaaaataaaaggcggctttccacactactcaaagtcacggcatattccccgagatcatgtctgtaacctctcccaggctcggaaaaccttgttttccagccatactttttcccattctgatactgaagtgttagattaatttttattttatcaacataataacactcatatattttgtcaaatactcaatacaaaaaaaaaaagtttctgacctaactccccaattttcttgctgaatactaccattttcctttccttcctctctttcttccagtatttacgttcacatttcaaaatgatacgtttattctgcaacttgttgattaatctattttagtgtattattgacttcctattagaaagataaggatattgttttcataaactacttctcctcctccattttcctcatactccaaaatggggttacatcataatcatgagtcatgtgttcctgagtcggtattaacattgttatggttatctaatattgtttaccactgagacaaagggtaaactatcactactatttcctctcctgtaaaaagaaaccaaaaatggcaaacaatagagataaccaatgaaaccaaaggctggctctttgagaagattaataaaatcacaaagactctagactgagcaagaagacacaaattaccaaaatcaggaatgaaagagagaacatcatcacagatcctacaaatattaaaagaacgatatagggaagaatatacacacgtatatgccaatgaatttgaaaaattgcataagtggtcacattgctcaaaagatacagattaccaaaactggcacaagcagaaatataaaatatgataaggctttatatctattaaacaaattcaattgtaatttaaaatcttctcacaattataaatccaggtcttgatggcttctcttatgaattctaacaaatacctaagtaagaaataatacctatcctatacaaatatttttataaaataggaatcaaggaacatttcccatccattttatgaggccagtattgccctgatactaaaaacaaagacattaaaagaaaataaaactatagctaatattcttcatgaacataaaggcaaaaattcttaataaaatatgagcaaaacaaatcaaacaatattttaaaaggataatatatcatgatcaagtgggatttatctcaggaatttaagattagtttaacatttgaaaattaatcaatgtaattcatcatattaataaaataaaagtaaaaccctatgatcatctcaatagacacagaaaaagcatttggcaaaatttaacattcattcatgataaaaactctcagcaaaaatgaactttctcaatctgatttttttttaaatctatgaaaaacctacagctaacatcacacttaatggtgaaagacaggacatttcccccgagatgaggaacagagcaaggatagtcactctcaactactcctattcaacattgtactagaaggcacagccagtgcaaataaagtcatccaaattggaaaagaagaaaaactatttatttgtagacatgattgtctatatagaaaatcttaagagaaatatgaaaaagctactagaattactaaaactaataagaaggcttagcaaagttgcaagatactgttaatatttaaatatcaacagtatttccaaacaattggaaaataaaaaaaaaattttaacttcacatttacaacacgcacacacaaaaattaaatacctgaaatacctaatgataagcttaacaaaatataatcaagatgtgtatgctgaaaagcatgaaacatagcagagagatataaaaagactcaaataaatggagaaataaataatattcatggataagaagactcaatagttataaaatgtcagttatttccaaactgatctttagactcaaaaaaggaatttttttgtagaaattgacaaactgattctaaagtttatatgaaaatttaaagcatctagaatagtgcaattttggaaaagaaaaaagtctgaggatttaacactacctgattttaaatcttactaaactgctacaataatcaaggtaatgagctattggtatatagacagacacatggatcaaaaaaactgattagggagtctagaagtggactcacatgtacatgcccaactaattttcaaccaaagtgacaaggtaagccaatggctcaaagacagtattttcaaataaattgtgctggaacaatcagatatcctatgacccttacctcaaaccatacacaaatgttaacccatagacttaaatgtaaaagataacactataaaacatccagaagaaaacatatccaatctcaatctaacaaatatctcacatacagaacataacaaccactaaccataaaagaaagtattaatatgtggaactttatcaaaattaaaaccactattcttctgaagacaatgtttacaaaaaaaggcaaaccacagaatgggagaaaatatttgaaaatgtacatttgagaaaaaaattgtatccagattacgtaacaactattacattcattgttatattcaacaatataaacaacccatttttttaataggggaaagacttgaataaacacttcaaaaaagaagatatacaaaagtttacaagcaaatgaaaagatattcaacacattattccaaaaaaagtaatttaaaaataccatgagatatcacaacatatgcattaaattagctaaaatttaaaaaacctgataatcccaagtgttgacaagcaatggagcaactggaactctcatatattttgatatgcatgtaaaatggtacaaccattttggaaagaagcttggcagtttcttataaagttaatcttatatttactatatgacctaacaattccattcctatccatttatttaaaggaaatgaaaatgtatgttcacataaagtcatagacacaaatgttcatagcagctttatcattaatcgccccaaactggaaagaacccacccaagtttccttcaatagatgaatggataaactatgatacagtcatagagtggaacaatatatagcagtaaaaaagaatatatggctggtatatgcaccaacatggatgaatctcaaaaacattatgctcaataaaagagatcacgctcaaaagactatagttatgtagtccgtggggaatggatctgggaccttacttgcataccaaaatcctctgatgctcaagtcccagatataaaatggcatagtatttacccacatcctcccatatcctttaaatcatctctagattacatataatacctagtacagtgtaaacaaaaatcattgtcatagtgtattgtttagggaataatggcaagaaaaaataagtctatacatgttcagtacagacacaatgtttttgcccaaatatttttgatccatggttggctgaatccatagatttagaacccatggatacagagggctgatttatttatatgactctatttatattaacttctagaaaaagtaaaactatagtggtggaaagcagatcagtggtagtcagggttcaggaagtaaatgaaaggataattaatccccttgaaaaggagtccaagaaattttctcgggtgatagcagcattctgtatcataattgtagtggtggatacatgattgtatattttcaaaactagggattctcagccttggcactgctgatgttctgggcagcatagttctttgttgcaggactttactgtgcactgcaggatgttcagcagtggccctggcctctatccaacacgaggatcacactcacaccccctcccaagttgtgaccaccaaaattgtctgtagacattacgaaacatctcctggaggagtgaaatcacttctggttgagaaccactagtcaaaactcatcaaatagactgggcacagttgctcacatctataatcccaacactgggaggctgaagcagatggatcgcctgagcctaggagtttgagaccagcctgggtaacattaaattaaatttaacaaaatagaattaaattttatttttaaaattcaaattaaaaaaaattttttttagatagggtctcactctgtcacccaagttggagtggcatgatcttggctcactgcaacctccacctcccagactcaagtgatcctcccacctcagactcctgagtacctggagcataggtgcatgtcaccaccccgggctaatttttggtatttttggtagaaactgggtttcgccatgttgcccaggctggtctcaaactcctgagctcaggcaatccacccacctcggcctcacaaagtgctggggattacaggcttgagccaccacacctggccagaaattttctttttaatttcaaaaaaagagaaaaaagaccaggcacggtggttcaggcctgtaatcccagaactttgggaggccaaggtgggcagatcacctgaggtcaggagttcgaaactagcctggccaacatggcaaaatcccatctccattaaaaatataaaaattagccacaggtgtggtggcgtatgcccgtagtcccagcttctcaggaggctgaggcatgagaactgcttcaacctgggaggcggaggttgcagtgagctgagattgtgccacttcactccagcctgggcaacagaggagactccgtctcaaaaaaaaaaaaaaaagagagagagagagagagaaactcatcaaatagtagacttgtaaaatagaaattagtgaattttagcatacataaatcctaccccaataaaactgatttttaaaatttaggaagcagtttaggcccaggagatatgagttcacccttacacattttgcatgtccctcattataatcgaatgagaagctctacagatactgaaataatttttctgcagatttttagaaatattcaattttttgaattaattcagcattgttactgaaaaacctgatgtgatcttaatgcctgattctttgtgaccatttttattcctctgaaagtttttagtcactaaattaggttcttataataagcccattaaaactggaaaattaagtccttttctaggaagttttcatgcacgctttatttaaaattttttcctgtctgttttctctattctcttttcctagaactccagaaagatattgggactccagaaaacaccttcccatcttatctaatagttgtctgtctttttgtcttttcattctaggagagggcctttgtcttccaactctttctgaagtctttgtttcagatttcttatctgtaattccaaagagttttttcttgttctcgaattgttcatcttctctaaggacgctattgtaattcgattccttttcctccaatccctgcaggtgtgtcccttctagagataatgccactttcagcctctcatgttgaaagttgtccttggatgcatggtgatcaccttagctgtttgttcatatttaactaagataggggccttaaaattggctgtcctgtaagcatgggtagaacgtgttgagtggttgccttcggaaaatgataaagcagcagaaagatgatttttcctttgggaaaatgtcaatgtctgaaggtgttttctcttgagaatttacagtccctccaagggtgaattttccatccccctgcgtaggaagaacatcccgatttctggtgttccaggcagagagcaagggaagcaggctgatgcaaggaagcatcattcttcccaacgttcccttataactcccattttgagcccaaatatcatccttgccttccactgagccctgtgtccctgactctgaaggctcttaaatcaggattttgaagaaaatggttcttcccctgaaacagaatgctgtgaataagactgtcctggaggggcagagtggaaatagatgctgtgggggaggggaggggctgtcaaacgccatgaccaggttcatcatcgcctctctcctcccctctacctttctccctggtttccatagagcagaaatctgggtcaaggtggagtgcattggatcaagagttgctatgatttgggaaaagctctgcaggataagtcgtgagttgagtggaatgtggttttgcagaataaaggaaaggctaaggagagaaaaacaagaggagcagctgagggcagcccgaagggcaccagctccaaggtgcaggccgagctcctcggggaggccagcgtggctggaatgtagggtggcagcaaaaagagagcrctccacayagagaaagggacttgcaggatttctttcaaggggctgtcaatctccagcataggccctttccyraaggtaacctgggaacktagaagatgtgcactgagacattttaagaaacccaagagtaaaagggggtgcttttatggacatgtgtggctgtaggaggaggcctgggcttagagcaagagcagctacagrcgataacatgggcaaggaatcctcagggttctgctcctgccctcgagcctctgcttcacgtgtcctcaggaataaaatcagaccttgcagaaactcaatctgggtgaggagctgaaaaaatatataagttgaaattttaaagctgcaggcttctcactccttctccaaatcccagggctagagaattatattctaagagcatctatctctcctaattctgcttctctctagagggcaaaagtcaggacctgattttaggagttgtttttcagagtagggagctcagcacctcatgcattcaccccctcctccctgagcccctgggaactctccggtgtggagctggaggaaaaaccagtacagtactctctcaggaaaacaagctcagaggcggaatcaacaagacagctgacgaacacatcctcttcaagagaggccaggggtaaggaggatggctaaactcaagttcttatctcatagggagggaaattaatattcatttttttcaaaagcaagaaaagataaaaaaagaaaacttgagataaagaaggtagaaacaggtctaatatatcaataattaaataattataaatgattatatttataatatataatataataattataaataataaatgtatttggaaggaattcaccactcacttgattaacaaattgaatttttaaaatccagatatgtgctatttataagagacactcaagcataaggacatacaacagttgaaagcaaaaggatggaaaatgacatgrtaggcaaatatgaacaaaaagaaagctgtgtagcatattagtatcatatgagccaggctcctagacaggaaacattattagggatccagaggatcactacaaagtagtaaaactttaattcatcaagaagagaacaagccgggtatggtggctcacgcctgtaatcccagcattttaggaggccaagatgggcagatygcttgaagtcagaagttcaagaccagcctggccaacatggcaaaaccctgtctctactaaaaagtacaaaaattagccaggcatggtggtgagcacctgtagtcccagctactcaggaggttgaggcaggagaatcacttgaacctgggaggsggatgttgcagtgagccaagatcatgccaccgyactccagactgggagacagagcgagactgtcaaaaaaaaaagagagacaacaactttaaacataaatgcacaaaataaaatagcctcaagtatattaggtaaaattttttggaactaagtgaatttagcatggctttctcagttactgatagatgaagaagacaaaaaaatcagcaaggatattaaaaatatgaaccactcaatttcaagttatgacccactcagctgacatctaatggatatattgagttccttcaagtattagagaatatacatttttctcaagaacacatggaatatatgcaaaaatttgagcatgtactaagccataaagaaagtctcaacacattttgaacttagatatgaagcagactaggaactctgaccacaatgaaattaaattagaagtttaaagtatacattttaaatgactacatatttagcagtactgctaaacaacacatgggttaaaggagaaatatcataataaaaaatktaatatatctaaaactgaatgacaataaaaatagcaaatatcaaaattgctcggatgcagccaacgtgtactctgagggaagttaatagataattacgtatattagaatgaaataaaatcccaaaattattgagctaagtgttagtcttaagaagtgaggaggaaccaacaaactcaaagacattagaattcagaacataaaaataggagccaaaatcaacaaagtagaaaacagaaatacaatggagaagaatcaaaaggctaagaactggttcgccactaaaactaacaatacagataaacttttcaagatttgtcaagacaagaagatagaagtcacaataagtaatattatgaatgaaatggggggtgwtatacataaagtatccataatacataataagagaatatgaccaaaaacaatatgccaaaaattttgaaaasttagataaatatctacaaaacataatttattaaaactgacttaagcaaaaaaccaaaaggtaaaacttgaataatgctataattattaaagaaaaattattctcacacacacacaaaaagtaccaagcccccatgggtttacaggtgaggtgaaattttcaaggaccagatcatctagacaaaagaaattcttccggacaaaagaaaaattcttccagacaaaagaaaatgagggattactccctaactcctcttataaggggagatgttaaaggagaatggacagtgaacacaattaagaaaaatcgctgccccatggaacttacgttctagggtgagtatgggagggacacacagtaaataggtaaaagatacagtatgatagatggtggtaactgttacggagaaaactaaaacaagaaagacccaggggaagtgggtgatgccattttaagtaggatggtcagggtggacctcacatttcaggaagacctgaaggaggtgagagaaagagacccatttttgactggaggaagaacagcgcagtcagagggagcaggaagtgygaaggccctgaggtgggaacaccactggcatgtgcaggggtgagacagargagtgtatgactgggagagggcaggtaacaggaaggagagtaggaaatgaggggccagacctcgactgtgactcaagagagtgcagcacaggagtggcaggatctggcttacatttttgcaggatcaccctgctattatgttgaaaatgcactgaaggagtgacggtggaagcagaccctttaggaggctattgcagcaatccggacaggagatgatggcggctcagatgaggtggtgccgtggaggaggagggcttacattctgggcaaacctgaaagatgcagtctacaggatttactcgtggattgaattggggtgagaaagacagaaggagtcctgggggatccagggctttgtttgggctggagcaactggaaggatgaagtttctgttgaatttgatccttcaaaccacaaagagaatgagaagagagtggggagagagacagggagacagacagaggggtagagagacagaaattttcacatgcttctcttaagaaagccagcctccccagcaccaccccaaagtcagccatgaggcaagagcaaatggctgtttgaggagacagagaaacagcatcatagacaggcatgacgcaggagaagcaagatgccagttttcaaaaagtagaacagagattgtgcacatagccagcaagaaaaagcagtggattttcataaaacctacattttttattattatactttaagttttagggtacatgtgcacaacatgcaggtttgttacatatgtatacatgtgccatgttggtgtgctgcacccattaactcatcatttaacattaggtatatctcctaatgctatccctcccacctccccccaccccactacaggtcccagtgtgtgatgttccccttcctgtgtccatgtgttctcattgttcaattcccacctatgagtgagaacatgcagtgtttggctttttgtccttgcgatagtttgctgagaatgatggtttccagcttcatcyatgtccctacaaaggacatgaactcatcattttttatggctgcatagtattccatggtgtatatgtaccacattgtcttaatccagtctatcattgttggacatttgggttggttccaagtctttgctattgtgaatagtgccgcaataaacatrcgtgtgcatgtgtctttatagcagcatgattycttaattttttttttttttttagagacagggtcttgctatgttgcccaggctggtctcaaattcctgggctcaagccatcctmctgcctcaaaagtgctggcattacaggcatgakccacagtgctggggcaaaacccatattttaatattgcttaccaagacagacttatagcacctcagtgaggctggcagtgcagtgatgattaggtgaacttacagagggaaaaatggaggcctagtggttaagtgactggcccaaggtcacactaccagtaagagcgattactgggactaagcccagagcttctcacttgcagtctggggctccacccagcccacactttcttcctgtaaggtcactgcagaattctctcatttgtttctttctgcagcttgttttcttaagccacttatttcagggttgcttttatgaacagcctgagttaacctcaatagctatgatttcactgkcaataaaacagctttacttgatgctctctctcaaccctctgaacatatttttgttcaaaataatgtcctcagcaaatggggaaaaaagcaaactccacttccaccctgcccaccacccaccacccctccatattctgacataaaatagacaccagccacagttaactgtggcatttgagtccatttatgacaccatgcagctcccatggccaggcgaggagcctggcaaccccagccccagcgggcaggagcgctggtcccaccatgccctggaggaagggaagccccagaaagctgaaygccctgtgcccgatttataaatagctcttcagaggcatgggctctcacgggcggcccctgccaactcccttctggcggcctttaatttttccatgccaggcccaccttgtacccgaccccgmcccacaaaacaaaggtccaccctgtgtgsgatcctcagcccagcagcccccctcccaccccaggggcacgccccacctttactcaggccagagatggttgaaaagcagcaagacctcgggagggcacaagagggctgaggaggcaagaaacttcactaggacgcccccgcagcagggattgggggggccagctgccagccctcttggctggtcctggcctcccttcctcccacagttccgtctctgctgttgtctccaacaggcagggtctgatctgcccccaccccacacccaacacttgttcttaaaggaggaggaggaccatgacgtctaccagtaaaaataatccctgtgtgcaacgatatttacattcttcttccactgtacagtacaacccttccagcagcgctggggacaagccaggagacggtgactgtgctcccggggcccgaccctgtggagactcagctttcctcccattctctggccagggagctccacggtccatctgtggacagctctctttgcaggaaagctcttctctatgaggatgagcaccacctcctctggcccaggatcgacccccacagggacttctgcccagacaagccatttggactttgccccccatcaccatggccatcagctatcaggagagaaccagcagcagccctggctcccaccaaccacgacacatgactccgtggccccttcccaacrtacctgggctctgagctttgcgtgcgtcccccgcctctctcactgcctatttatgtgcaaagtgagctacctcttcccaggagtcctgagccagctcccagccacatgcaggccctgagcatgcgctcttccgtggtttacctgtatagccccccagcagtcccaggaggcaggggctactactcttcccttttcacagcctaggccagggaagccctcagttaggcagtctgccttgagagaggtgaagctcccggcctggtgtctagaaagcagcagcagcagcaccaacaggtactaaagatgaacccagctgtacatgctcataggcacctgtcttccctgttgggaggctgaggcaggaatgtgagaccagcctgggcaaaatagctagaccccatctctaaaagaaaaaaaaattaaaaacttagctgagcatggtggcttatgcctatagtcccagctactggggaggctgagatgggaggatcacttgagcccaggagtttgaggctacagtgagccatgatcataccactgcactccagcctgggaaacagagagatcccttctctaccaaaaataaaaaaaaattttaatgaccccagaactctgagttcataattggttgagtgcagactggatgcagcaagtcacgcctgtaatcccagcactttgggaggctgaggcgggaggattgcctgagctcaggagttcgaagccagcctggacaatgtggtgaaaccccgtctctacaaaaaatacaaaaattagccaggtgttgcagtacacgcctgtagtcccaactactcggagtgggggctgaggtgggaggatggcttgagcctgggaggcagaggttgcagtgagccaagattgcaccagactttgtctctaaataaataaacaaacaagtaaataaataaataaatgggtgaggccaacatgaagaagaatgaaggaagtgttactggagaggactgaagactgttttggattctagctgggtcagacggttgggggctgggggacgcactccagagacaggaaccggagcgggcacaggcacacagaggcgtgtcttggaacatctgctattttaacaggaatgtgggaaaaggaaaatctggggcgttgggctggatggagggccctttaacaaatgcccaccgagctccccgcaggctctctcaggatctggggaaggaggaccagccatgtggcagttccacatgactcattcatcctttaaccacattccctgtcacacagctcagggaggaggactacgtggtggcaggctggggagtgatcttccgtcccaccagacaggagcccacccaggacactgcaacccagacccttcccctcagaggccaagccccagctcaaccaattcacttgctccttctcacttcaactccaatgaatgccaataaaatctcagccatgaatggaacagatgcctgcaaacatttttattattaaaataatgccttccttgtatgaacatctcataattgagggtcaaatataagcaaaaagcagactcaaagccagccatccctggttgacttgttgacaaaataattcacagacagttcccaggccctcggccacagagctgtaaacaagcttccagttgctgaacgaaccataatagacccgagataaaaccattcgtcttcaagtcatctcaggacccaggagtgccaattcaaatggtcacgcacaagcacaaaacaccgagcatgaaacatcacgtttctgctgtatttgatttctgtacattttcaatgaaatgtctgggcatttcagtatggctaagtcagtctaggggtattaggaatcagccgggtaaaccagtgccctgggaaatgtcccaagccagcttaggcatgatctgaaaagtccctgcaagtttctcttgctttgtatgttactcagtgataacagtaattcaattccattccagamcaacaatatacattgggtttcyattgcatcttcaggatcctgttccgggatattcctgaagactgccrgtatccagtattttacccacttgatcctggtgcatgtacaggaagacatctcagaccacacgctctgatttgrgayggtaggccctatagttagcataattatagagtgagcaagataactataacttaaccatgccctgmatgagtatgcagtcagtgcctacagaaggccacgggaacatgtgtaactacgataccagcaggaggcaaggagtgacagggtctggagctaacaaattactaaaggaaggaaatcattgcaactcagaggaaggctctgtaaaaccagtggcatgcctctggttagcttagagcatgagtgaaatttcaacaagtcagtaggtattgggaggaggaatactcttaggccaggtgcagtggctcatgcctatagccccaactatttgggaggctaaggtgggaggattgcttgagcccaggagttrgaggctacagtgagctgagattgcaccactgcattcctgcctgggcgacagagtgacamcctgtctcaaaaaaagggatatycttgatggagggggaaartgaatgtacgtggtatgtttaaagagcagttaagttatgctctcttgtgccttggagttgggtcaaactccaagaagatggaactgcaaaagcagactgggttcaagtttgcaaggcctagaaggtcatgactaccagagcctggctacgtttctcctttcctcgcgtgactcagctggactgcattcccccagcttctcccacagttaagtctgaccatgtgactcaatgctggccaacagaaggtagtagaagtgatgtaatgtacaccacttccaggactggcctgaatcccacctcctcaggccgtgactgggcctccatccaggggtttctgcctggacacactctctctctgctagtttggatggcaacacccatggcaagcttggagcacaccatggagacaacagaacctccaccaacgtcatccttggttgattktgtgccggggagcacaccaccgcctcccacccagccccacttcccaagggacttttcctgagtgaggaagttacaggatgctaggctgctgagatgtcaggattcacttgcatgaactctgaagtcagcatttctccaacyaaaataccagggttggggtcgcatgttcttccttaggccgtgctttgggaagggaagccygggggcagcgtggaagctggtgtggacgcaggaagaaagccacagcaggaccctgttgaaagactactgaagggcagataagagatgagaagtgaggaaagacagtgactgggagaggaaggaaaggaggagatatttttcatcatccactccctctttctattcaacttttatatcactgttaattgaaacagatttctcatagctcaycagtgacctcctcatccagaaccaaggatcatctttcttattagcggtgccatcctgtagcatttgaccactgcctccttttttggaggctgtcttccctttcgccacccccagtccttcttgtctctgaacctccsttctctctccctctttctcttccacaccaccccccgaccccgccacaccacacacactcctctcttccacctcaaatgtaagctgtcccaaggttctggctttgcacctgctcttctcttttctctatgtgtggaatccccagggggcttcatttgccatctgccttctccctttctactcgccttccccctttctactcaccatctccagaactgcctcaccagccccaacttctcttctgagctctagatcaaaatgtttgatttgccatctgaacagccacacacagatggtctgcaggcacctcgaaagcagcctggccaaaacaaaattcattcccttgtcaccccctctcattactccccacccactgagcaatgctgctgtttctccatttctagttgtctgagacgggaggttcagccacaagctggtcatgaagggctctgtggaacaccttgctaacatcaaggtgtgatatttccctggagggtctaagacctccaccctggatcccccacacctttccacaattgctccaacactcattccacttttacagcatgtcacccccttgtcacaattcctccaaaagtagaacttgtctccaaattacatggaaaggtgtccacactccactgggatgactcagcacggctcaaataagcttgttcaaatgttggtggtcttttcttactgttttctcgtttatcttggatttcaatttcccttttagccaagtttatttgctcctctcaaatctgaagaagattcttgttcaggaagtaatgaccaaagataatttaaggtgttttgatatttcttaatcatcagatggcactgtgccattttctctgggtcatggaccgattccttttctcattsttcctgctcatgacatagctttccaacccttttcgttctccttatattcttcacaagatttaatgcaacccaagctctacctgaattagtcaggactcttctggttgcagaaatccaagtggcagaaatccaagctaagttcatgggagcaaaccaagagaaggacaggcagaagaggasacagccaygcagaccaccaagctggggactcagaccccatcggggttcacccactgtgctctggcctcagtttctctttctgtgtggacttcacccagccaatccactttctcactggggtgggttcatgggagcagctctgattcacatctttagcagctctccaaccagagaggaagagctttcctcccagctccaatttcaaaaccgcaggaaaacacaagttagctcagcttggctcactttgagtktacccctcagaacagtgaccmtggtcacatcagtgaaattatttacccatcctgggtcacatacccacttctggtgtcaaagaaatagggtatgctgccagaaaaaaggaagagagattgatgaacagataacaaataggagatatctgctatattagccaccgtttaaacatacttccctccacacatgtgccttcctgacctgtcctctccatattcaatattgtggacagctgccagttgccaggtggtrtgtagtgaatggagattgtagaaatgagtcttctcygtgccccgtgaagagaagacttccagcccaggaacactgcagggagaatgatctccagtgatcccttctggttgtaacagcctaaggttctgagagcctaattctaggcatggtgtcgtctcttccttctttctgccctaacctccacttactcttactctaataccagcttctcagctcagtcaaacctggaccacttctcccgtgctctcccaaattcccagttatggcgcctttcctggaaatatccttctccaaagtctactctccaaaaatactaaagtcactgtggctgatctcagccaggtgcttgggagaagaagaaactgagcaattcacaccctagcacaagggtccccaacccctgggccatagacctctacctgtccacctcctgttagaagctgggctgcacactaggaggtgagtggtgggagagtgagcattacccccgcctaagctccacctcctatcagatcagcagcagcattagattttcagaggagcacaaaccctactgtgaactgtgcatgccagggatctagtttgtgtccttcttatgtgaatctaactaatgcctgatgatctggcgtggaacagtttcatcccgaaaccatctcccccatcatccctcccaccagtccttggaaaaactgtcttccacaaaactgatccctggtgccaaaaaggatgagggccactgccctggcatgaatgacaggtgccctccaagagtgccttaaccccactgaatttctaatgggtagaaggttgttatgggctggactatgtaacaccaaaaattcatatgttgaagtcctcacacccagtacctcagagtataatcatatttggagagagagcctttatataaattgaaacaaggtcattagaatggactctgatccaatctgactggtctccttataggtargggaagagacagacacacacagagggaagaccacrtgagaacacaggggaaagatgccatctaagccaaggagagaggtctcagaagaaaccaaccctgcctacaccttgatcttgaacttctagtctccagaattatgaagaaataaattaagccccccagtctgtgrtatttgttttggcagccctaactaactgatactagttagtgagraagtgaactttcagctgacaggccttgtcagcactcccaatctctccacccctagccttcttctctcttcccacagacctggaaaagtaaggctctgtctcccctcatcagaaaagctgcaatttccccttccagcaaatcactccacaagtggaccagggcaccccacttacactttcaaacacgctgagaagcaggatatacgtacaagaaatatttagccttcctctcttccttggcagaatctttgtaatttagaactgagattaacctagcccccaaaaagggggaaataaagtttaaaaataaacactgtcaggaactcaccaggactcattcaaaagtcatgggtattcagtaaacacaaaacattttgagaagcacgaataggatgcaattcagagtcacccattagaccagaatatcaagtaggcggctgttagccattcagatgcaaagccactcatctgtacgtagggaaatatatgtttccaatttaaaataaagtttgtaaagcttgtaatcagtttggtaagatttccctagagggtcactagtagctaccagcacagaagtttctggatgttgaaggcctggaaattaaatctttatacttgtcccartgatgaggtagccagatgagagcagagaccaccaacgctggccacgcaaggttgccctcgggcaggcgagactcttccctgggctgttaatttcacagaggggcaacaccattgttgatctttctttttctttttaaggaaagcattaataagcaatggagagggcacatgagtcaggctcaaaacaaaaccacaggggacaatgaagagctgcatcrgagcagrccctgtggacaggcgtgggaagtgaggtctaatgcaaaggggagagaggccttacacaacttctccayttcacagagcggcagactgagtcctgggatgtcaggcgacttgggttagctcacatgaaaaagacccagatgactgcattttcttgctaccttatattttcagttctctgccactcttgctttctgaaaccttctttgtcaccctttgaccaagatgccccatgtccagtggctgccctctgactgcctgtgcctgccactccagaacccttcaggagccttcctgcccataatcttcctttctcctccgatctcatgtgtgctgagtcacttgctccccatcaagctctgtccctagacattgtcacagcttcccagctgcctgctttctggcctaacttgctctctcttgctcacaaatcactcccagaagcttctctctactgcatcaccaagcacctaagatccaagtccaacgttctacctgcctggtggacatctccacagctgtctccctccacaactacaggtggcatattaccctttccaagtgagccaatggagtgtgacataaaaggcaggactttggaatccaaaggtctgccttgggtcttggttccatcmctctctggctgcatgatcttgggtgaatctcattacttcgtgaagtctccagcattttgcaaaggacacgataactgtcctcactctgagtggaagaggcagcatagctgagtagtcagggatcagagccagttcatttagattctaattttgactcttgtctcttgttagctgtagaaacttagtcaatttccttaacttcattggctgtcagttttcttttttcttttttcttttcgagacagaatcttgctctgtcgtccaggctggagtgcagtggtgcgatctcggctcactgcaagctccgcctcccaggttcacgccattctcccacctcagcctccccagtagctgggactacaggcggccgccascaggcctggctaatttttttggtatttttagtagagacggggtttcaccgtgttagccaggatggtctcgatctcctgacctcctgatccgccgcctcggcctcccagagtgctgggattgcaggcatgagccaccgcgcccggcccactggctgtcagttttctttctgtaaaatggggataatcacagaacccatctttggttgttctgtgtaatggattcataacagtgcctggcacgtagtaagcaccttagaaatgttcagtgtcattatttacaaactatgatgtrctatgcaaaggttgcccatgaaattttacaatattrgtgtctccccactgtttyatattgyactggacaggtctcctctggttgtacatgagagaaatctaactccgaactccatgatagaaagrggacactttggggcctatgctattgcaaagtccagatgcagctatggccccaggctttatgaaaatcttgcctagaatgagaaggggagaaagctgcagagagagtcagggaacccactcatcagaaatgcagctttgtgcccatctctgtattagataaatgcaccaaacataggattgtttcctccctaaatttacattcaaatggctcaatttcactataagaatatgaaatagggcaagaagacacggcatgtggcattttgatcaaatgcaaaggacatgtgccatctggcgtctgtgtgctttttatggacactcgcgtcctgcttccagccctgtcgggaggactatcagagcctctcctcttaacacacacacacacatccacacatgtacacacccgcacacagacgccctcacactgcatgtagggaaatctagcctgaggaatcacatggtcattgaggtgggaggagagacctaggaagagaggagggaggwgatagagakagaaccacaagagtggccgtgacagccaagcagctgcccagaaaccagagaagagatgctacactcccagagactctccttctagatcccgtggcaagtctattcatttccagcgcacaagtgggatgtcaatttcaatttctcagaatactgcatcttcaccaccctaatccacccattattaaaccaccccagcctcatgcatggtttggttatgggctattaagggctgccttgggttccagaaggcacacttcatttgctggtgaattaattcttagatgtactrtgtataacacatttaaggctctttccaagcaaagacattgtgtaaccttcgattacttttgcctgtgcaaaattgtgtatgtccagagttgagtcactctaagcacctccaagtgactgcactggctagtcctgacttaggarctgtggcaagaggtggtgtgccaattttcagtccaattctcactcctccactgcctggggrcaaggttcttggcagyctgagccccagtttcttgatctgtgatatggggatgatcatgtcctccacctggtgttgttatgagaattcgagcatgtttatgaagtgtctcctgcctatagatgacactcataaaatgagtcattgggccaggtgtggtggctcacacctgtaatctcagcattttgggaggccaaggcagctggatcacttgaggccaggagtttgagaccagcctggccaacatgrtgaaacactgtctctactaaaaatacaaaaaaaaaaaaaaatacctaggtgtggtggcacatgcctataatcctagctactcaggaggctgaggcatgagaatcatttgaacccgggaggtggaggttgcagtgagccgagatcatgccaccacactccagcctgggcgacaaagcaagaccctgaaaaaaaaaaaaagtgagtcattaaagactggatttgcaagttattttctccrgaagagcttrtacaggtgattctggctctccaatttggcccattccgatgtctaactccactaaggctccccggcctagaaggccacacttcttcctttagaaataataacgatcataataatagttgacatatagtgtgaggcagtgttaaatgtattcacccactaaatccttgctatagttctctgatactatgattcccattttacagatgtggaaactgaggctctgagaggttaaatcatttgcccgttgtcacacagctgggatgtggtgagcctgcatgccaacccaggcaagtggctccagactcaacaccccagaaaggtgccacacaatcccgaggagcttccaggctttccgccgaaggtgggtttgttcccttgttgaggggactctgcgctcagccctgggagcatgttgatgtccagcctggacgacgccttcctgagggggccatgcagacaaccatgcccaggccgcagcaagtctrctttgctctgcttctcatgtttctctcacaatgaaaatataccttgacgatgacaccatcacactctaaatcagctgggaactcctcacccccttgccagggacgaaaaacagcacagatatatgaccagctgagcaatctggctttccccacctcttctcccaaaatttatttctaagtcaatgactaatggcaaagcttaagaatgagtgaccctgttaaggatgggagagttactaaaagaagttaccattgcaggaggcaacgatttctgagggtggaataaaacaaacaaacaaaaaaaaaagcagagtgagaaaaggaaaagaatcctccaattgatttaaaaagtgtctgactgatgaaaaagtggagaaaaatgagaagtattgaatattagtagaactccacattaaattccctgggtttttgttttgttttgttttacttcttcttcaagtatttcctcgcaccccaatctcttcctgcagagatttggtaacttcaacttgtgccaaagaacataaaacattctctctgcccacccttcttgcatyyrtacctgtgctccagcttagagttgttatattaaaatgtaccagtgtgcagggcacagcatcaatcttgggagckctggagccgaagcgatcacgctctttgatggccaagacaaagttaggtgataggaaaataggatgagggtataagacctatattttttggcagtgaatttgaaactcagtgcccagattgtactttaatagtctcaaattagcaaaaaggacttttccctctgtctatagcaagtaattggcccaattctcccaggcatttttttttaatgcagaaaccacttggtattcacccaaggcaacacaaaagcatcagaactatttgcctcttgcaattcacatgactttccagtccacatggtgtaaactagatatcagcatattttagctctcacagtggaaattcccccatctacccaatgccaacggaagctagtcctcccttaacccgctgcagcacagaaatgtcccctagaaacctcagggagaggagctcagaaggtcaacctttgaccaccagcccactcgtgtgattttaataaggaaaatatgggagcaggttttctgtcttgccttactttgagatttgcatgatggaaaagcaagaaagaaaagagagaaaaaactgagctgaggaagaaggaaagagaaagaaacaagaagaaagaagaatggagaaaagaatggtttatgactcagccatcccttcacctcttcccataggcttccctgtgcctcttcacagcaggcttatgaggtcagaaatcccagtaggtaaaccccgtgtcwctgctggccagcaaggtggagtgacctcttgcccactggggccagtgcctataggttcaacaatgcactgcactgtctgtcccaacaatgcactataggaacaggcatctggcccttcacactagccctagacaaccrtcagyttctccatgttctccaagccctgrtcaactgtccccagggcattagaaataycccagcagccaaaataagggccctcctgaatagggctggcaggaggcctggggctacccatgtgtaccctttggtcatgttcaaattgttgcttgaggtattccatcaccagtgctgcctgactggaccctctcaaacccttttctattttgcaagatgaamcagcaatttatgctagttcagctcctccatctccaggatggaattaaacacgcaaggattttcagaaaggaaatgcctgcattaagggaaataagaagggaaccaaggaaggctagggggtcatcagaccacagtgcaagtctgacctggagggaaggacagaaggaggttaggtggaaatgccctaaactaccgtgctgtcaaagggagctttggcaaaaccactggggagtctttgagcccaaggtagctgacaaaggaatcccagctctcctagacaggtcattggcagggaatagcccggggaggcatggtcccagggtaaactcggcaaaggacttagtgcccaatcagtgatgcttcccagaggccagatgccaaggtcttcagggctcactcttgcagtggtcaccccaagtgaccaagtctccactgtggaggatttcctcttgcamctgctccatcacttctgaaaggtgctaatgattgggctgttgtgatgggatgtgctgaggctcagtccccaccacataggtcatgccttcactataaagatgcagggaagatgccaagacagtgggcgggggggggggggtgtctgttgtggaactaaataagtgctcctttgttctctgaagcccagggtctagcttccacacactcttggaacatttcttggttacagtgatattctcaaaaagagggcatrcctatctactccatatctggcctttgcacagtgtcaatagcagaagacaaaaacttcccaaagaagagaaatgcccagcatggtccccatctccaaagggaaaaaaatcaaaagatggttcaattttggccaccaattgtggtcaytttggaatctatgacccttgtcagaagaatctgccatgtggcctctagtcaatccaacagctgcaaggaccccacaaagtgatcccaagccagcctcctcctgtggggtaygtgtgaggctggcttccatcctccccaccccacaaccaagggcatcacaacaattctcccaggaaggaagatgcaaattccaatgtgtctcttccccataaacctgtggctcccgcagggctcaaacaagagtcaactgaaagaggccccagggtgcagaattccaggaggcatcattctcaggatggagtgagtgcagagtcagcactgagcatgagaaccatcytttgcaggccatgggtcacctccctccagtccacccagaggaccaaagtctgcctacccttcaaaggctacccaagacctgcgctccatcgagccttccctgaggacccgtcaactctcatgtcattcctctgagatcctagggccctttgtttaccgcagatggatggctttttcccatagtacccttgcattgtccgtgtttgtgtgaacacccattatccctcccagtagactgcaaacagcttccggacaggggccatcttcccaccttcacacccctttcccatctgcagcaccggcagtacagtaactgaggggctctgtgtgtggcttctttgcatctctggcaagctgccaacagtgtccccayggccacagatgctgaatccctctgtactaatggcttgaattacaaagagaaagatgctatggacacaccatgataaaagagtgttgcagagtagaagttatgcatatggtttcctcccatgccatcaggaccaaaggaatcgcatctggcagtgttgtccccctccgtgtctccctctgggaaaccattaggagtgtccgtggctatcaaaggcttttcattgtaaaatactgtacttagggagcactgtcacttgattctcagctgtggcaattgttctgcacaaattcggtgggataaggtagtgttaaggttatttttcccttgtcttgaaggccatgtaatgttaggcagggctgataaagatgtcagaatcaagaacaaaaaattccagtacattggaagcacttatctcatgaagtttcatgggaatgactytgcatatccaccagcacttcagaaaaagctcggaaaagagctctcacaaattgtgttgtttctgcccattataaaaagaggagcaaaatctstcattcattgacacatagggagttggctagttttcagcctctgtagtcacctctcygaaagtgasggatgcggasggggaggtggggggggggggttggaggaggagcctgaggctcctctgcttcccctctgcatctccttggagttcgcatttgtcccaarccatgggtctaaagattcctcaggcatgagaatcccaccggcacttgtaacaaatgctgcttccatggtcccatctccggagatgctctttcagtaagtctggggagggatcatggaatctgcatttttagccagcttcccaggggattctgatggaggtggcacagggcctcactttgagaagcgctgctgtgccgaccgaaggttgagggagctgctcggagagagccagagcatctgggcagggcaggaggcggcaagtgaggctgagctgctgtcacctaaaaggcagtgggtaccaccaggcagcttgaagcagttacgtggggacacctttgcagcctctcagtcrrcagccccaggaaaacccctccaccaacactcacagctggtcactctgtattacgtagaacacaggttctgggtttgaatcttgactccagctactcatcagccaccctgaggttactcagtctctctgggccttgtttcaaagacggggtgaaagacataccttatgttacagagttgccacaagggtaaaatgagatgatctgtataaaatgcttagtgcagggtctgagtacacagtaaaggctcaattcatggtagctgttcatcttttctgatgttactgttatctattccagttatctgttgctacatagcaaactatcccaaaactaagtgccttaaaacaacaatggtggtgtggcgcagtggctcacaacttagtcccagcattttgggagactgaggcaggaggacccttgaggttgagagtttgagaccagcctgggcaacatagcaagacctcacctctacaagaaatttaaaaattatgtgggcatggtgacgcatggctatagycccagctactmaggagactgaggcragaggatcacttaagcctaggagttagaggctacagtgaactataatcataccactgcactccagccaggggggcagagcaaggccctgtctctaaaaatattcaaaaataaaaaacaacaatggcatttatattgctcccaaatctgaaatctggacagatctcagcaagaacagctcatcccaaccccactggatatccgctggagcaggtggaagactggggctgaaaatacctgcaaacaggctcactcacctggaaggtgggggcgctggccccagcagggccttatccagggccttacctggaacacccatacgggcctgtccatggcagctggaagccagagmaagggggagatagacagacatgcagagacacatgggaagtaagcgggacacagacagccaggtggaaaccatgtcrccttgtgtggcctagctttcagaagtcatgcaccatcactctgccacacgctgttatkcaaagggaggcactagcactggcccatattcaaagggatgagattagaattcacctgttaagggagaagtgccaaagagtctgtggaaatgctttagaaccaccacattacccaacacccccaacatgagccagttcctctgatcttgcttcctggcttcatggggtaatgacaacccaaatccttgactccacacaatcggctctatgaagcttaattcagccttcacagcctggtccrgcaggctagtccaggtagcccgtaggttacctcccatgcatgtcataagaaaatacacacagcacaacgtttgtgcagaaaaygacctcaactgagtgggcacgtgggaagggggaagacaggaatggaggaggcactggttcactgtactcactgggactggtgaggcagagtacaaggcagtgaggacaacagccatgtcacgccctgcgaggcaggttggaccagcagctggggtggagagaccctgtctgcaggctccaggcacttccatctagaacccaaggaaacaarttgtttggaatcctcattcttgccagagaaaaacaaagtaaatctgctatcaaccaaacccgaccaacaagaatcactagttcactggcgtttcccagcatctacattttaccttagaaagagttcaatcacagccaaggaagctaatgttcgtattttattctttctggctttaaaaatacaaccccaatttttttgttgtttgtttttcttaaaaagaggtggggtctcgctctgtcacccaggctggagtgccrtggcgcratcatagctttactgcctcactgctgcagccttaacctcttaggctcaagtgatcctctcacctcagcctcccaagaaactgggcacatgccaccatgcccagctaatttktttttaattttttgtagagacagggtctcacatgttgcccaggctrgcccaatttctaatatatctcctagggcccatacaaattgctaatgagttggtagattaatcaaatatgtatttgtaattggggcatcttttggcctaattctggaagccaataatgggstcctgtccccaaaacgcacagtgcaagccttcacatggccagtccttccctccagggcctcaaggctctgacaccagtgatatggtttgggctctgtgtggaactaatctcatcttggattgtaatccgaattgyratccctgcttgttgagggagggacctggagggaggtgatwgtatcatgggggcggtttctctcatgctgttctcgtgatagtgagtgagttctcacgagatctgatggtttaaaagtgtttggcacttcctctcttgctctctctctctcctgccaccctgtgaagaaggtgcttgcttctcctttgccttctgccataattgtaactttcctggggcctcccaagccatgtggaaccgtgaataaattaagcttctttcctttataaattacccagtctcaggtagtatctttatagtagtgtgaaactggattaatacaaccaggtactcttcagtgccraaacatgctgtgagwtaggcctggagagtccagctgggctcacctatctcaaggcwctgtctrctcttcaccttagcagacagagccaaagcttcatcaccagcaggtgacagacacagcatggaggcatgtgcagcagcagggaatgtgtggggctcccaggtgtggccycaggaggccccaccctggtcgagggtaacacatggcccactcaggcagatgttgtttctrcaagtctgggagggagctgatgtgaaaacaggcctcttcttcccctacgtggggcctgaaactgasgggggtggttcttgggtttgttggggaaagggggcctgctgcttcatgctggtttcagaccttggcaggcctggaggtggacctctcctgtgaatacagtgcccctcaattaggagtgattttgctccccaaaagatatttggcaatggctggagacatttttggttgccacagctgggcaggggttgttcctggtatctagcaggtggcggccagcgatgctaatgagcatgctgcaatgcacaggacagtcccgccgcaaaaagggtctggcctcaaatgtcgatagtgccaaggttgagaaccctataatctcccctctcaagtacccagcagcccccagagacgagaggaagccaggcctatctcccagagctggaaaccaattgtccttttcctgcctggagacccccactccagagacaaaaaggcactcaaagcccctagcataatgtgccttgcctaggccattcttgtaagggagactccattagcaattcttcccaggccaaggaaaacctgtgatcttctatcctgcctataccttcaagccattgccaacttctttcttgtacaagaaaaaccagtctcgaagggtaattctgattagggcactcctcaggtaaagcagtcacgatgctctcgttgagcgccagctgcatgctaagcacttagtgttggcacctcctagacacatacctccctgagcatctacggctctcatcsgcagtacagaccaaggtctatgccatggcctcccaaacctgggtagttccacgaactgtccaacaaagtttcagttagggtaagtagcatctatttatgatgatcaaaaagagggctatctttttagaaaggtttgcaccaaagagttgaaactttactcaaatagacagctcaatcagtatagtacataccatctacctacatgggaaacttgtgatccgtaaattattttgttgttgttgttgtcattgtttgagacggagtctcgctctgtcgcccaggctggagtgcaatggtgtgatcttggctcactgcaacctccacctcccargttcaagcaatactcctggctcagcctccggagtagctgggattacaggcgcacaccaccacacctggaaaattttttgtatttttagtagagacagggttttactatgttgtcctggctggtcttgaactcctgacctcagatgatccacctgcctcagcctcccaaagtgctgggattacaggcgtgagccacggcacctggctatctttaagcccttaattatgagcgctgtgcggaagagtacacaacctttaggatcttggctgacacttcctccatgtaaaccccttaatacccactgcagcactaagttctataaggcaactaaaacaggcagtttataaacccaacaccaggcagaacccataaataataatgatggtttataaaagccatttcattgaggactttttaagcttattaagcagagactagtatgaagaatccccctgcctccatcattcagtttcaacaaccatcaactttctgccttacttattgacccccctccacagagatacayacacaatttcttctggagcttaaaggagatctcagccatcacatcatttcagctgtaagtactttaatatgtatctctaacagatggggctttttaaaaatagccataacagccgggtgcagtggcctgcacctgaaatctcagcgttttgggaggccaaggtgggcaratcacttgaggtcaggagtttgagaccagcctggccgacatggtgaaaccccatctctactaaacatacaaaaattagccgggcgtggtggtgcacgcctgtaatcccagctacttgggaggctgaggcatgagaactgcttgaaccccggaggcagaggttgcastgaggcgagatcgtgccactgccctccagcctgggcaacagagcaaggccctgtctcaaaaacaaacaaaaaaatagccataacaccactgacccacccaacaaaactaacatctaatatacagtccatccgtccatcttacattgtcctcggctctctcaaaaaatgtctttttccagttggcagctgatactcaaaggagtgctgacctcacagagaatcacagtacagaaacaaaggtttgttgtctttggccttctcaggggcaatggcccttcctgcctacctccaccctacctgccattctctaggcagaaccaggggttggggggacatagtcagagcattgatggagcaggtgtcttaagcgtggtcctgatatcaacttctcctccagatcagctcctcatcagaaaagccaccctttctcaggccactttccaggtaggcccaagagatcaggaaacatacctggccggaagagccagcaaggctcactgcagacccttggcaaccctatgggggccacgaggttcaaggattttgtgacatacttagaatgcagtccctgaagagcttgggctctcaagggtgagggggaaagacacacctagtaatttataggttcaaatgaatactcccctgttctgaaaagcttagcaggctctgcatgagcaaattaattcatgcatctgtcatggagaagttaggggcagccacccaagattctgggactttaggtaacaagccagggcaacatggaacaagcctgtcagacttccctcctagagctctgcatgctacagactaggatcagtgctcaagctacaggttctaatagaaatagcactatgtgttaattataagtttaaaaaaggagagaagaaataactttgtttaaacctgatcttctctgctgataaaaatgtttttaacacctttagtaaccctagtttccagcaggtataaaaagttaactcatctgcttatagatattttaggggttcctccccatcttataaaataagttcttgagtccaggggaatggattctgaaggcagtattgtgggagattaaaatcaaaagctcaaaacttacactcttcagagctgtttgaccttgggcaaactaattagtttctttgctgttgttttcccacctacgaactgaggatgagactatctccattgcagagttgttacaaaggtgtaacaagataacatattctcattcaacacacatttattgagtgcaggcaccgtcctaggtgtcaaagatagaggccgtgagcaagtcagacaaggctttggctctctcagagcttttgttctgatcaggaagacacacatgaagaggaacagaaatatccagtaggaataaattctattctgagaattttttaaaacactgtgcaatgcagaggatgtaagtgactctagggaggccttttcaaggatgtggtaaccagccggaatgataaggagccagccacacaaaggtctggggaaatgcactttaggcagagggaacagcaaacaccaagcatcaaggatggatggaagtttgttgtgtttgagtggcagaaaatgtagaaacgtacaaaatgccatctgtgagtgatatggtttggatctgtgttccccgcccaaatctcatgttaaattgtaatccccaktgttggaggaggggcctgatgggaggtgattagatcatggggatggatctctcccttggtgctgctgttctcatgatagtgagatgtggttgtttacgagcgtggggtccctccctctctcccccacgcatgctcctgttcctgccatgtgagatgccttgctcctccttcactttctgccatgaatgtaagtcccctgagggctccccagaagctgatgccaccgtgcttcctgtacagcctgcggaaccctgagtcaattcaacctcttttctttataaattactcagtctcaggtatttctttatggaagtatgacaaaggactaatacagtgaggtaggcagtgtctaagcatgagtttcatggggcttcagaaggggtttggattcactctagtggtaatctgaggcctttagattaacatttcagaatcactggccactctacttttcmgagaaatgattggaggggataaaaggaaaagcagtaggaccagttaggagactttcggagtagccccactaagagaggacaacggtatagagtaggactcgagtggtacaaatggggagaagggtcaggtttggaatacattttcaaaacaaatctcccaggacttgctccatacattttgtaaggagcaaaaggaagaaaagcatgaagaatgattgtttgaggcccagagagtgggtagatgatggtgccatttactgagacagaaaagacaggagaagcagccatgaggagacagagaaacaagagttctgtgttggccacacaagcctragatgcctgatacacctctaagtgatgtcaagcaggcagatggatttaggactctggagatccagggggaaattaggctatcagaagtcttcaatagaaagatggtcatgaaagctgagagtgcaggtaggatcacayagggagaaaatggggaaaagagaaggggatctagagttgggttttggaatattccaacattgagaggacagacattgaggggggatactgaccaggagcagctggtgaggtagcaggacaaccagaagcatgggatgccatgaaayggcatggaatgggatggratggcatggaatgggatgggatggcatggaatgggatgggatggcatggaatgggatgggatgagatgaaatagaatggaatggaatggaatgaaatgaaagctccaaaaaaatgcttccaaaaggaaggagtggtcagtcatgccaaatgtcactgcaagactcaataaagaggctagcagatggaccawgggacttggcagggtggaggtcttcattgtgaagacagtttcagctgaaagcctgactgaagaagactcaggagagaaggaaatgtggaaaagcaaacagacagcaagacaccctctctctgggagggagagcagagaaatcaagtggtatctagataggcacagagatcaaagaagagccaacggcatgtcagcatgccctccggaggaatggagcagagaggaagaaactgatgatgctggacaaaaggcaatttttgtaaaagctatcattgcgttaataatttgtgtataggtgcgtgtatttataattttttctttcacttagggattcttcagcttagagagtctttatttctgttgtactaatatacagttacactttttaatagaaagaatatctaatcctccatttgtgagaaagtgccccaaaggatgggcttaaatgggtatatgagatcctcagctgtgcaaattctcacagtcttaaaattattcatttctagtgttctctgtgtataccaggtaacacatggtcactcctgcttataacctcagcttctggcaagctgaattcctcacaattccccaaaggccacatggtttcaggcagctgtaccttgcaccctcacacaggcacctcacagcagcaggggtgcctgactgctctggctctctgatgcgtcttacctaaggaacaccctctggtcactcttggaatcctccctaacctctgtagattgcttcttgctgttttcttttcctaaaggtactgtggaaccccagagagcgttatgaaccaaggattacaactaaaccaattctgtgaaactgaggtctgttaaaaacaaaacaatcatgctaaaaaaaaaaagtgtatgcttgccaaaaatataagcaatacagaaaggaataaagcagagatcaaaattcaactgagaccacacccccagaaacaaccatcattaacattttgcacaatgtcctccagaacgctctataatcctgcatgaaagagacccatcctaggacagaagaatcactcctagactaacgtgtcattggcttcctacagtgactactgcagggggcttgccttgttttttgtatccccagtgtttagcacaaacacagacactgcagaggacccaaacatgttggtcaaattaacaaataagagcatatgtggctgcagagcttagcaacagcaagaataatgcagttccctaacatcacttacagagcaagaagcagagacccagaaagaaagawgcactcacctagcattaagggagagggtgaagcactggaaggcttatggtctttgctccaaaacagatccaaataaagttgcatttcaaatcaatgtrgaaaatatatttttaataaatgcctatgattctagcactttgrgaggccaaggtgggaggatcattttagcccatcaacccgtcacctacattagstatttctcctaatgctatccctcccctagccccccaccccccaacaggccccggtgtgtgatgttcccctccctgtaatgtgatttttaacaaagagaatgggtggacagaaaaatactttcctttcttttgagacagaatctcactctgttgccaggctagagtgcagtggcacggtctcagctcactgcaacctctgcctcccaggttcaggcrattctcctgagtcagcctcccaggcagctgggattacaggtgtgcaccaccacgcccggctaatttttgtatttttaatagagacggggtttcaccatgttggccaggctggtcttgaactccttacctcaagtgatccaccagccttggcctcccaaagtgctgagattacaggtgtgagccactatgcccagccaaaaaaacattttgaaagctggaaaatgaaggcgaagtaactaacttaagcaaacctgaaccaaccataggtaaagctgagacacaacctgaatcacatcctgaacttcaaaggctcaggaggcagcaacacccagctcctttggaagcagagaaaaagatggggcagaaaacagaaggtttgactgaaaagtctgtttgagaagcagttaactccaccagctttctttcccagctccacaaagggcaggagcctggagggttttttccctctggagaggtaaaatcaagcctctctgggctggggaacaccaggcagagataagggcaggagtactgtatggaagaaagggacgaagtcaaagctgcatgctgagcatctgattcccagccttccttcccatcgtgacgctcagaaggcagacagccaagcttaaatcctccaggcagaagattcaaaaactcttctcttgggaatccaacaagttcatgagaaagtcatcatcagagggtttcttaacaaaactgtcaagctgggccagacatagtggctcacacctgtaatctccatgtactgagaggtcaaggcaagaggatcacttgaggccagaagttcacaaccagccagggcaacatagtgagaccccatccctacaaaaaatgtttaaatcagccaggtgtagtagtgcacacctgtagtcctagctacttgggatgctaaagtgggaggatcatttgagtccaggagttcgaggtagccatgagccatgatcatgccactgcacttcagcctgggcaacatatcaagwccatgtttcttaaaaaaacaaacaaacaggctgggcgccatggctcacgcctgtaatcccagcactttgggaggccaaggggccgggcgggggaggcgtggatcatgaggtcaggagttcgagaccagcctggccaagatggtgaaaccccatctctacaaaaaatacaaaaattagctgggcatggtggcgggcacctgtaatcccagctactcgggagactgaggcaggagaatcatttgaacctgggagatggaggttgcagtgggccgagatcatgccattgcactccagcctgagtgacagtgtgagactatgtctcaaaaaacaaaaaaatgaaaaaaaaaaagaacagccgagctgaatcatcttacaattaattccactgtcagtaaagccctccactcacctactaccaccagcaccatgyagagcagactataaacagatttttggtgcaccactcttaaactataaacagtataggcaagaatcccaagataacttgagaagcatttaccctgtttcattgatcctaagatgcatgtgtccgaatgaacatctctgaaatccgccttacaaatcaatagtattgcaaaatcatggtcagtcaggaggcagccgtgatacggccatgcaaaataatttcgtggacactttctcgtaagattaagagcaccagcatcgaaggttctcaaagtcgataaaatacggtaatctgaaagccagagaccaaagcaaagtggaaaaaggaggtaaaaacagagaaaatagcccccaaacccttattaatatcctgagagagataayggaatacaatatactcatttttaaaaaatatgaaagaacatttaaataatccttggaatttaaaataaggcagcttgcaatagaagactaggttgggaaaatttcccagagagaagggtaaacagaaaaagagatagaaaatagacaagaaaaaaataagaaaattagagaaytgtccaggagtttcaaaaagagaaaataaagaaaccatcagcaaaattattcaagaaaaatctctcagaattgaaagacataagtttctagattaaaaggagcccaccaagtcccagaagacaaaataaacccacaacaaagtgcatcattgtgacatataggaacactagggacagagaaagagtctacaaacttcgagagagagagagagaacaacgcaggtcttatgtaacaaggcagaatataacagagcagaacttccaaattccaaattccaaattttaaaacctagaattgaatactcagccaaactatcaatgaaatgagatgacacgataaaggccttttcagacctgcagggaaagaagtgaagaaatcacccagataatgggtggaggcagaacgcaagatggcagatgagtcactgctgtgtgagcaacccgtgcagtttggagcagatcagaagatccagaagagatttcttcaagaaaatgaaattaaacatattgagaggtatgcccaattgaaagagctggcattgaattagttacaagtatacagaaaaataagcaaatagaactggaagacaattattaactctatggaaaataaaaaagtgcaagaggaaggaaacgtaatgattgtgtaccgcgtgactcagcaagcatagtcacaataaacactgaaaaatgagccagccaaaattagaacttaactggataaagagaatggagaagacttaaattgtgttctgagagacaggcgggtaaaagacggtgaaatctttgtattccagcaaatacttactacccacattttttcttcaagmaacatgctagcattttacatatttaccaatttacatattttacaaatacggaaatgaacatgaaaacactcaggtgaaagttacaaggaggtgcttctggaaagtgggacagggaactgctgcaatgtttgacaatcagccatgttgagtgatcttaatatttgcactctatacatacgtggctttaacaaaagtaaaagttaaagtagaaaaaaaggaaagaagaatgaatgagcatgggctttggaatcatgcgtaggtttgaccaccaagtatagttggccctctgtatccatggattccacgtctgtggattcaaccaaccgatttcgataatctgatttcagattatttccgattgaaaatagctggaaaaacattgtgtctgtactgaacatcccactttgagaggctgaggtgggtggatcacttgaggtcatgagtttgagaccagtctggtcaacatggggaaacccccatttctattgaaaaaaaaaaaaaaattagccggacgtggtagaacacacctgtagtcccagctactcgagaggctgaggcaggagaatctcttgaacctaggaggcagaggttgcagtgagccgagatggcaccgcctgggcaacagtaagtgagactccacctcaaaaaaaaaaaagaaaaaaaaagttatgctctctggtagataatcagaaataacatgaaagtaaatagaaatgttttaaaccatttcttcctcatgtaagatattttctgatggagtcataagaaaaggaggaaatgtacagaaaacaggagggctttggaagaaattaggggggttctacaaagtgtttggggctgggagcaactattcaaggaatttccatttccaagctaccaacggtgtattggtccattctcacattactataaagaactacctgagaccaggcrcagtggctcacgcccatattcccagcactttgggaggccaaggtgggtgtatcaactaaggtcaggagttcgagaccagcctggccaacatggtgaaaccctgtgtctactaaaaatacaaaaattagccrggcatggtggtgcatgtctgtagtcccacctattcaggaggctgaggcaggagaattgcttgaacccagaggcggaggttgcagtgagcagagatcgtgccactgcactccaacctgggcgacagggcgatactccgtctcaaaaaaaaaaaaaaaaaaaaaaaaaagaactacctgagactgggtatttttttaatttatttttattttttgagacagcgtcttgctctattgcccaggctggagtgcagtggcacaatctcagctcactgcaacctctgcctcctaggctcaaggcattatyctcccacctcagtctctcamgtagctgggactacaggcacctgccaccacaccgggctaatttttgtatttttagtacagaggaggtttcaccatgttggccaggctggtctagaactcctgagctcaagcaatccacctgcctcagcctcccaaagtgttgggattacaggcatgagccaccatgcctggccaagactgagtaatttataaagaaaagagatttaattggctcaccattccacaggctctacaggaagcctggctggggaggcctcaggcaacaatcatggtgggaggtgaaggggaagctggcacgtcttacttggcaggagcaggaggaccaccaagagaaaggggaggtgctacatacttttaaacaaccagatctcgtgagaactcactcaccatcacgagaacagcaaggggaaagtcggcgcccgtgatccaatcacctcccatcaagcccctccaccaacaatggggattacaattccacatgagatttgggcacagacacagacccaaaccatayccaatggaaagtgacaaatacaccactgcagtaacttactgtgcagttactatgtcgaaaacctgggtgaacgcctcccaccatctgaggttctcttcagccctcccccgaggctatcaagtcaccagcaaccttcacctgccaagcagggtgcccaccgctctgtcctagccttctgtgacctttcagcagcactgacgtactgaacgactctctccatgaacactttctgtcctgcctttctgacaccatgctctgctggtgatgctcccttaccatttccccaggatacccagccaccctacccttctctgagcttagctagttgcagcagagtcctcatgatcctccctccgctatttttgcctgtctcgggtcattctccactcagcagctagagtggatcattagaaacgtaggtcagatcagaccatccctccccttttttcactcttttttatttgtataaatgtatagggtacaggtgtaattttgccatatgcatagatggtgtagtggtgaagccagggtttttagggtatccatcacccgaataatgtaccttgtacacattaaataatctctcatcattcacctccctcccaccccctcgcccttccaagtgtccatggtcatcattccacactctatgtccacatctacccattatttagctctcacttgtaagtgaatacatgtggtatttgtctgtgtctgacttgtttcacttaagaaaatggcctccagtttcatctgcgttgcagcgaaacacatgatttcattcttttttatggctgaatagtattccattgcatcacatccctcttaatatgctcctatggcttcctactgcacttaaatcaaaggcaagytccttaccccagagcctacctagaggtgcaccttatctgaccctttctcctctccagacaccccctggctgtggtcaccttgctggctgccccttgtcttccagctgtcagctcacacaccccattctgaaagagggctccccatcactcactctcacaccaccctgcttatttccttcatggtacttactacaaattggaattcctgtgtgtccatttacatacatggtaattgtgacttctgccctatgatgcaagctccatgagggtagaaactctgtcttgctcagggtctggctcagaattagaactaaatgaatattatttataaccaatcaattagtaattaattagtagaaaaaatagaccaagagagaccgaataaaataaacaaaaacaaaagaccctagaggaaatggataatgcagacaatagaaaagagcttcaaaactttctaaactatctctcagagrctttatagtttattcattaaaaaagaaaagaaatacaagctgctcaccaaaaagagtaggtaacaaaataattcttgaatttttaaaatacaattgacaaaatcaaaaattcaataaaagagctagaagcaaaacactgatctttcggattataaatttaaaatgcaaagatttagaaaaaaatcacttaaaaagttgagacttaaaaagatcaattcaaaaatcctaatatccacctaatacatgttcaagtaaaagaggacaacaggcaagaagaaaattattacatttttccagaacaaaagaaagatgtgagtctccaggcatcactaagtcatgaaaaggataagttaaaatgcacacacatggccaggcatggtggctcatgcctgtaatcccagcactttgggaggccaaggtgggtgcatcatgaggtcaggagttcaagaccagcctggccaagatggtgaaaccccgtctctactaaaaatacaaaaattagccaggtgcagtggcaggcacctgtaatcccagctactcaggaggctgaggcaggagactcacttgatccctgggggcgaaggttgcagtgagccaagatcgtgccactgcactccagcctgggtgacagagtgagactccgtcttgggggaaaaaaaaaaaaagcacacacatacacaaccctagagctatcatcataaaattttagaatgccaaatatgaagtttccagacagaataagttgcctacaaaggaaccagaatcatattggcattagatttttaatcagcaatcttcaatgccataggacaataaagtattacctttaagttttgacgaaataacataaaaggttatagcttcctgagctatcaatcaagaataaaaataaaacctagatattaatgkataagcaaagactctgatatttatcaaatagtgatcttctctgagagcactactcaagtatgcaccccagcmaaacaacaaaggagtgcaagaaagtgacagacacagtakwgttaamccaggagagcgtgaaaagatactctagggtgatcgctgtgcaacagctagatccaaattagaacctagaaaaataagaaaattcagaagctctaaactaagtgtattcataaagaaaattgattccctgcaagaaactttaacacttaaaagtggataattttagttrtaagatggatgcataaaataataaaagtaagccaggcatgtatctgtagtcccagctactcaggaggcagagatgggaagatcgcttgagcccaggagttcaatttagcctgtaaaaaaaaataataataaaggtaaatagttaaaatatgctgtccctcttcctgtctcctaaaaatcactctcttaagtacctgggtttataagcataggatctcatttccttctctagttacacaatcacattacgtggttcttcattgaacaaatatttatataatcttattataaactacagatattggctttcagtttttagaatcaacctctaggcaaagcataaaggacacatatggttatagaacacaatatgtgttgtaaacctagacggtgaaatgatgacagcagccaagagacagatggagctggaacagtgaagggaaatgcaggggaaccaattttctcattttacagagtgaaaattcaagggaaactctaaccaataggtcaggatgtaaaagtccaaaaatactacttaaagctacagtggtagccaagagaggaactaaaaataaaatgtgtcaagcagaaactaaagtggargaaaagaaagaaacataaattaatcattgttgtaatggggagacaatagatactgtcaaaaaattataaatcaaggaacagaggtaaaatcacatcattgcaagcacggcagtaactaccagaagaaccaaaaagaggaagtttaaaaacttgtatctctaaggagaaaaacaggctgaggtggctgaagaaaaaggaaggcttggactttttttttttttttttttttggcgtctctgtcacccagtctggagtgcagtggcacaatctcagctcactgcaaactctgcctcccaggttcaagcaattctcctgcctcagtctcccaagtagctgggattataggcatctgcccacgcccagctaatttctgtatttttcttttttcttttttttttgagatggagtctcactttgtctcctaggctggagtgcagtggcgtgatctcagctcactgtaaactccacctcccgggttcatgccattctcctgcctcagcatccagagtagctgggactacaggcgcccrccaccacgcccggctaatttttggtatttttagtagagacgaggtttcaccgtgttagccaggatggtctcgatctcctgacctcatgatccgcccgactcagcctcccaaagtgctgggattacaggcgtgagccaccacacctgaccaatttttgtatttttagtaaagacgaggtttcaccatgttggccaggctggtttcaaactcctgacctcaagtgatctgcttgcctcagcttctaaagtgctgagattacaggtgtgagccactatacctggccccagacttttcagttatgtctttcataccattttaaatatctctgtaccattaccatgagaaggtattttttaataagttaaaacatatatgcaaaattaatgtgcaatttaaaattaagataataattctctagatataagttaaataccttcaaggactgaagttcatcattgaccagatgatctgtaagaaatccagatctaacattctaaactacctggaaagttacctggaaagtctacgaatttaacttcacaaactgccaacatcatctcttctggaagtacattgtcagagctcctgaccccaaccttataagcagaggttgtctccaggaacatttctgctccctgctctgatttaaaataccagggagagaatctgttttgaaaacaatccacaagacaatattttccctaaggtcagctttaggagaggtggttctctttcttagaggatttatactgcactttcacataccgtaaagtattccatttggtgctcacagtacacaactctgaaaggcggagacagtgtgtactactacatccatttaacttaggaggaaactgagtcccaaatatgtaagttaccagcccaaaaattcttagcactaaataataaagatcagagctcaaacatgtctctgatcccaagtactgatctctccattaacctggttgcctctagcatcttcaaaagcccaataatccaaagacatacaaataagcaacaggtacatgaaaaggtgcttgacatcactaatcatcagggaaatgcaaatcaaaactgcaataagatatcacttcaattctgttaggacattatcaaaaagacaagcaataagaagtgttggtgaagatgcagagaaagggaaccctggtaccttttggtgggaaggtaaattgataaagccattatggaaaacagtatggaggttgctttaaaaaattaaaaagggaggccgggctcagtggctcacacctgtaatcccagcactttgggatgctgaggtgggctaatcacctgaggtggggagttcaagaccagcctgaccaacatagagaaacyctgtctctactaaaaaaaaagaaaaaaaaaattacaaaactagctggacgtagtgacgcatgcctgtaatcccagctacttgggagcctgaggcaggagaatcacttgaacccaggaggtggaggttgcagtgagccgagattgcaccattgcactccagcctgggcaacaagaasgaaactccatctcaaaaaaaaaaaaaaaaaaaaattaaaaagggggccaggtacggtggctcatgcctgtaatcccagcactttgggaggccaaggcgggcagatcttgaggtcaggagttcaagaccagcctaaccaacatggtgaaaccccatctctactaaaaatacaaaaattagccgggcatggtggcacgtgcctgtaatctgagatactcaggaggctgaggcaggagaatcgcttgaacccaggaggcggaggttgcagtgagccgagattgcaccactgcactctagcctgggcgaccgagtgagactccgtttcaaacaaaaaaaaaaaaagaaagaaagaaaagaaaagaaacagaatggaatggtggttaccagtggctgaggggaggggagatggggagatgttggtcaaggagtacaaattttcagttatgcaagatgaataagttctggagatctaatatacagcctggtgactactgttaacaatactgctttgtatacttaaaatttgctaaatgggtagaccttaagtgttctcaccacacacactaactctttacagaatagaaaaagaaggaacactatgctgactcgttttgtgagcaattgcaagcttagtataaaaaaaagtaaaaaggtcaatattggaaagaaaaattgaaggtcaatctccatgaacatagatgcaagaatcctgaacaaaatattaccaaactgaatccagcaattaaaattttwaaaaaatgaccaagttgggtttattcyaggaatgaaaagttagatcattagaacataaattaatgtaatttagcttattcgttgaagaaaaattatgttgtgattttttttttttttttgagacggagtctcgttctgttgcccaggctggagtgcagtggtgcaatcttggctcactgcaacctccgtctcctgggttcacaccattctcctgcctcagcctcccaagtagctgggactacaggcgcccatcaccacgaccggctaatttttagtatttttagtagagatggggtttcactgtgttagccaggatggtctcaatctcctgacctcgtggtctgcccaccttggcctcccaaagtgctgggattataggcgtgagccaccgcgcctggcctatgttgttatcttacttgagatgagaaagtgtgtgataaaattcaaaacaacattcatgagacaaaaagtaaaaaaataaaatcacttacacactagaaacaaaaaggaatgttcttaacatgataagtatatcttcaaactaatgagcaaaaaaaggttttttcaattgtgaaatattaacacgtacttttaaaaatcaggcataataagatgttacataatcctcagttctactcagtgctgcattggaattctaacctgtgcaaaaataagaatacaagcaaagataaggaaaataatacagattcaaaaaatatctgtcattatatgcaggtattatattctacacagaaaacttccagttatctatactgtrttagtccattctcaagctgctaacaaagacatacccaagactgggtaatttataaagaggtttaattgactcacagttcagcatggctagggaggyctcaggaaacttayaatcatggtgaaaagggaagccaacacgtccttcttcacatggcagcggggagragaaggaacgccgagcaaagggaaaagtcctttataaaaccatctgatctcatgagaacttatgcactatcacaagagcaggatggggggaaccacccccgtgattcagttatctctacctgttccctcccatgacacatggggactataggaactataattcaagatgagatttgggtggggacacagaaaacccatatcatatacmttattagaagtaatagaagagtttagtaagtttcctaggcataaaatccacatgtgcatcaactgcgtttctaaacaccagccaaaaaacaggtggaaaataaagttttaaaatattatttacagtagcaacaacaaaataaggtaccaaagaattagtctagcaaaagatataccagaccttttggcagaaagttataaaactttagtgaaaggtcttcaataggacctaaataaagagaacaacaacactttttccatggataggaagattaaatatcttaaagatcaatcaattctcccctaaactttcatatggattccatgtaattcttttttttttttttttttttgagacggagtttcactcttgttgcccaggctggagtgcaatggcacgatcttggcttactgaaacctccatttcccaggttcaagcgattctcttgcctcagcctcccaagcagctgggattacaggtgcccaccaccatgtctggctaattttttttcatatttttagtagagacagggtttccccatgctggccaggctggtctcgaactcctgacctcaggggattcacctgcctcagcctcccaaagtgytgggattacaggcgtgagccactgtgcctggccgattcaatgtaattctaacaaaaataccaataagacatttcatagaacttggcaaacattctaaaatgtataaagaagggccagtgaccaaaaagctgaaacagggaaagtgttctgccagaaatgacatattataagtaattagattgtgtgttattagcaygaggatgaaaaacagaccaacggaacaaaaagagaacccaggaactgatccacactttatgatatatgatagatccagcattgcagatcagaggggctatccatatagaaaaaaaaaaagtgaaaatggatttctgtcccataccatacataaaaatcaatttcaggtgtakcaggaaccaaaacagggaaaacaaaactttaaaacacttagagaaaatacaaaagaatattctaatgatctgtgagtagggaaagatttttaatcaagcatggaaaatacaaactataaagaaaaaattaataaaactgactaataaaaagaatgctattgagtagaatcaccattaggagggtaaatagataagcctcaatgtgagaagatactcgtaattataaccaacaatgaatcattgtacagaatatgtagagtatgctaaagaaaaaaaaatgaaacgtacagaaggcttaaacaggcatatctgtgaaaaagaaatatgaacggccaagatatctacaaagacatactcaacctcagtattaatcagggaacttcaaattagaatgacaataaaatagattttcaaaaacagaagcccaacaaaatcaagcattgccaaaagtttagaaccacagacattctcatacattcctggcaggagttggctcaaccacattagaaattgtcattacttcatgcaccagatactatgaactggtttgctcaacttttattccaccttctcctagggtgccttcctatatttcaaagggcagaaaactaaaaaccccatttgcaagacacccttatagctagggttccatatacgattaaagtttgacccatccaatgctctcagtgagacctgaactgagttaagtgaagagagagaggcaaggctgacagtatttgttttactggcagggattaaaatggtggcttcccaattttagaaggtgatttcagagctgtgtttggttctggagccagcaggtctgacagtggcttcttgatttagctgaagtggtccctaattgtgcccaaggcactgtggctttggagtcagattgtattggcagctttccaattcaaaacatagcttcccattgacgggaaaagtggcagctttcttgatggctcagtgtggctttggtgtggccttgggaattatcactagaagttcagtgttgagtctatttctttaaccctcccaacaattctgtaaatgatcaatcatctatcataaatccctttctgctttaatgaatgagggtgcattctgccgtttgttctctacctgaatcaayacatcagcaaagttgtatttgtacatactaagcagcccaacaattgttttcctaggtatagaccctaaagaaactcttatgattcctcaaggatctagaactagaaataccatttgacccagcaatcccattactgggtatatacccaaaagattataaatcatgctgctataaagacacatgcacacgtatgtttattgtggcactactcacaatagcaaagacttggaaccaacccaaatgtccaacaatgatagactggattaagacaatgtggcacatatacaccatggaatactatgcagccataaaaaatgatgagttcatgtcctttgtagggacatggatgaagctggaaaccatcattctcagcaaactatcacaaggacaaaaaaccaaacaccatatgttctcactcacaggcgggaattgaacaatgagaacacatggacacaggaaggggaacatcacacaccggggcctgttgtggggtggggggaggggggagggagagcattaggagatatacctaatgctaaatgacgagttaatgggtgcagcacaccaacatggcacatgtatacatatgtaactaacctgcacrttgtgcacatgtaccctaaaacttagtataattaaaaaaaaaaagaaactgttggatatgtaaaccacaaatacatacaaggatacttattgcagcactgtttgtaatgaaaaactggagacaacccaatatctatcaagagtagcatggataagtaagtgatgatataatcaagagamtactacacagatatgaaaatgaataacttatagttttacatatcagtgtggatacattgcaaaaataatgttgaatgaaaataactcacaacagactatacacagtatgattttatttatataagtttaaaactaaacattatttggagacatacacgtatatatgtaccatatgtatatatatatatatatatatatatatatttggaggtacatagctatatatatatttggagatacattggtatatataaataaatgtaaagaaaatacaggaaacagttgacacagagttcaggaaaatcactacttctggtaggaagaggcaggggtgttatcagaaagggttatacaggaggcttcaaggatactggtagtgtgtgattccaaagctgtgaatgtgggctggtattcagtcaagtttgcatgtatatcatatactcttctgtatatataagttatttgataattttaaatgttaaagaaaaataaagaatgagaaggcaagaaaaaaatgaaaatgttaacacaaccgaccacgcaatttcaattctgtcctaaagacatacccacacataaatgaaatgactataaagtatgaggttattattgcaacattatttgaaataacaagagattggaaataacataaatatttataaatttggaacaatggtacattcaacatagtgaagtagggtacggtcgtaaagtatatgaaaaaattcttccattgatatggtgtgatcctcagtgtgtgttcagtgaaaaattcatggtgaataataacgagattaacagccttttattttaaaaaagaaaaaatatataatatagtgctattaaataatagtacaacagtaatatacacatataagtgscctttatttataaaaaaaaaattaaaagaataacttagaaaccaataaaaatgactacctagtcaactctggacacatgacctacgagttagccctgctctgcaaggagcagttttttgtaataaaagataaaaacaaacaagcaaaaaaatgattacttaygggagaggggcagaatcgaaaagaagagattagagacaaccttctctaagtatatgttttcatatagttttaatttttaaaccatgcaaagatttttacatactcaaataataaacttaaaccctattgaaaaaaaaaatgaagcaaatcctggaattgaaaacaaactaaagtaaataaaactagtaatattgtaaataaccatccaaaggaaagagctccttctagactttgaagttagtactttatgcatgcttggtggcatacttctgcagagcaatcttaaatttcatttagcagttctattgctagtaaaaatcttagtatgttattttgaagcagtctctatttccctctctttcagagataattttatctctcagagagactccgtctcaaaaaaaaaaaaaagcaagcaagaaaaaagatcaagttatcaatagttagaaaatgacactgaaaacagacctatctcacattcctgtgacagaaccatctcactctgaatccattgtcggaagctttgctaggttatttggacaactgagagattctgagcttcctggagactgtccctctcgctagcaagaatacaccaaaaaagatggccctctgaagatagcttttaaacggttcagaatcaaagccctcacagggatttagcaatgacaggttctgaaactcaattacttgcaggggtttaaaaggttgaagaatctcttcttcaatgcaaaatttcttccacaccaaagaagttaaacctcacctttgaagggcctcaactttaagaatcataataatcagtgattctgggcttaatcagtctttgttgagtaattggatttcttttttttttttttttaaagtctcaagctcaagtggccaaggcaagacgggtcaaagtcagagtggtggtcacagtcctggaggtggcaagaaggatgacaaggacaagaaaaagaaatatgaacctcctgtaccaactggagtggggaaaaagaagaaaacaaaaggatcagatgttgccagcaaactgccactggtgacacctcacactcagtgcccattacaattactgaagttagagagaattaaggactatcttctcatggaggaagaattcaaaaggaatcgggaacaaatggaaccattagaagaaaagcaagaggaggaaagatcaaaggtggacgatctgaggggaccccgatgtcagtaggaaccttggaagagatcaatgacagtcatgccatcgtgtctacatctgtgggctcaggacactacgccaacattctttcatttgtagacaaggatctgctggmaactggctgctcrgtcctgctcaatcacaaggtgcatgccatgagaggggtgctgatggatgacgtggatcccctggtcacagtgatgaaggtggaaaaggtcccccaggagacctatgccaatactgggaggttggataatcaaattcaggaaattaaggaatctgtggagcttcctctcacccatgctgaacattatgaagagatgggtataaagcctcctaagggggtcattctctatggtccacctggcatagttaaaaccttgctagccaaagcggtagcaaaccaaacctcagccactttcttgaaagtggttggctctgaacttattcagaagtacctaggtgatgggcccaaacttgtacgggaattgtttcaagttgctggagaacatgcaccatccatcgtgtttactgatgaaactgacgccattgggacaaaaagatatgactcaaattctggtggtgagagagaaattcagcgaacaatgttggaactgttgaaccagttggatggatttgattctaggggagatgtgaaagatatcatgaccacaaactgaagagaaactttggatccagcacttatcagaccaggccgcactggcaggaagatcaagttccccctgcctgatgaaaagactaagaagtgcatctttcagattcacacaagcaggatgatgctggcagatgatgtaaccctggatgacttgatcgtggctaaagatgacctctctgatgctgacatcaaggcaaatctgtacagaagctggtctgatggccttaagagaacgtagaatgaaagcaacaaatgaagacttcaaaaaatctaaagaaaatgttctttataagaaacaggaaggcacccctgaggggctgtctctctagtgaaccacagctgccatcaggaaaatggttgggagatttctcaatccctgaaagggatgaggttgggggatttgcccagaggaatccctgttcccagtgatttttattagaaaaacatcctgtgtcttttggagtacaatgtgtaagtgcccattgggtggccttcgtctgttggtcactgtgcagcagtctgcttcccagtaaagtgtgctctttctcacacacacacacacacacacacacacacacacacacacacaaagaatctcgctctgttgcccaggctggagtgcagtggcacaatcttggctcactgcaatctctgcctcccaggttcaagcgattctctgcctcagcctccagagtagctggtattacagacgtgcgccaccacacccagctaatttttgtatttttagcagagatggggttttgccatgttggccaggctggtctcagactcctaacctcaagtgatccacccgcttcagcctcccaaagtgctgggattacaggtgtaagccaccacaccagccagacttcttaaaaataatattttctgtacaaagcaagagtaagaaggtggtcaggagacttatcagattgaaatgatctccatgaagtcccagaaaggtaaaggagacttctcacttcccactcagctctcaggcccatgaaaaccacccatccacatcatacatactgcaaggtgacctgaattccaaagtcctgactgcttctcaccttttatcctccccaggaactgtagttaataacattcaccctgtattagtccgttttcacactgctataaagaattgcccaagactggataatttataaagaaaagaggcttaaattccacatgtcttgggaagccaacttccttgggaaggaaacttacagtcatggcagaagggggagcagactcatcttacatggtggcaggcaagagagactgtgtgacagcacgagaaaaactaccattataaaaccatcagatctcgtgagaattcactcattatcacgtgaacagcatgggggaaactactcccatcattcaattacttttctcccttgacatctgaggattacaattcaaaatgagatttggccgggcacagtggctcacgcctgcaatcccagcactttgggaggccgaggtgggtggatcacctgaggtcaggagttcaagaccagcctggccaacatggcaaaaccccatctgtagagaaaatacaaaaattagctgggtgtggtggcaggtgcctgtaatcctagctactttggaggctgaggcaggagaatctcttgaacctgggaggcggaggttgcagtgagcagagatcgcaccagtgcactccagcttaggcaacagcatgagactccatctcaaaaaaaagaaaaaagacaaaatgagatttggatagggacacaaagcctaaccatatcacaccccattggccacccacccacctcctcctcctagaagctcttccctccctgtgagttggcaggtgaacttctgttgttcctttctggccacatctcccacctcctttactcactctactctcttcctctggaaactaaacataggcatttcacaaggctctcctctcttccttaaaaaactcactcattttacaccttcaactctctccttcatacagatgattctgttttatcagctcacccctcacttcactcttgagtcccagactcaaatttccaactacctgctggaaatctgcacttcattggcccatggctgttttaaactccatctgctcaaaaccgaaagcaagacaaccccctgaaaacctacttcttctgcactttccactcttctgttccttcatgtgagaaaatatccacacgaagtacagcacatattctcgtctctgagtgtaccatcctccctgcacccctgcactcaactagaaatttccattctccttagctgttttctagtgcccatactactgattctgaactcaggggattatctgcaaacacaagttccaaggccccatctgcaggtttgaaaaccactgctcttgacacaacattttctaggtgaaatcagaccaagggaatgcttgtaccacatcagacagtcccctgttaaaactgttttcacggggctgtgatttgttgcgatacccttggctgcttaaaggctgctacaaaaaggcatatgattaaaattgctgttgtactcatgccagaggcgtagctgagcatgttaacattacatcacagagggggccttttatgaggcagggtccctgactgatgagcaaaccaccagaggagggtcaggcgagaggcccagtggagggtaacacacatggagttcagtgacccctttgttccttgaggagagaggacctatttctacctaaggacattcccggaaggcaatgggtttcaaacaatatcctgaagagactcatctcggggaactaagcaggtaggaatggaaaggaggaaatgggaggggagaggaagtcaatctgggaccctcatcccggcttcaaccaaaagcttcactctcatctgcctgatggatggagctacaatgtttttgaacaagagattccatttgaacaaagagctctgggttctgtaactttaagagtttgggtggtttttttttcttttcatttgtttgtttgttttttgccacatcagattttatagagaatttaagagttttaaaactacaattaggccgggtatggtggctcaggcctgtaatcccagcactttgggaggccaaggcgggctgaggtcaggagttcgagaccagcatggccaacatggtaaaaccccgtctctactaaaaaaaattacaaaaattagccaggtgtggtggtgcgcgcctgtaattccagttactctggaggctgaggaataagaatcgcttgaatcctggaggcagagcctgcagtgagtcgagatggcaccactgcactccagcctgggtgacagtgagacactgtcgtaaaataaataaaataaaactacaaatatagaggagcagagagtggcaaagcagattgaggacagacttcagaaggccttgaactctaatgtaaagcattcagattttcacctcaggccagtggggactcgccaaaagcttttgtggaaggaacagaatggtgaaagcaatgctgaacagagcctaacttggttacagtgttcaggatggagaccagagttggaagataaaacagaggcaccaactgccaggtgttttctacaataagggcctcaatcaggtttttttaaggaaaagatgcattccatgaagtcaaatatccaagaagaggtatacattgcacacaatactttatttgatccttttctacattccccaggggtgtattcctgtcaccattggagatgaggaaataaggccctgaggctcaagtcatttgtccaagattacatagtgagcaaatgactaaactgtaattcaatgccaagtctgttttttgttttttatttgagacagagtctcgctctgtcaccaggctggagtgcagtggcgtacagtcttggcccactgcaacctctgtctcctgggttcaagcgattctcctgcctcagcctcctgagtagctgggactacaggcatgtgacaccacactaattttttgtatttttaatagagactgggtttcaccacgttggccaggatggtcttgatctcttgacctcgtgatctgccctcctcggcctcccaaagtgctgggattacaggcgtgagccacagcccccggctgtctgttaaactgtttactgtattgtatgacctccagccatccaaatcccttacctgggcattcaagaccttaaaaaatcagacttctaaaatgtgtgcattttatcatatgcggatagtacctaatttaaaagttaagctgatcctcaaaacacttgttattttctgatttttttatagttgccatcctagtgggtgtgagataatatcttattaggaaacctcatttgtttttaacttttttgttaattaatgtatttaagactataaatttgcctttaagtactgctttagatgtgtacaaattcaatcatgtagtattttattcagttctattttttttagtccaaatgttatttaatagtgtgctatttagtttctgaataagcaggactttattttagccatcttttaaaaaatattaattctgtgatggcattgtagttggaaaacattgtcagaatgggattgattccttggaacttactgaaacttcctttatggcctaatatgtgatctattattgcaaatgttttaggtataatcaaaagaatgttttctgtttgtgttgtgtacacacacacacacacacacacatatatatatatatatttgagacagaatcttgctctgtcacccaggcatgatcttgacttactgcaacctccacctccagggttcaagcaattctcatgcctcagcctcccaagtacctgggactacaggtccgtgccaccatgcctaatttttgtatttttagtaaagatgggttttcaccatgttgtccaggctgatctcaaactcctggtctcaagtgatctgcccaccttgtcctcccaaagtactgggattacagttatgagccaccacacccggccatatatttttaattgtatttttgcccattcatatcaatgaataaacatttccaaatgcaactgttaatttttgaattttttctatgtatctgatatagttcaagattgtattggtaggtgttatatgtttatgatgattattttgattttatactgttccttaaacatttttaaacagtgaaatataacttacatgaataaagtttataaatcttatatgcatatttaaagcaatacttacagacatccatataaccaccactaaggtcaagaaataggctgggcacggtggctcacacctgtaatcccagcactttgggaggccaagatgggtggatcacctgaggtcaggagttcaagaccagcccggccaacatggcaaaatcccatctctattaaaaatacaaaaattggcatgtgcctgtactctcagctgcttgggaggctgagacaggaagaatcgcttgaacccaggaggcagaggttgcagtgagccaagatcatgtcactgcactccagcctgggtgacagagtgggaccctgtcttaaaaaaaataaaataaaataaaataaaatattgttaacttttttttagttaacagttttaaaaataaactcacctttctaaccttttctggcactaatccaccttctccaccaacccttccatacacctcatgcttcttagggataaggctgtttgtcactatgcactaattctgctattcattgcacccagtcattttgcttgtttgagacagggtctcactttattgcccaggctggagtgcagtggccccgtcttggctcactgcaacctccgcctcctgagttcaagcaattctcctgcctcagcctgccaagtagctggaattaaaggcactcaccaccccatgcccggctaatttttgtatttttagtagagacgggatttcatcatgttggtcaagctggtcttgaacttctgaccttgtgatccgcctgcctcggcttcccaaagtgctgggattacaggcgtgagccactgcacccagccgcccccagtcatttttatggcttctcttacacctagtgatgactgtcatgtgagggtcccttcccccacctcccctgccaaaaacctccccaggcttcaaactgcagctaagtggtacctctgtagagtgtccttcactctctcctcaagagggaacctctgtctctctattctctatatctttacacctttttaaaaaattacccttaagtcagctttcatattcttctcatattgtggttattttgtcacctattacatataaactccttgaagacaggacaaaggtcttaacctctgattttccttagcttgattcggtgtgaggcatatggtaagtgctcaaccaatattttaaagaaatgaatagaatctcttctttaattcagctatgtttcattattcaagatagctagcattttttccccttaaaacatctctttggccaggcacggtggctcatgcctgtaatctcagcactttgggaggctgaggcgggcagattgtctg

SEQ ID NO: 96239 - DNA, 13370 bp, Homo sapiens
actgccagttcctctctggaaagcaccacctcctggcaggaggtgcaaaaaaagcattggattaaatccagcgtctctttatgattaaagctctcagcaaaatcggtatgcaagggacataccttaatgtaataaaagccatctattacaaactcacagccaacataatactgaatggggagaagttgaaagcattccctctgagaactggaacaagacaaggatgcccactctcaccactactcttcaacatagtactggaagtcctagttagaacaatcagactagagaaagaagtaaagggcatccaaatcggtaaagaggaagtaaaactgtcactgtttgctgatgatataatcttttactttgaaaaccctaaggactcctccagaaagctcctagaattgataaaagaattcagtttccagatgcaggattaatgtacacaaatcagtagctcttgtacacaataatggcgaccaagtggagaatcaaataaagaactcaaccacttttacaatagctgcaaaacaaacatcttaggaatatacctaaccaaggagtcgaaagacctctacaaggaaaactgcaaaacgctattgaaaaaaatcatagatgacatgaacaaatggaaacacattccatgctcatggatgggtagaatcaatattgtgaaaatgaccatactgccaaaagcaatctacaattcaatgcaattcccatcaaaataccacaccatcattcttcacagaattagaaaaaaaaattctaaaaatcatatagaaccaaaaaagagcccacatagacaaagcaagactaagcaaaaagaacaaatctggaagcatcacattacctgattttaaactatactgtaaggccatagtcaccaaaacagaatggtactggtacaaaaacaggcacatagaccaatggaacagaatagagaacccagaaataaacccaaatactacagccaactgatctttgacaaaacaaacaaaaacataaagtgggggaaaggacaccctttttaacaaatggtgctgggataattggctagccacatctagaagaataaaactggatccttatctctcaccttatacaaaaatcaattcaagatggattaaggacttaaacctaagacctgaaactataaaaattctagaagataacattggaaaaactctcctagacattggcttaggcaaggatttcatgaccaagaacccaaaagcaaatgcaataaaaacaaagataagtagctgggacctaattaaactaaagagcttttgcatggcaaaaggaacagtcagcagagtaaacagacaacccacaaagtgggagataatcttcacaatccatacatctgacaaaggactaataaccagaatctacaagaaactcaaacaaattggtaagaaaaaatcaatcccatcaaaaagtgggctaaggacatgaatagacaatcctcaaaagaagatatacaaatggccaacaaacatatgaaaaatgctcatcattactaatgatcaggaaatgcaaatcaaaactacactgctataccaccttattcctgcaagaatgaccataatcaaaaaaataatcaaaaaacagtagatgttggtgtgtatgtggtgaatagagaacaattctacactgtgggtgggaatgtaaactagcacagccactataaaaaaacagtgtggagattccttaaagaactaaaagtagaactaccatttgatctagcagtccctctactgggtgtctacacaaaggaaaagaagtcattattcagaaaagatacttgcacatgcatgtttatagcagcacaattcacaattgcaaaattgtggaaccaacccaaatgcccatcaatcaaagagtggataaagaaactgtggtatatatattcaatgtaatactacacagacataaaaaagaatgaattaacagcatttgcagtgccctggatgagactggagactattattctaagtgaaataactcaggaatggaaaaccaaacgtcgtatgttctcatggatatgtgggagataagctatgaggaagcaaaggcataaggatgatacagtagactttggggacttggggggaagagttggagaggggcgagggataaaagactacaaatatagtgagtgtatactgctcaggtgatgggtgcaccaaaatgtcacaaataaccactaaaaaacttactcatgtaaccaaatatcacctgtatcccaataacttatggaaaaataaataaataaataaataaatgttatcagtgatggaagagaaaaaagtgctacaaaggaatacatacataacaccttaaaatagtccagcaaacagtcctaccaataaatcatttcaaatgtaatcacaaaattaaaatgaagtacaaagctcccatttataataccatgtggggtaatgtatgaagaatactctggagaagctcagtaagaaagctaagagcctggccctgctgtactcacatgcacctctgcctggcccaacatctggttcagcagcagacaaacctccctggacagatagccacaggcctgcttggcatcaccacacctgcacacacctgagcccagcctgacagccagtctgggtggtcccatttccctgcaaataccattgcaggaatgcctggcaccattgctctcatgcttggtccaacagctggtccagtgataattctgctttcctagacagattgccacagagtccaacaaccagcctagcgctcctgtcctcagcaaaactacactgctgccatcacaaacgcctgcagcctagagcactgaggcaatatatatcactgatgaggattacagctgaagaaactgcatgaagactacagtactgagtcgacctagagctaaagccaatgcaccacatttaacactaggacttgtttacaggaaaacatttatccctacaaaagctactccataatgttggaaaaaattgactacacaattagattcacagatataaatgtagggacacaagaaacataaaaaagcaaattaacatggcacccacaaaatgtctccagtaacagactcccaaaaaggacattcatataatatctgaaaaataaattcaaaattatgattttaaggaaactgagcaagatataagagaacacagagaaacaattcaataaaatcaggaaaacaattcatgatccgaatgagaaattcaacaaagatgtatataaaataaaaaaagaaccaagcggaattggagcagaaatattcaatgaatgaaatgaaaaaaatacataactgacagcttcaacaacagacaagatgaaggagaagaaagaatttatgaacttgaagacagatcttttgaaatagcccagccagaggaggggaaaagaaagtagaaataagaaaaatagagaatgaagaaagcctacaggacttatgggacaccatcaagtgaataaattttctcataataggagtgtcagagggaaagagacggagaaaagcacagaaaatttatttaacgaaataatagctgaaaaattcccaagtattggtagagttatgaacatccagattgaggaagttaaaagatccccaattggccgggcgcggtggctcacgcctgtaatcccagcactttgggaggccgaggcgggcggatcacgaggtcaggagatcgagaccatcccggctaaaacggtgaaaccccgtctctactaaaaatacaaaaaattagccgggcgtggtggcgggcgcctgtagtcccagctacttgggaggctgaggcaggagaatggcgtgaacccgggaggcggagcttgcagtgagcctagatcccgccactgcactccagcctgggcgacaaagcgagactccgtctcaaaaaaaaaaaaaaaaaaaaaaaaaagatccccaattacattcaatccaaaaaattctctctgaggcatattataatcaaaccgtcaaaagtcaaagacaatgaaataattctaaaatctacaaaagaaaagtatcaagtctcttataagggaatctgcatcacactattagcagatttctcagcagaaaccttaaagctggtagagaatgggatgatatattcaaagtgctgaaagaaaaaaaagctgtcagttgagaatattatataaagcaaagatatttttccagaaatgaagaagaaataaaaatttttgcagataagaaaaagctaagggaattcattaccataaagttggtgttacaagaaacacttgagagtgctacaaatggaaacaaaaggaccataattactaacaggaaaacaagtgaaagtataaaactcaccgtagagtaagttaattaatcaaattcctaatatttccagtgatatgatacgtctttcaatcctctagtatgaacgtttaatgtcaaatggtcaaaaccaagaattacaattaatggcaaaggaacacaccacagataaagaagtaaattaagtgaacaaaagtataaattttagggggaaggaaaactgtctagagtaattttatgcaaccaaagttaagttgccatcatcttaaaatagtcaattctaactacaagactctttatgttagcctgtggtaatcacaaacaaataatgtactgcagacaatcaaatgagaatgagaaaataaagcttagcaccacagaaaaccaccaaaccacagaggtaaatagcaagagaagaagaaagaaataaggaatctacaagataaggaaaaaataatgaacaaaatggcagaagtacttatctaacaataataaccttgaatgtaaatggattaaattttcccattaagagacagaatggctgaataggcaaaataaaataaaataagacccaactatatactacctaaaaaagattcacctcaaaaaaggcaggctgaaagcaaagggatagaaaaagatattccgtgcaaacaaaaacaaaaattgaacagaataagccatattgatatcagataaaagatattttaagtcaaaaactgttaaaagaggcagagaatgttattatatataatgagaaagggatcaattcaacaagaggatataacaattgtaaatatatatgcaaccaacacaaaagcactcaaatatatagagcaaccgttattagatctaaagggagagatagaacacaatacaaaatagtaggggattacacccactttcaacaagggtaagctaatgacaaaaaatcaacaaagaaacattggacttacactgcaccatagaccaaatggacctaacagacatttacagaacatttcatccaacagctttagaatacatattcttttcggttgcacatggaacgttctccaggatgaatcacatattaggccacaaaataaatctcaacaaatgtaagaagagatgatcagctatcttttcgggccattatggtctaaactagaaattaacaaaataaaattttggaaatgttacaaatagatggaagttaaacaacatccttttagataaccaatgggtcagtgagtaagttaaaagaaaattaaaattttcttgagacaaatgagaatgggacacatcttaccaaaacccatgggacacaataaaaccagtactaaaagggaaatttatagtaataattgtctacatcacaaaagaagatttctatgaaacaatccaacaatgcatctcaaaggcctaggatttgttattaatttaataataaactaaagccaaaattagcagaaggaaggaaataataaaactcagagcagaaataaacaaaattgatgctaagaacaaaaattcaaaagatcaacaaaatgaagaatttgtttttttgaaatgataaaggaaaatcaataaaccacaagctaggctaactaaaaaaaagaaagaagactcaaaaaaataaaatcaaggatgaagtaggagatattaaagctgataccaacttttttttgcaatacgtttgcagctagaacaccagtgtcatgaaaaccatccctaaagtcaaatgggaaagaaaagaaaaagactcccatcaacattgtcaaaattggayacattgattcaggcaagtccaccactactggccatttgatctacagatgtggtgggattgaccaaagaaccatcgaaaattttgaggaagaggctgttgagataagaaagagttacttcaagtatgcctgggtcttagataaactgaaagccraacctgaacatggtatcaccattgataccctgtggaaatttgagaccagcagttactacttgattattattgatagtctgggacacagatgctttgcgaaaaacgtgaatacagccacatttcaggctgactgtgaygtcctgattgttgctgctggtgctggtgaatttgaactggtgtctccaggaatgaacagacgtatgagcatgcatttctggtttacacactgggtgtgaaacagttattgttaacaaaatggmttccacttagccactctatagccagaaaaggtacaaagaatcattgagaaagctgaaacttaagaaaattggctacaatgccaacacrgtaacatctgtgccaatttctggttggaattgtgacaatatgctagagccatgtgctaacatgcattggttcaagggatggaaaatcacctgtaaagatggcaatgccagtggaactatgttgcttgaaactctgcaatgcatcctatcaccaactcatccaactgacaagcccttatttgtggtctgcctctccaggatttctacagaattggtgattttgatactgttactgtgttctgagtggtgactgggttacctttgctccagtcaatgttacaactgaagaaaagtctgttgaaatgcaccatgaggctttgagcgaaactcttctgggggacaaagggggcttcaatgtcaaggatgtgcacgtcaaagatgttcactgtgccaacattgctgatgacagcaaaaatgacccaccaatggaaacaaatggctttcctactcaggtgactattctgcaccaaacaggctaaatcagtgacggctatgtccctgtactggattgtcacacagttcacattgcttgccagtttgctgagctgaaggaaaagattgattgccagtctggtaaaaagctggaagatggccctaaatacttgaagtctggtgatgctaccattgtcgatatggttcctggcaagctcctgtgttgagagcttttctgactatcctctgagtcattttgctatttgttctatgagacagayagtcgctgtgggtgtcatcaaagcagtggacaggaaggctgctgatggtggaaaggtcaccagagttggtgaggaagaaataaaaggcatccaaactgggaagaaggtagtcaaattgtccctatttgtagatgttataatattttacataaagaaaactctaaagactccaccaaaaactagtcaaactgaaaaacaaattcactaaaattgcaggatacaaaatcaacatacacaaatcagtagcatgtccataggataatagtgaactcgctgaaaaagaatttttaaaactttcttttaccatagctacaaaaaaactagatacctaggaatatatttaaccaaggaggtgaaagatctctacaataaaactgtaaaactttgatgaaaaataaatggaagaggacacaaataaatggaaagacatattatattcatgaattggaagaattttttttaaatggtcatagtacccaaagtgatctgcagatttaatgcaattcctgtcaaaataactataatattcttcagagcagcggtcctcaatgtttttggcaccagggactggttcatggatgacagtttttccacagaccagccacagggttgggaggtggttttgagatgatccaagtgcattacatttattgtgcactttatattattagcactttatttatattattacattgtaatatatagttatatattatttcattatgtattacaatgtaataatacaactcactataatgttgagtcagtgggacccctaagcttgttttcctgcaactagatgataccatctaggggtgatgggaaacactgacagatcatcaggtgttagattcacatacagagtgctcaacctaggtcccttgcatgcgcagttcacaatagggtttgcactcctatgagaatctaatgcagatgctgatttgacaggagtctgagctcaggcggtaatgcgagtgatggggagcagctataaaatacagatgaagcttcactctcacctgctgctcacctcctgctacgcgacccagttcctaataggccacagacccatacgcctgtttgtggcctgggggttagggacccctgcttcagagaaatagaaaaaaaaaaaacaactataaaattctgtagaactacaaaataccctaaatagccaaagacatactgagcaaaaagaacaaagtggaagggatcacaccacctgacttcaaaatacactattatacaaagatatagtaaccaaaacaacatggcgctggcacagaaacagacacatagactaatagaatagaatggagagaccagaaatacattcaacacctacagccaactgatttttgacaaagatgccaaaaacacacattggggaaaaagtagtctcttcaataaatggtgctaggaaaattcaataatcacatgcaaaagaatgagactagaccctgactcatgttatgtacaaaaatcaactcaaaatgaattaaagatttaaatgtaaagtttgaaactatgaaacaactagaagaaatcacagagaaaatgctttatgatgttagggtgggcaaggactttttaaataagatctcaaaagcacagacaacgaaagcaaaaagagacaaatggagtttcattgaactaaaaagcttttgaagaggaaactattcacagagtaaagagataacctagcaaatgggagaaaatatatgtagactatacttctaacaaggagttaatatatagaatatataaaggaacacaaacaactcaatgggaaaaaaaaccccaaatacctcattttaaaaatgggcaaaagactttaatagacattctcaaaagaagacatacaaatggccattagttatatgaaaaaaatgctcaataccactaatcataaaggaaatgtaaatgaaaaccacaacgagatgttacttcattccaattagactggtggttatcagaaagacaaaagaaatcaagtgctggtaaggttgtggagaaatgggaacacttatatgctgttggtagcaatatatactagtacaaccattatggaaaacagtatggaggttccccaaaaatagtcaaaatagaattaacatgtgatctagcaattccactactggatgtatagccaaaggaaatggaatcagcacgtcaaaagagatatctgtactctcaacttctgtagcactatttataatagctaatatattgaatcgacctaagtgtccaacagtggatgaatggataaaaaatgtggcaaatatacaccgtagaatattattcagccataaaaagaataaaatcctgtcatttgtgacaacatggatgaacctggaggacaccgtgttaaccgaaataagccagacacagaatgataaataccacattatctcactcatttttagatgtggaatagtaaaaataatttttaaatataacaagaagataagaatctggtacataaatggattaacaagagtcatttaaaaaatctagcagtgtgaaatgttgcattccctgttgaaatctaaaaatgaggggttaatatatgttatattatgttatatatgtatgcagaaatacatatattctgttatatatgtacacagaagtacatatatattcatagtggaagcctgactttaaaaagaacttttcaagaatggatttgatcatctcttttaaagccatctagtttttgaaaacaaccagccggagctgactataactttgtttttatgctaaaattctgaactcctttaaacgagtctaaaataaggaaagaccagaaatcacagtacagcatattgtcaacaacctctctatagcgaccaaaggagttcagggcctgcaagtcactgtgttatagtgtacttgaaaagtcatctacaccacaggaacgcaaccaaataaataagtatttcaccgacaaaacccatagagaaagagtttaaagacttcccacagcaatccattgctgccactagccatgtgtattatcagtaaatgtaaatggtgtaaactagtggtgaatatgaacactgctgcttctgggttcttgaagcagtttgttctcgttaagctttgtgaagggactgaaggctttcacttgttttctgtgtgaatgagccgttagtgtgtgtgggaatgttttcacagcaccatgcctcttctgcccttttctataaactgagctacttcacgtgtctcctcatattagtgccatcactaaacaaagcaagcgctcatgaatgaaggctgatgtcagcaaattctgaatagcttctggaggggcatcctgcaccctaacactgatgccagctaaggggatgaagtcaccagggagatcacccactcttattctcctaagaactgagcagttccagcaatgaaaagcaatacaaagcaaacaaacaaatattcagattaaaatgcaatgtaatacagggcagtgccaacattactttacatatgactacacggtctttacactaaatatccagaagtactgtgaaaatcagttattttcttgagatatattataaactataatgagatgtttctatggtccctttattttagtttcagtgaaacatgaaaaacacataaaaataaaattttagaaacatggtagtacatttgaactcacttataaacttaataatgctgaacattaaaataaggacagaacatgatgatgaggaaaagtgatttacagtaaacatttccttgtaaaacagaactgtttctggtatccaatttaccctggttgcatgtaagtcttacgtgcttagcaagagattgaaagactttataatatttgaggttattgtgcataaaaccattgctggtcagaagtaaatcttactgtcttggcagtttgtcttcagagaataggcgacatgtctaaatagaattaaatctcagcaaccttcatgtagaactgtttgttgccgaaaaatataggattatatcatgacgtctggtgacttgccagagaacccttgaaaccctgctgagttcaaggctctgcacaacaggaatgtcatagtttctgcttagaacagtgtgtgtatttaaggagttttgctgttaatgcaggactaaggacccctcactcatgaactgagacagggactgttattgtcgaaagcactaaacacactttcctcattgcctcaccatttaaagatgagcagtttttgactcatgcctcaaagaaagaattattctagtcataaaagcctgctaaagttttcttttttaaagcttataaacagactgcgggcagattgaccatcatatctaataagctaactgttaacaagttagtacagtttagtatacacctgaatacttctattttctatatttttctcctccccccacactccctttcttttgaagtaattttatttcatgaccttatgtctacagaaaaagaattatattactgtcttggattactaaattgaattaatgttgacataaatagttttatttggatggaattttaaaattaattccatttgtaaataaccataagaaatacaatctcctttgtcatttcgatcacaaagtagcagagaaatctattccacacataaaatcacttagaagagagaacttgcaacttactacagtataagagattttcagtatctagtcaccttatgactcatattaatcatgtactgacaagtttccaaagagcttgaattaaaaaaaaaataagcccttgtatatagacatgttgaaggacttagataagtacaaaaaatctctgtgaaaaagttttcattgatgttttaaaaagcgtgttattttatctttacaaaggaactgcactaacactaatctagcttttggaaaatacagcaacattcatgactaatcgtagtgtgaaaagtagaaatggacatgaaaagtatcatcacctctagcaacacttgaaaccctaagagaggttcaaatgcaaactttcagattttcaacactgaaaaaccaaggactttatcttccctttcaaggagttgctttgtggggcgggggaaaccaaaacctcttttgtagtacaaactttgccaatatatctgattctttttctacctcctcttagaagagatataccccctttttaatagtttaaaaatactattgcagtgaaactcttggtacaaaggaaaattattctatttagtcgtattcttttaaaagttatttgtttaaaagggcttcactgtattggtcttgcagcccttcatacaacagaacaaaagcagttctatgaaagaagactaaacttgaacaaaccgtaaaaaaaaaaagcaaagttcctctctgtttttatcaaatttgattgctgcagctgttcccagtttctgtattttaaaaatagccttattcagtgccttgttggctaaaggccagagtgccattagaacatgctgtacggaaaacctctattcagttacagatacagaaatatatttaagatcagtgggggtcatctgcagcaaacacttgtaaaggaaaatcgaattttaatgtgtttggactgattgccacttttaccagatagtttaaagcttccatatagaaccatcctattattttttcttttaggtaaaaatgcaaaatgcgtatgaacttcattggacaaatattattagaaaggtctgtttctcaaataacaattgtacagctgagatacacatttcaaagaatacctactagtggtttctgtttgacaagctcacaggcattcatcgagtgaaaaggtaggtaatattgagcaaatgctacaaatggaatcataacttctttctgacacagtcctcctaagtaaggtcacgaggtgtgaaatagattgatctgcccaagggaaatgagtctggggactcattttggacttaaagtgtgtggggaaagggtgaaagaattgagttattcagtgatgtttcagagttgaccttcacatctcttcagttctttcctttgcctcagcaaaggattgaaattagcatttgggactaaacagattc

SEQ ID NO: 96240 - DNA, 13242 bp, Homo sapiens
tcctgtgccatcctttgcacagtgcccacgttgcctccatgaacagtatccatgtgatggcatgtggtgatgttgaccatttctagacaagacacacatgacctttctcagatacactgtacctgggcttggggtggttctcctgaactctcaagtaaccagccgctcctttggttttccagactccatcaagaatgctggaggaagggtgtttgtccactgccaggcaggcatttcccggtcagccaccatctgccttgcttaccttatgaggactaatcgagtcaagctggacgaggcctttgagtttgtgaagcagaggcgaagcatcatctctcccaacttcagcttcatgggccagctgctgcagtttgagtcccaggtgctggctccgcactgttcggcagaggctgggagccccgccatggctgtgctcgaccgaggcacctccaccaccaccgtgttcaacttccccgtctccatccctgtccactccacgaacagtgcgctgagctaccttcagagccccattacgacctctcccagctgctgaaaggccacgggaggtgaggctcttcacatcccattgggactccatgctccttgagaggagaaatgcaataactctgggaggggctcgagagggctggtccttatttatttaacttcacccgagttcctctgggtttctaagcagttatggtgatgacttagcgtcaagacatttgctgaactcagcacattcgggaccaatatatagtgggtacatcaagtccatctgacaaaatggggcagaagagaaaggactcagtgtgtgatccggtttctttttgctcgcccctgttttttgtagaatctcttcatgcttgacatacctaccagtattattcccgacgacacatatacatatgagaatataccttatttatttttgtgtaggtgtctgccttcacaaatgtcattgtctactcctagaagaaccaaatacctcaatttttgtttttgagtactgtactatcctgtaaatatatcttaagcaggtttgttttcagcactgatggaaaataccagtgttgggtttttttttagttgccaacagttgtatgtttgctgattatttatgacctgaaataatatatttcttcttctaagaagacattttgttacataaggatgacttttttatacaatggaataaattatggcatttctattgaaatttcaacgcttttatttctttggcaaccacacccaatccctctcccactagtgaactagggaagaatttcgacaagggcctgcagaatgtgttgagatctgatcccatgccctgtggtggcccgttggtcccatgaaatggctgggttgcaagggaggaagacaagtgagtatcatgaaacaccggacgctacagctgaactcttagtattggatcagtgtgtctacccatgcccattttagcggctctgtaacctaccatgtcacccaggatgccaaggtgtccccagagccaaagctaggaggaaatagccacttgtctggattgccttcttcatttaataccctcctcaggttaatataaaaagtcgccttcccatctctgagctgtgctggagttatgaggagacaaaagtttttccaaacacatgacataaggcaggtgtgtgctacctgcccctagagaaactcagcaaggccttttgcaaatgagatgctgagacccagcatggctaagtggcagaaataggagaattggaatctacatctgtttcagactttcacttgcccgtctcatggcttttttttttttttttttttagacggagtctcactctgtcacccaggctggagtgtactggtgtgagctcggctcactgcaacctccgcctgccaggttcaagccattctcctgcctcagcttcctaagtagctgggattacgggtgcgcgtcaccatgcccggctaatttttgtatttttagtagagatgggggtttcaccatgttggccaggctggtctcgaactcctgacctatctttttgcttttaaaaaggcttttgtttttgtgaaaatttaaatacattggcaaaaaagaaaaaaaaagaaaaaaaatccaagcactataagcaaataccatgtaaagaaatcacccgcaacagcccatccccaacctgaccattgctaacattgtggaggacattcacgctggcatttctgcatatagacatggcatttttggtagttgcctccttcatgtcacctgctgctctgatttcatagttttgttgagataagcaattaaacctgacttgttctaggataatattctgaatttgtactcctttgccaagcaggcaaaaaacagaagagatgtaattgctaccaatccataatccagtctataatgttgcgttaagaaacagcgaagctcttggattactggccccttagcgccccaccccactctttgtttctggacaaagtgctatgggaagcagaaaaggaaatatcccattcgccttatccatgagcaccctgtgctatggttctggtcctgtcctgttgttcaaggtctttacgcagaatcagtgtccttgactttgcccctgtggctcactgtctgccacttgactcccagggtctgaaagatccctgtgttctaagttctaagaacttaccctgggctggcaagctcatttcctcagctgggtttccgattacaagtatgttcatgcctatcaaaacaaatcgtacccagtgtttttatcaaagcctagaaatttactattgtaaatatctctctccgtggaaatgtaccagcgacatcgagtctgtgacagatgccatggctgacttccccgtgggctagggccttcgctttctgcttggcaggcactggctgaaccaaaattaatctccagtgtgatccacgcagtggaaaaatacagcggctgcctaagggagccgccagtgaaaacaagtcactcacttctcccggctcaagccactctgcctcatgccagccctgagagccaggaatgatgacccctgatccccatgtaccggagtcactgtgttcagaccctccagaaaaatctcatatttggcctcagactgctttccttgggaaaaaattaatacctcgtgatgaaagatacttaaagtctattaatgtgtttcccaggaagagattgaaataagacttttaatactgataatgtggcaatgatggttgccagttttagagtgagcactgtgtgccaggtactgctaaggttaagtaacctttgacagcaatacccattttacagaggacaaaactgaggctcacttgtgagaaagacatgggctgatgaatgtaaagtgcctggcacacagtgggccgtggagaaatgtttccatccccttgtctctgtcctaatggcttctggcagttcttctggctcggttttcccaccccgtaaaatgaccaatttgcactggatctgagtactgttcttcccatctctctaattctgggatgtagaaaatgcatcaatgcatacattatgcttttctgtggtttccaggcacccattatttcattataatacctctaacactccccctcccccacctccaccgcatcctctccttggaattttgcaaatcgtagctaatttgctttggacttgcagcctctggcgtccctttccctccctcccctggcccgtcagaggatgacatcattgtgtgtacacctttaagattatataaatctgtgatcctacagtggcctccatccccatggtaacgcggaggagtttcccttttgtgaggaaagctgtcatgtcacttcctgctgctgacaaatcagtttaggagattaaaataaaggggggcggggtgcctctgagaagtgctggctgccgtggtttctggttgccatacacagaggcaaacaatgccgctgcggcccctccccgcgcccgccgggtggatccaggtcaacccgggctgtttttctctgcaggttgctttctggagagcaggtgggagggctgctcacctcgtttccagagctctgcggggtgagcctgtttgagaacagcctgtaggtgcagaccagcagccctgctcccctctgcccaccgaggaggtgtcttccaccccgtggagaacaaagggtgtgctctctgctagcgccacagtggacaaaactgctctgccaaggaagataagctcatagccaccttttccttgaatgtggcttttaaagctaggcaggaggcccacgcattcattcactcattcgttcattcattcattcattcatgtgttcaacaaatattgataagtatagtctcaggggatactttggtgcaagacaaaattcctacttataagtagctaaaattacttttgctattttcgctaaacagcaaaagtaattttactttgtcacttgccgtctcatggcactatatatgggtgggttatagaaataagataatcacaaaataagataaggatgaaggctatgaaggcaggataaactaagacctgaatgatataacccagttgcccatttgagaggtgaactggaaagagggctccaaggccaggagagcagcaaagacctgatgtttgagaggtatgtttgtggaccagtggatacagcgtgtgaattggagttggctagacctgcgttcaagtcctgactctgccacctgttagtggtgtgtaagctatcaaactctttttttttttttttttttgagatggacgcttgctctgccgctaggctggagtgcagtggcgcaatctcagctcactgcaacctccgactccctggttcaagcgattctcctgactcagcctcctgagtagctgggattacaggcacgcaccaccacgcccagctaatttttgtatttttagtagagacagggtttcaccaggttggccaggatggtctcgatctcctgaccttgtgatccacccgcctgggcctcctaaagtactaggattacaggcatgagccacggcgcccggcctgctatcaaactctttaacctctgttttcccaatctgtaatacggcccagtaatattctcttgtgactcagctgctccctattctgtccctcaagcatgagcgcccctccggagtggctctggagcgctccggaggggcgctcgtgcttgagcgcccacaaaagtgggctgcctcaccaaagtgacaccctgggcgcgcatcagacaacgctttactctaggccatcagagctttggagcagtggcctctgttctaagcccatctagccctgctccactaacctggggcaagctgcttcccctttcggggcctcgtaccctcatgtgtaagaagaacctgcggtgaacctcatctattctcctctcccacccatctgccagtgctaagtcccttccatacccaaacttgggagggtcctggaatccccagggttcctgaaggctggttcagggagacaaagtgggaaggaaatagacactttctgggaagaggcagtgagggatcctggaccttcagaaggtcggttggtgttatggagatgtgactggttcttgcagggatgggttcccctacaagggcctgtgggggcactgcatacttctgacccctgggccctccttccctcccagcctgcacagccctctgcagtggagcacactgcaaagatgggatttaaaagtttcaccaagattgacaccaatcattcactcatccaataaacatattttaagtacccatggtttgtaaaacactcagtagatgtgaaaatcataccaccaaaggaaattttgagattctgttccaaatacctgggacaaaactgataggtccaactagttagtgtctgtatgactttgagtggattatttctcctctcaaaccctcagttttgacatctctaaaaagggagttggaccctcgtgtggggtggggcggaggagtggcgagcacccccgccccgctctgctggcctctgcgcgcaaagcagcctctccttccgccggggccgccgggcctcatggaagccccggagggcggcggaggggggcctgcagcgcggggccccgaggggcaaccggcgcccgaagccagggtgcacttccgagtggcgaggttcatcatggaggcaggtgtcaagctagggatgaggtccattcccattgccactgcttgcaccatttaccataagttcttttgcaataccaacctggacgcttatgacccttacctgattgccgtgtcttccatttacttggccggcaaagcggaaaagcagcacctgcggactcatgacatcatcaatgtgtccaacaggtactttaacccgagcggtgagcccctggaattggaatcccgcttctgggagctccgggacagcattgtgcagtgtgagcttctcatgctgagagttctgcgcttccaggtctccttccagcttccacacaagtacctgctccactacctggtttccctcraaaactctctgaaccgccacagctggcagcggaccccggttgccgtcactgcctgggccctgttgcgggacagctaccacgggggtctgtgcctccgtttccaggcccagcacatcgcggtggcggtgctctacctggccctgcaggtctacggagttgaggtgcccgccgaggttaaggctgagaagccgtggtggcaggtgtttggtgaagaccttaccaagccaatcattgataatattgtgtctgatctcattcagatttataccatggacacagagatcccctaaggtcctggcccaggcctgtccaaagagaagcccaggatggtcggctgcctggggacattgccaccacgtcgccatgacggctggtcctcagaggaccagctgggaggactggttgtgctgctggagaagggctggagaaggcgatggcatgctgccgctttgacagtccctagcagtcgcggtgcaggtgatgggagccgcgcctccagcggscaggtcgggagtgcactgcgtgcagctgatccaaggcagccatatctgcttttgtcctttgagaggactctgactacaatagaggcctgacatcaatgaaaggaaaatcatgaaatcgatgagactgaatccctagggattttttaaaagccagatctatagcgagaatgaatgtgcaacatggctgaaatctattttgtgtaataaaaggtgatgcaagtcaaaaaaataaaataaaataaaataaataaaaagggagttaaagtatttacttcatggccaggtgcggtggctcacacctgttaatcccagtacttggggaggctgaggcaggcagatcacctgagttcaggagatcgagaccagcccgaccaacatggtgaaaccctgtctccaccaaaaatacaaaattagccaggcatggtggcgcatgcctgtaatcccagctacttgggaggctgaggcaggagaatcacttaaacctgggaggcggaggttgcagtgagccgagattgcgccattacactccagcctcggcaacaagagtgaaactccatctccagaaaaaaaaaaaaaaaaaagtatttgcttcacttcacatggtagctgtcaagatgaaatgaaatagtatatataaaatgttttgcacagtgcctgacacatagtaaagaataaatgttagctattttaaccatcattgtcattatcttcatcattataagggaaatatgaaaaaaggaaacaaactcatatctctagcctagacctctcccctaactgcagacttgaatagccagtagcttccttgacatttccatttgtttgtcaaatagactctcaaatttggcaattccaaaaacaaacctttgcgtcacccaaaaccagctccttctgtagtcttcccacctttgttaatagcaacttcattcttccattagttcaggtcaaaaactttggagacacccttgactcctccctttccctcataacctatatttaattcaatggcaaattgagacaggtccactttcaaacacatccatttcccaaatatatcacttctcatcatttccaaaactacttctctgagctaggcatggtgactcatgcctgtaaccctagcactttaggaggccgtggcaggaggatcacttgatgccaggagtttgagaccaaacctacctctccggttcagccaccatcatatattgcctaaagtgttgcagcctccaagctggcttccttgcctcagcacagcccctctatgtctattttcaaccagcaggcaaagctatccttttagtgttgcatttagggcattagcttctgagaacaaattctagtttctaattccctacaaatgtttttatcttcattattgaagattttttttttttttttttttagatggagtctctctgtcacccaggctggagtgcagtggtgtgatcttggctcactgcaacctccatccccctggattcaagcgattctcctgcctcaggctcctgattagctgggattacaggtgtctgccacactgcccggctaatttttgtatttttagtggagacaggggttcaccatgttggccagggtggtctcgaactcctgacctcaggtgatccacctgccttggcctcccaaagtgttgggattacaggcgtgagccactgtgcccggcctcattattgaagaatttttcctgggtaaagaattcaagttttgaccttatttaatcactttgaagatacaatccattgtcttctgacttgttacgtctgctgagaagtcagctaactgccttgttgtccctctgagggtgatctgtcttttttctctgctttaggaatttctctttgtttttgacttttagcagttttatttataatatgcctatagttttttttttcctgtttatattgcttgtgattcatggggtttttgaatctgtggtttgatgcctttcatttgccttggataattctcagttattatttctcctttcatttgccttggataaatctcagttattatttctccatttatatactttagcatattaaacagaattaatgtgtgtaaccaataactatctggatccttgtgtttatttctgttgcctattttttctcttgatttttgattatgtttcattttctcatatttttggttgtcaggcattgtatatgaaaaattttagagatcatttgaagcttaagataatgttattttccatttgtaggaggtgtctaggggtgttaggaaccccacatcaccttaatccaagcagagattgagatgagttgagatgacttgaagctgggctttagatcctgttatgactggttcattcttagtccattggtgtatccctttggagtttcaactaaaagcttggtgaatctaccagaccctccagcctggatttttttttttttttgggtaatactcccaaaagtatgggggtgtgccaggatctcccttggtgtgccctgagctttaactttcatcccattagatccatgagtcttttaaaagttccactcaacttctcagcctttgatccttttatttcagaattggcagataccctttggggaaaagaggtcccaagggctgtgttcatccctctgaccgaccttccttccttccttccttccctttcctccctctcttccctccctccctccctcctttctttctctctctctctttctctctttctttcttctttctttctttcatcttgaggcacagtttcactcttgttgcccaggctagagtgcaatggtgcgatctcggctcactgcaacctccacctcccgggtgcaagccattctcctgcttcagcctcccgagtagctaggactacaggcatgcaccactgcgcccggctaattttgtatttttagtacagacagggtttctccatgttagtcaggctggtttcgaactcctgaactcaggagatccacccgcctcggcctcccaatgtgctgggattacaggtatgagctactgggcccagctcatccctctgacttttcttttcccaggtcttggtcccaaagttcctcactgccttttagtgtcataatgcctttaaacgaaaatatgttaatattttgtccaacttaccttgtcctcaccagtagaattgttctgaattccgtgctctgccatgactagaagggagtcgggcttttaaaaatccagagggaaacttttagcatatcagataatttttctcctctattcaaaccctctcatggctcccatctcactcaggctaaaagacacatcctaacaaaggctacaagacctgatactatcttgctgcacatctctgaccgcatctttgccactctcctccctcattcgtctcttctagccagcctggcctcattgctttatctagcgctggcaacgttcactcctgcactgggccccatgctcttctttctgcctggaccttggccatcctgcccttagaacagtgcttggcgtgcaggggagtgctcaatgaatgtgatggataagtgaaagatctttgcaggctgcggacaattcccttccctcctgggtgggtcctgggtccaagctaggcggaagtgattctttgctgctcgaccagcctctttcccttcctcatgaagcagtttcccttggagaccttcccataacacacagtggtgtgcagatgaaataaagtgtgtgaaagcgctttgtaagcaggaagccacacgagggtcctggctattcaagaccggggccatcctggggctcagcttctggggtcagggctttgggtctagaaagataatgggaaaatctacttcggggactccactctgagccctgtcctcctaccacttcccccatatttcctccctcccgtccgaaggagaattccccatggcgtgtgcctccaacgaagagaagagggcagtgagtgattcatggggaaatctgtagggctgcttggggcttatgactcacagcttctcctccaataggaagattcaacatctatgctgagtctcctggaaatctctttcgtcaaggcctctagtgaccgctggggattcttctcgggactcccgcagagctctcaacagccaccttcctggcacttgtcactgcgtagttgtgtgtctcctgcccaataaatacatacggaaaggaagaaggaagacaggcaaggatggagggaggcaggggagagggtcttggcctccctcacctgactgtgagccacctgagggcaagattgtgcctttttcatttctgtgtccccagcccccactgcagggctaggcacattgttgaggaagtgaatgattgaatacatgaaggaacactttgtgggcgagggacctccttctaggatatgaccagcctggaagagcctcaaggcagtggcagcgtttggggtcctgctgtgggtgttgctagggaggctttggaagacagttctggtggagacacatgctctagctcccgcccacagttcagtcagggaaccaaccatactgagctattagtagtgccgggccctgcatgggacgctgggtgcacagggatgggagagacacggtttctgacctcaggctctcctggcaagtggtggagactgatgcattggcccatgattttgccacagtgatctgggggctgtaggtgaggtgcgggcagagcaagggggtggagaaatgcagggaagagtgggcagaggagagaacaatacaggaaggcttcctggaagaggtgacccttgagccctagaaggctgagcacgtggcacaggaaggactcccatctcaagtgtcgagggatgacctgatgccaatttattgctgttccatagattttataagaggaataaaggcctcaggacttgttccaggcccaaccttcttccctagaactgaattcccaagagccctcatgagggtccctgcccttatgctgctattttacgcaaaaaggatcagagccccgtgtcccctgcggtgggtgtttcagagtgtgggcaccgggctgctctgaagccaaggaaatgaccagccgggaagaaggactggaaagcactagcctgtccgctggccccagcttccctcaatgtcatcatcggatgagcagtttaggctgttctcccttcaccatgagccagaggaagggtctgttgtaggtttcactggccactctccttcgtcatgtcctcatcatcatcaatgacttaagactttctgagccatagccaaagacttcaggcagcagctttgtgttctagccccaagtgtagcatttccttgctgtgtgactctcagcaagttacatcacctctctgggcttcagattcctacttatctgctttattttttgagacaggtctcacccagtatttgctttacatatgtgactgatttagtacatccatctagcctgcttggtgggcttattattattgccacgtttagcaaaccattgatagagtttggatgttttgtcccctccaaatctcaccttgaaatgtgacctccagtattggaggtggggactagtgggaggtgtttgggccatgggggtgggttcgtccctcatgaatggcttggtgctgtcctcggggtaatgagtgagttcttttttttttttttgagacagagtctcgctctgtcacccaggctggacagtgcaatggcttgatctcggctcactgcaaactccgcctactgggttcaagtgattctcctgccccagcctcctgagtagctgggattacaggcacccaccaccacatcgggctaatttttgtatttttagtagagacagggtttcaccatgttggccaagctggtcttgaactcctaacctcaagtgatccgcctgcctcggcctcccaaagtgctgggattacaggcatgagccactgtgcccagccaagtgagttctgactacgagttcacgtgtgatctggctgtttatttatttatttatatattttttaagatggagtctcactctattgcccaggctggagtgcagtggcatgatctcggctcactgcaatctctgcctcctgggttctagcaattctcctgcctcagcctctccagtagctgggattataggcaactgccaccatgccaggctaatttttgtatatttagtaccgacgggatttcaccatgttggccaggctggtcttgaactcctgaccccaa

SEQ ID NO: 96241 - DNA, 13087 bp, Homo sapiens
cacaatctatgccataaacatatccattccttccaaaagtttccttctgccctcttaattattttttccccacagggtctctctttgtcacccaggctagagagcagcggtgccatcacagctcactacagcctctatctcctgagctcaaaggatccttccacctcagcctcccaagtagctgggcccacaggcacacaccaccaggcccagctaattttttgtactttttgtagacacgagtttcaccatgttgtacagactggtctcgaactcgtgagctcaggcgatctgcccaactcagcttcacaaagtgctggaattacaggcatgagccaccacgcctggaccctctttataacttttgtgtgtgataagaatactcaatctaagatctaccctcttacacttttaaatatgcaacacaatgttatttatcacgggtactatgctgttcagtagctcgctgggacttatttgtgccgtataacagaaactataccctttgactaacacttccttgttttcccctcccccagccctggtaactatcattcaactctctccttctataagtttgactgttttagattcctcacataagtggtgtcatgcactatttgtccttctgtgtctggcttatttcccttaatataatgtcctctagttttacccatgttgtcacaaataacaagatattctttattttttcaggatgagtaatatttcattgtatgtacatactatattttctttattcattcataatggacagttagattgcttgcatatcttggctatcataaaataatgctgcaatatatacaggagtacaaatatctcttgatttcaattcctttaggtatatacccagaaatgggattgctggattatatggcagttctatttttaatttttgtggaacctccatattgttttccacaaggttgtaccagtttgcattcacaccaatagtatacaagagttcccttttctccacattcctgccaacacttttctgttgtacttttttataataatcattcttacaggtatgaggtgatagctcatgtgatttgatttgcatttccctgatgattagtgatgttgagcacttatttatatacctgttggccatttgtatagcttctttagggaaatgtctatacaatccctttgcacattttctaatcaagttacttggggtttccattctatggagttgtgggattcaattttggatactatcccttatcagatatgtggcttgcaaatattttcttttattctgtaaattggctttacatttttgttgattgtttcctttgctgtgcaatagccactttgtttcatgtaatcccacttttctatttttagacaagtttttgttacctgtctttgtttcaatccctttggaatcatatctaagaaattcttgccaagcccaatgtcaaaaagcttttttcctattttcttctatgagtttcatagtttcaggtctcaagtttaaatctttaatggattttgagttgatttttgcatatggggtaaggttagagtccaatttcattttttacatgcgaatatccagttttcccaatgccatttattggagagactatcctttccccattatgtattttagtacctttgtagaagatcagttgactatatatgaaggggtttatttctgggctctctattctgttccattagtctacatatttgtttttatgcccctaccatactgcctcaattactgaagtattttaaatacatttggaaaccaaaaattgtgatgcctccacctttatatttcttttttaagattggttttggttattcagggtcttttttgattccaatatgaattttaggattgtttcttctgtttctgtgaaaacaaaacaaaaatgccattgggattttagtagggattacattgaatctatagatcaccttgggtagtatggatatattaacatgggatgtgtttctgtttatttgtaacttttaaagtttatttcatcagtggtttacagttttggtgtgccagtttttcacttccttggttaaatttattcctaagcattatatattttttaatgctagtgtaaatgaaaatgttttcttgatttctttctggatagtacatagttaatgaatagaaatgcaacacatttttacatagtaattttgtatcttgcaactttactgaatttaatagttctagtagttgtttttgttgttgttgttgttgttgttgttttgaggactctcgctctgttgcccaggctgaagtgcagtggcgcaatctcagctcactgcaacctctgcctcccaggttcaagcaattctcgtgcctcagcctcctgagtagctggaattacaggcgtgcactaccacgtctggctaatttttgtgtttttagtagagacgaggtttcaacacattggccaggctggcctcgaactcctgacctcaggtgatgcacctgcctcagcctcccaaagtgctgtgattacaggcatgagccaccacacccggccttgtggtagtttgttaacaaaatcttcaggagtttctacatgtaagattgtgccatcagtgaatagagataattttgcttctgcctttttaatttaattgccttttattttcatttcttgactaattgctttggctaggatttccagtaccatcttgaacagaagtggtgagagtgggcatccttgccttttcccagatcttagaaaaaaatcttttcagtttattttatatgatattagctgtaagcttttcatatatggactttaatgtgttaagttccttttatacttaatttactgagagttatcatgaaagggagttaaattttgtcacatgctttttctatatttttgagataatcatgtgatttttatctccattctgttaatgtggtgtatcacattgattgatttctgtatgttgagccatccttgcatgccagggacacatattatttggtcatggaatatgatccttttaaagtgctataaatttgatttgctattattttgttggggaattttgcatctatgttcatcaggaatattggcctaaagttttgttttcttgtggtgcctttgtccagctttggtatccagatgatgttgaccttataaaataaaactggaagtgttccctcttctattttttagaagcatttcagaaggattggtattaattcttctttaaatctttggtagaattcacctgtgaagtcatttggtcctgggcttttcttcgttgggcagtttttgattactgattaagtctccaaacagggtctcactatgttacccaggctggtctcaaactcctagccccaagtgatcctcccaccttggcctctcaaagcattgggattacaggtacaaatcactgcacacagcctctcagtctcctttttgttattggtctgtttaacctttctagttcttcttggttcagtcttgatgggttatatggttcttgaaatttcccttttttttctagattgtccaattttatggtgtatgattgctctatgtgtttttcatttttgtgagatctgttgtaatgtctccactttcatttctgattttatttgactcctctctcttttttcttactctaagtatttgtcaattttatttaacttttcaaaaaaacaagtcttagtttcctcaatttcttctaatttttttcttttctattttagttatttctgtgctaatctgtattatttcctcccttctgctaactttgggcttattctccactctttttataaatcactaacatctaatacagttaccattatcagtctgatataattagacatccaatcctaggtttaatgttagcatttctgtatgctcaggaaattattctaaactgatatcctggtattatttcagattttctcaacaactaattttaccttctactgaaatgctctccatcttgattgtaaatatagttagtataattaattgcttttcttcttaagagactaacctttatatgacaattactgacattggattaagttccacctaggataggataggcagggggtggatgtcatcttaccttaaaaatctgtttcacatgaatataactgcaccgaatatctaatttttcaagtaacctctgagttttttctaggttaatttttccacctctgaagtcatcctgaatctttgacaaaaaccatgtagaagcacaaaaaagttaaggaaattctcacagaaagtcattgaatatttaaaattcctaaagaaacatttgatttactgtattatttttatttttaaagaatatgtttaaagtaaattatagtataattgtatgataaatattttttaaaaaacaaaattaagtagttactatgctatggtaaaggtatgaaagggcatagcacagtaaaaatacaaaaaaaagaattaaagttaaaatttgagaattgaagtcattacttagaacatacattaaaacattataacaatctattgcctgaaggcatgaagttggaaggcagctagacttcaagatcgcctctcacctgacctctctgttttagttctctcttccagaaaggtgagcaaattaaccctgaatcttaaggaaagtggaagcattagatgaattcctaatatgccaccgaacacagtttctgctacttagtgttcaataaatagtaaccatgactgataaagttattattactacattagtccaatgcccagctacacacacactcaagacagtaccatcaaaaagcatcagaaataccatggtgagtgtatatttggtatgaaaaacgaaaaaaatttttaaaagcttacttatcatagataaactacaaaaactaggacacttccatttgaaaaactaagatcgaaatgagataatgacaattatcactaaaattataaaaggtataggtaaaaattgtgcaaaactactaagtttcagattgttagaacgaattaatgagatctccttaaatttaatagttatgacttaatccagcaaagctcatgttcttgtaagaaaaagataccagaatgcagggaaagttagaaaagctcagaacaaacagggaaaagcagttcaacttaaatgaagaggacttaaattcagaactcctcgaaaagaataacagcatcaagtaaagaggataagtaggagaaagaagaagaggagcagaaagaagctctcaatggatatctcatttccatagtttcatgacctgtagagccgtttctcctcacttagaagtctttccccagtaggtgctgtcatgggttccaaatacaattaactctgcccctttgcagaaaataatttcttgatactcatcagctgttaccacttttctagggagaaagcagagaacacacagtggtttttttgccttcgttctttgaagctagctcacacttaaccatagaaacagtatgcaagatgtggtacctgcactaccctgcccttgaaactgtttggcttcttacgttctgaccacctccaaacccacaatatttgaaaacacagctttccctgatgtctggcatttttccatgaactgccattgtatctccttttattttttactactttgtttaaacccctcaaacctttcatcataatatgcttccagtgggtttgggcagctactctgagagcctgagtataaatcaacaccattgtgattcctgaagttgcaaagtgctgtcactcttgaaactttgggctgcttctctagatcgttgacaacatataatgcacacagagacacaccactttcgaagaagactgttcaggaggctaagttcttaaaatcttcaaaagaggtatagctggttggctgggcaccacactgtcaggtgactgtcattttttccttttggtctgaattcccattgtgatatcatcagaggttccacacttcacaaggaaagcttcttatgacctcatcaggaggctcagaccttgccagactgcctgctttcayggatagacataaaaaccttcagcttgaatgttaacaccttgatgggaaaggtggctcatggaatgttttcttatcctttgaacactcctcatttcagaagctttgcttctgttgcaaccaaacatgacacttagcgtgctgagcaggaaggacaaggaaagagtaattcgcagactgttattacaggcccctccaggggaatttgtaaatgcctttgatgatctctgtctgcttatccgtgatgaaaaacttatgcaccaccaaggtgagtgtgcaggccaccaacactgccaaaaatattctgtaccactctgcatcgatggaaatccagtactcttgtctcaccacaatgtaatgggcgactaccgattttttgaccatcaaagcaaactttctttcaaatatgacctgcttcaaaatcagctgaaagacatccaaagtcatggtatcattcagaatgaggcagaatacctgagagttgttcttctgtgcgccttaaaactgtatgtgaatgaccactatccaaaaggaaattgcaacatgctgagaaaaactgtcaaaagtaaggagtacttgatagcttgcattgaagatcacaactatgaaacaggagagtgctggaamggactttggaaatctaaatggattttccaagttaacccatttctaacccaagtaacgggaagartatttgtgcaagctcacttcttcaggtgtgtcaaccttcatattgaaatatccaaggacctgaaagaaagcttggaaatagttaaccaagctcaactggctctaagttttgcaaggcttgtggaagagcaagagaacaaatttcaagctgcagtcttggaagaattacaggagttatccaatgaagccctgagaaaaattctaygaagggaycttccagtgacccgcactcttattgactggcacaggatactctctgacttgaatctggtgatgtatcctaaattaggatatgtcatttattcaagaagtgtgttgtgcaactggataatataaagaattgctcctggtaactatcttgatttgacttgtttgtgtttcttgggaatggttattttcctaaaattgagcaatctgtagagatgtctctcacttagccaatgcaaatttaaatgggaaaagtgtagcaagtaattttacttggggaatatttatgaacaaggcaagaaagtgtaaagtaactgtgtttcatggtggtgaccatcataaagaccaagacatttgttagaaactaaaatagttttatagaatctgggattccagaaatagtatagaggtggccagggttaaggctgtgtgtgggtgtgtacgtgtgtgtgtgtgtgtgtgtgtgtgtgtgtgagagagagagagagagagagagagagacttttgactgtttcgaactgaaaaggtatacaaatgaatatcactccacaaatgatattttacataactcaattcagtcctagaccatccacgagatggggaatttcaataaaagacattaggtttggattttccacaaaaccaacagatatcaaaaatctagctcagatgaaggactattagtaattttggctcctcttccactctactttcttcccctcaagaattggggttactcaaaatccctggcttgtctgataactaacatggtcttccaagccaaccagagaagcctgacttcccaaacttttacagccaggcttttgtgaagtcgtcactgtaaacacttagaagtacttattacataacatggcttgtgctaaatattttgcataacatttttcatcactaatctggtactagtattatctccgttgtacctaagaaaaacctaagttctcaagttgttcacatcttccagacacatagtgtcacagttcacttgtgctgctataacaaaataccatatattgagtaactcacaaataacaggaatttattggtcgcagttatggaggctgtgaagtccaagaccaagttgctagcagatttagtgcctagtaaaggtgtgtttcctcatagataggactttctgactgtgaccttacatggtaaaaggggcaaagcagctctgtagaacttctattaatggcactaatatcgtttatgagggctccactctcatggccaatcacctcccaaagtcctcacctcctaataccatcacctcggggactcagtttcaacatataaattttgagggacacaaacaatcagaccgtaccacatagtgacaagtgtatctgacttagtgctcatgcttcagggtacaacagttccccatggaagcctatttcattatgagttatggactctgatgtacattgattttgccaagcattccaccttaaaggatatcccagaagaaatggaacttgtgacagctgttttctagccagagtaaatcacctatacactcaccctaccactattcctagcaatgttactgaccactggtatctgctctttcaataaattcccaaatgtaaaactctttaacaagattacagtacagcagtaggtaggccccatcctccaattctgatttatctaagaagcaaagtgttttgtattttgtgtttatgcaattgaaaaacagttctaattctacttattaacattggagcattcagatcccgtgcaagaatttctaaacctcaaacctccccagctgatgattcttagagaatctcaggagaataacctgggatttatctttaaaaatatacattactggggcccatcctaggattctgatttagtaggctgggaaatctgcattttagcaagtatcagaggttacactgatgcaaaatatttcagggccacattttaagaaatgttccctaatcttaaaatagcatgtcctgtgctttctctttacttaattaaaatcatttcccacaaaaccatagcccagtgaaggccattgctaccactttactgcatttactatgcacagaccaaggacgggccttgccatgtaaaaaaggtaaaaacaaactttctaaagaaaagcagaaaagaaagttgctctcatagcactaaaatacagccatccagtgaagccttaagcaaaaatttgaattgatattatggttatatgtgtaagggttgattttccagatcattgcagattaggacccagtggtttgtgggataattacagaggcatttagctcctgctttaacatagggtttttttaagtaatatttgttgataattctgaatataaaagtcacatgtacaaatcgtggaaaatgcttaaagcataaagcattgtggcccattttcttctgtctaattttatagaactgctttaaatatgaagaatagacaaaatataaaaatttgtatcttgttcttttttataacacatatatcataaacattgccccatgtcattaaaaactccttgagcacataattttaattatttacacaatattcatactgtagatgtccataacaagacaaatcatttctctattcatatataatttaaatttttagcattttatctctgttattaatgatgctatgatgaacatttgtttgtccacatcataggttattttccttgagataaattccttaaaactgcatattaaaaagacatgaacatattaatagttaatatatattgccaaaatgctttccataaagattttgacaaatttatcatcccattagtagcattaagagagtatctagctcagcacagtaatcttgaccatataatatcaaatttttttgataagcaacaaggaaatcttagacaatacaaaacaggaaaaaaaagttatttcatgaacttatacttcattacgtcaagagtagtcccacaaagatatttaatttggtagttattttccttatatggaaattggcaggtccagggaaatgcagttactacctgttccccgtacctctctctctctctctctttctgtcctctcttcctctctttttctctgacctcgctctctctcttttctctctctctcacacacacacacacacacacacacacacacttagacctgcactcaagacacatacatacacacatgcctacgcacatgcacacataaaaaatatttcagattgaggagtcactgcattctttccctcaaatcccactcccaacagaaatataagctccatgagaatgatgatcttgtcaatctcaagtacctaatccgttattgtctgtcatatggtaagtactcaaatgaatgagtgaatgaacaaatcaataaggatcacaaagataggaagcacagtaggtttaactggccttaaggttttgtaacccaccaacacccgctgtcccttaggaggcatgcatcccaccgcagattcccagtgctgacgttgttaccccttactccaaggcagttcattccattcagaaactgccattggtcttctgctgtgatgaaaacctttgcttttttctgactccaaatggtaggagatttttcctctatcaaatgtaagaaaatcaagttcttcaaaagtcatacatttcttttcattttacattgattacattttacatgattctctgtcaaagattttctatccttggaggctggttcagagagctaaaggaatgaccgtatcatgttctactcaagcagaggtccatgaggagacttacatctttcaacatgcctgcatgttacggtatgtccctgctgctctggaacatgccctggcttcatgagtgccttgtgattaaagcatgcttcatcgtttccactttctttgcacttttatcactttatacaacacctaactactcccttctatgtatcatgcatttctgggaataatcaactggagctcctattcaactctttggatgttcaaaagcttataaaggccctctccatagtagattaaattttagtgagtcaatatgaaaagtgattttggttcactgccactcagccaatttttggccatgttactgatttatctcaccttcttctcaatcttctcatcatgacgtaccttagattctggcccctttacttggataactgaagcagctccctagggtttgctactattcttagaaaatgggttaccagtctaccttttcctaaattctcatgaaatctatcttgactctacttcagtcacttgtctttcactcctgatgagcaatctatttattcttttctactaacgtctgtagtcttttttatgatatgctttcaaatttctctactttactaagctccacttcttcatcactgcttcacatagcaaacgactttgttccttcaccgagaagacacattctttcgaaagagctactgctgcttttctctgcatttaaaaatatgtttatgctcttctccttccaaatagtcaccaaagaagtatatgttcctttctaagactaacttttcctcctgtgcattgaatcctaaattcttgatcttttcccatctaggctctttatccatcagggcgtttgttttgtttgttttgttttgttttgttttgttttgtttgtttttgagacagtatctcactctgttacccaggctggagtacagtggcacaatcacagctcactgcaacctccatctcccaggctcaagagatcctcctacctcggcctcccaagcagctaggactacaggcatgcaccatcacacctagcttttttaatattttgtagagatggagttttaccatgttgtctacgctggtctcaaactcctgtggggtcagtggtgataccccctttatcatttcttaggtaacgtggcctaactgacacagctggtaagtggcaaaactggaattccaactcaggcctgtcacacttcaaaattcatgccctctacaccttgccatgctgccttaactctaccccctggcttctattccatcagcataactaacacccattctcaaaagtttcaatatcaattattcattccaattacctttcctcagttatcacagggacttggttttatcttgaaaaccttacttcctcagttgtgcctgcatcttagtttatctcttctctactttctttcatatctcctcatccactatttcttccatatctcctcatccacccctcagccaaacacaggcttcttccaactttagttctttgtcctctcattttttcagctttacttaggtataattgagatacaaaaattgcacacatttatgcatatatcttgatgaatttggacatatgcatacacccatgataccatcacagccaaggtactaagcatatccaacacctcaaaacatttccttatgttcatttgtgaggtttttttgtaaaaacatttgacatgagatctatcttaacatatttttaaagcacacaatgaggtattgttaaccatgtgtactatgttgtacagcagacatctagaacttattcatcttgcataacagaaactttatatccactgaagaacaatgttccatttcccctatccccagttcctgacaatgattacacatttccaatattgcctaccagtccaagccatactatgtcaaaaatcaacattcccagatccaaatcgcttctttctttcctgtcccctagccccacttcaaacaaattactctctcttattttccgctcttggaagcactatcttaccattaactcaaggtcaagattttaagcattcttaacttgttttccaaagggaacacacaaagggaatgtaaattagtccatccgttgtggaaagtagtttggtgatttctcaaagaacttaaaacagaagtaccattcaacccctcaatcccattattgggtatatactcaaacgaatataaattgttctaccttaaagacacatgcacacatatgttcattgcagcactattcacaatagcaaagtcatagaatcaacctaaatgcccatcagcagtagactggataaagaaaatgtggtacatatacaccatatacagccataaaaaagaacaagattatgtcctttgcagcaacatggatg

SEQ ID NO: 96242 - DNA, 20316 bp, Homo sapiens
tagacatgagctaccatgccagtctacagtgtttttaatgcccagacttgggagaaacttaaacctcttgcactcatatccttctggccagaacccaatcacttggccacacctgactaagcatgagacatttggagcaacatgtggatattggtaatttctgccactcacaggcatttcacttcagaagaaacataggttaaaaagatgaaaagatgctcagattatttaatactgagaaatgaaaattgagaccataggagataccactttttatccatccatcacattagctaaaataatctagcattatcaaatgttgggagaggatcagtaagaactcacacactggtggtcaggagtataaacataacaacattggctgagtgcagtggctcatgcctgtaatcccaatactttgggaggccaaggcaggaggatcacttgaggccaggagttcaaggtggcagttgagccatgatcatgccattgcactctagcctagaagacagaaaggttaaaagaaaaaaaatttttgaaaacaatttaacattattttataaaattgaatagtgctatggtttggatacgtgtccccacctaaatctcatgttgaaatgtaattcccagtgctggaggtggggtctggtagaaggtgattggatcatggtgttggagtcttgatgaatggtttagcatcatcccctcttagtactgtatagtgagagttctcacgagatctttgttgtttaaaaatgtgtggcacctcccccttctctctcttgctcctgcttctgccaccttgccccccgccctttgccttctgccatgattagaagctctctggggactccccaaaagcaggagctactatgctttctatacaacctgcaggaccatgagccaattaaatctctttataagttacacagtctcaggttttctttatagcaatgagcgaatagactaatacaaatagttctgtagtcataactgtgcaattcgctcaaagtatataacctagagaagctattacaaaacagactaaggagacatgtacaagaatatacaaaacatatgcaaggatcataatagggaaagagggagaagagagggaggagggaaggaaagacaggaccaacccaaatgcttttaatagaagaaggaataaactatcatgatcttacagtggaatattatcaaaaattaattatatgcaataatatgggggaatgatacaatgttgagctctcctgcaatctggtgaatgcagtttcaatttctaattggttaatgctaggatatggaaaaactattgactttgtatacttaccttgtatctagacaccttaccaaattgtattctattaattttttaaggtttaaagaaatataatctgcaaacagctatatttttgcctcttttccaatttttatgtaatttttaaaatttatttggttctttttgggttatttccttagcttgaatttccaaaaataatgttaaataatagagctaatagcaatcattctttctcattcccaactcttaaaatagaggatttcactatagtttactgttttctggttatggtaatgtttaagcagtgtcttgctacctggattaatttagcttttaaggaatagctgctgaattttgccacatgcctttattggcatttgttgatatgtggtttttcttctacaaatgtcgatatagttatgtttatagatttcttgatgttggaccattctttcctgaaattaaacctccatagttgtattattcatattatatactggtagattcaatttctaatataattatggaaactattttcttttttttttaaatagttgttggtttaatttaattaatttgatatagctgacacaaatatctacaaaaccaaatataaatatctgtgccaccactaaatactataattgctatttttcagcaattttagtagactgtccttgtactgacacttcacttctcagtctaatgggttatttatttatttattttagtatttattgatcattcttgggtgtttctcagagagggggatttggcagggtcataggacaatagtggagggaaggtcagcagataaacatgtgaacaagggtctctggttttcctaggcagaggaccctgccgccttccgctgtgtttgtgtccctgggtacttgagattagggagtggtgataactcttaaggagcatgccgccttcaagcatctgtttaacaaagcacatcttgcaccgcccttaatccatttaaccctgagtggacacagcacatgtttcagagagcacgggggtgggggtaaggttatagattaacagcatcccaaggcagaagaatttttcttagtgcagaacaaaatggagtctcctatgtctacttctttctacacagacacagtaacaatctgatctctttcttttccccacatttcccccttttctattcaacaaaaccgccatcttcatcatggcccgttctcaatgagctgttgggtacacctcccagacggggtggcggccgggcagaagggctccttacttcccagacggggcagccgggcagaggcgtcccccacctccctccctgacggggcagctggcccggcagggcctgccccccacctccctcccggacggggcggctggccgggcgggggctgccccccaccttccggacagggcggctgccggacggagacgctcctcacttcccagagggagcagctgccgggcggaggggctcctcacttcccagactgggcggctgccgggcggaggggctcctcacttctcagacagggcggccgggcagagatgctcctcacctcccagacggggtggcggccaggcagagacgctcctcagttcccagacggggtcactgccgggcagaggcgctcctcacatcccagacagggcggcggggcagaggcgctccccacatcccagacgatgggcggccgggcagagatgctcctcacttcctagatgggatggcggccgggaagaggcgctcctcacttcccagactgggcggcccagcagaggggcccctcacatcccagacgatgggcggccaggcagagacgctcctcacttcccagatggggtgggggccgggcagaggctgcaatcttggcactttgggaggccaaggcaggcggctgggaggtggaggttgtagtgagccgaaatcacgccactgcactccagcctgggcaacattgagcactgagtgagcgagactccgtctgcaatcccggcacttcaggaggcccaggcgggcagatcactcgcggtcatgagccggagaccagcccagccaacacggcgaaaccctgtctccaccaaaaaatacaaaaaccagtcaggcgtggcggcgcgtgcctgcaatcccaggcactcggcaggctgaggcagaagaatcaggcagggaggttgccatgagccgagttggcggcagtaccgtccagcctccgctgggcatcagaggggggacggtggaaagcgggagggggagggggagagggagagggctgaaactattttcattcaaaaagttgtctatatcgctttttaatcttcatcagattttggtattgtggtctgtaaattgaggaacttatttgatgtgaatgaatttaacaggaagtctgtcatttaaaagttgatacaagctgggtgtggtggaatgcatctgtaatcccagctacttgggaggctgaggaaggatggtcatttaagcccaggagtccgaggctgcagtgtgcttaatgactgcacctgtgaatagccactgcactccatcctgggtaacagcgagtccctgtctcttgaaaaagaaaaaaaaaaaaaggtaggacacaagcagccaacatgatctagcgggcaaatgtagaacactcttatccacacgttttttttttttaaacaaccatggaacattcaccaagatagaccatatcccagatcataaaacaaatttaaaagaatagaggtcatgtggagtatgttcttgggccataatagaatcagatacaagtcaataatggactgccaagcacagtacctcatgcttgtagtctcagcactttgggaggctaaagtgagaggattgcttgaggccaggagttcaagaccagcctgatcaacatagcaagatctctatctcttaaaaatttaatgtgttatgagttaagagtttggaggactgaaagtaataatagaaaaattgctaaacacattaaaaacacaatggggcaaggaggaagacaggaatctttgtttttgtttatttatttattttttgagacggagtctccctttgtcacccaggctgaagtgcagtggtgcaatctcagctccctgcaatctctgcctcccgggttcaagcaattctcatgcctcagcttcccaagtagtttggactacaggcgtgcactactatgcctggctaatttttttgtatttttagtagagatggggtttcaacatgttggccaggctggtccaaaactcctgacctcaggtgatctgaccagctcagcctcccaaagtgctgggattacagatgtgagccaccacccccggccctgttttttgttttgttttgttttgtttttcattttttgaaacataatctcactctttaacccaggctagagtgcagtggcatgattttggctcactgcagcctcaaccttccagggctaaggcgatcctgccacttcagcctcccaagtagctgggactacaggcgtgcaccaccacacctggctaatttctctattttttgtagagacagggttttgccatgttgcccacgctggtcttgaattgctgagctcaagcgatcctcctgcctcagcctcccaaagtgctgggattataggcgtaagccacagcacccaacctaaaacaggacattttaaaaaatacataacaaatggcaaaatacaacatatcaacacatatgtaatacgattaaagagtactgagagatgccaggcgcggtggctcacacttgtaatcccagcacttagggaggctgaggcgggcggttcacgagctaacctggctaacacggtgaaaccccgtctctaccaaaaatacaaaaaacttagccgggcatggtggcgggcgcctgtagtcccagctactcaggaggctgaggcaggaaaatggcgtgaacccgggaggcggagcttgcagtgagctgagatggagatcgcgccattgcactccagtctaggcgacagagtgagactccgtctcaaaaaataaaataaaaagagtactgagagaaatgtataggtgctaaatgattgcattagaaattgcaaaggtctcaataagttcctaactcaagaccctagaaaaacagagcaaaatacagttaaccctcaaacaacatgtgtttgaactgtgtaggtccacttacacatggattttcttccacctcttccctccccctcaccccaagacaggaagatcaacctcccttcttctttctcctcctcagcttacctaacctgatgatgacaaggatgaacactcttaagataatccacttccacttaatgaatagtaaatgtattttctcttccttatgattttaacatttttcttaattataaagatacagtatgtaatacataaacatatgttaattgttttggtcagtagtaggctattagtacttaagtttggggggactcaaaagttatacatggattttcagatgtgaaagggttcagcaaccctaaccccccgcattgttcaaaggtcaattgtataactcacacatgctgaagtaaattcaaaattgtacagccactttggaaaccagtttgacagtttctcataaaaaatgaacacttaatacctgacccggtgattgggaaaaggcttaatgaaattctaacagtgaactggacgatagaagaggtcaggacaagagtggccatgtcggtgctgaggctgagatacctaccgaggactgtcactctcacggcttccagcccttcgacgaactctcaggtgtgtggccttctggccaggcttctgccgcgtcacgttgttgaagcattcgttgtatccctggggttgcagctctctgtaagtttgctgtggctgaaccaggcaaggcataggcggatttctacagaaattatgattccacgaaagattttgagaagaggaaggctggtatctttcagagtgcagagtgattttgcactctaaagaatctctttgggtgtaatagcatggaagtttgtcgctgacctgtgtccctgaactatgacacacgaatatgtgggcttagaaatagttttgcttgatacattgagaacaacaaagaagactgagtggcgctaccttctttggtgcccaggatggtttgggaaagtctcgccttcatcctcccccacagttttgcgattttgaaacgggatctcgctctccgcggaagacagccaagctctgcaccccggcctggcccgccgcaccccgcaggcccggctctcccctgcgcgctccgggctgggcgcggcgcgtgtgcggagccgccgcggtgacacggaacgccggccgccccgggccgggggaggcgcgcgtcgagaggcgacggcgggctggcctggcgcgctgcggcgctcgctcacccgctcccgaggaagggcagtgggccccgccgccgcctcccaatggcgaggctgcgggattgcctgccccgcctgatgctcacgctccggtccctgctcttctggtccctggtctactgctactgcgggctctgcgcctccatccacctgctcaaacttttgtggagcctcggcaaggggccggcgcagaccttccggcggcccgcccgggagcaccctcccgcgtgcctgagcgacccctccttgggcacccactgctacgtgcggatcaaggtgaagggccgcgcgggcctggcgggagcgggagggagcgtgaccgccgcgagggtggggggctccgggcttctccttccgagacgctggctcagcgtcccctagtgtcctggcaggaggggaggaggggttgggtccctgtgtgtcgtgtgtgtgtgtgtgtgtgtgtgtgtgtgtgtgtgtgtgtgtgagtgagagagagagagagagagagaatacagataaacagcactcggtctttgcaggcaccttgattggtttctgaatgtggaacttctctaatcaggggcctcttatattactgccccccggcgccacaacaacccagaataaacctgctctttttcctactgcaaggggaagctgtctcctgtcacccttttgccctttagagctcagatcagctgtagagaattgttcctcgtggcatcctaatgtctcaggaggctgttcttgcccaattttagagataataagagtaaacagtcagtctttgggagtcatgagtttattatgatcacagacgacttaggttgcatgaaacaataagtaaattgtgtgtgttgtggggaggaatgcatacttatgaagtcagggaccaaagaaaggaatggaataaaaggtaaatccagccatgcctgcagacgctaattgttcaagcttcctcacagcccacaaatattctgtttcctgaggctccaggtggtgaagggaaatagttcccgtgatacaccctgcagtctgactcacaggcctttcaaacccagcctcataagaggggatgtttatgtcaccaagtccttayttcctgttaggagctaaattgccccgcagctgaagttcagaagggcaagagaacttctttcttgcctggggtcgacatgagaattaaataggttaatatttataaaaacaaacacgaaaaacttagaacaatgcctgatgcatagtcagtgcaataaagtatctgttaattaaatccattgcagtgcccataacatttaatcctccaagactcaccaccaataaaaaaagttattgaacctctaggaagccatcgtgcagctgagggtaaagtcagatttgttatctctgttcaacctgaggggtaaaagtagtataagaaccatctggaattccataaaacacttttcccctcgctctggccgcctaaagagcttccccagagacagagaaccgagtggaaagagcattgtcctgggagttaggacaagatggagattctggtcacagccctgctctcaaccattttatgactcatgttaccatctttgggcctcatcttctgaatctgcaaaatgattctttcacatctgaaaactcagttgcttgagttgcctgctataaaaacccaatgtctgtgtttagcttttggttctttttgtttcctagcttgcttgctttcagagatttttattcctgctgttccctctactttcctcaattcagcctgcttagtatttgcttgaattcctgactcattcccatgtttttttaattttccttgggttttcttgtctcctacatgcagagtgaagtcttgagcactcagggcattctcttattagaaacgcacactgacatgacatgagcaggcagcaaggggaacagaacatgcaacactcaaaataataatgtgggaaggagagacctaaaaataagagaaggaggtgtgaattatataactgatggcacagctcttgacgggcaagctgagaaaagtagatgactaggatgtaaacatggcagaaatataaattcagattagaattatttacatgtcctgcagcatttgagggagatgaaatgtgacacatcagtaagatgaaagttacaaatggtaagatgaaagttacaaattgtgacattgcttcagaagctcataatatataaattsactgtactagaacaagaagagaaggtactgtcaagggagtgttgacaaagtgaatctgtcaatttaccctattaataggtcatggggtttgcttttctttttgaaaattaataaaagtaaatatatttcttgatgttaaaaataaggcaactgagtgtcatgaagatattgtaaatacacaaatgttttaaaataaggcaagttactatttttttaatgaaatggaaatgctaaatatattgctttgtcaatcaacacaaacatcactaaaattccatgccctctactttcaggattcagggttaagatttcactatgttgctgctggagaaagaggcaaaccacttatgctgctgcttcatggatttccagaattctggtaagcttaccaactaacatttattgttacattaaaacttggcttattttctcagttcattttgtgctgctgtaacagaatatcacagtctgggtaacttaaaatgaacataaatgattttctcagagttctggaggctgggaagttcaggatcaaggtgccaacatctgacaagggcctccttgctgcaacatcacatggcagaggaggaagggcaaagaagcaaaagggggccgaaattgccctttcatagtggcattatttccatccatgagggcagagcctgcatgacctaaccacctcttaaaggtcccacctcttaatactgttacaatggcaatttttgagacaaggtcttactctgtcacccaggctggggcacagtggcatgatcacagctcactgcagctttgaacttctgggtttaagcagtcttcccacctcagcctaccaagtagctgggactacaggcatctaccaccacacctagctttttttttttttttggaggtgggatcttgctatattgcctaggctggtcttgaaagcctgagatcaagcaatcctcccaccttggcctcctaaagtgctgggattacagatgtaagccaccacgccaagcctcttgtaatgacttttaacagaccctactttttgatcatgtgcccagagttaatattcctaaatgttcctgaatcacaggtctttttcctcctaaaaagacctacctgctaccaatttaaatttatatatttttttgaggattaaaagaagtatcttttaatgtttcaaatttctgaaatagtaacaaaacagtttgtatagagtatctactatagacaaaatacaacactgggtagggaaaggagattttaaacaaaccaaagacgtggagtgattgttattaggaagattttggtgaggctggggtgaggagaaggcagagtagagcacttatggaaactgaaaatgaactatttcctatgcacagagcaataggcttatatgaatgcaggataatttaagtacctaaatatttctcattaggaagaaaatctggagccccaaatatgtaattattagttactatcttcgttcatttttgttgctaacaaaatacctgagactgggtaatttataaagaatagaaatttatttctcaccgttctggagactgggaagtccaagatcaaggcaccagtaggttcagagtctggtgacatccatgtctgtgtgtgtccaagatggtgccttgttgatgtgtcttctggaggcaaataaacttcatcatatgaattttgggagaacatattcagaccatagcagttacctaaggggaagtgttctgttctctattgaccccactgggccaaataagtacagatgaaagcaacacatgtttaaactttttttttttttttttttttttaatgaacatctttaaaagaggtggtacatatcaggaggccgaggcgggtggatcacgaggtcgggagattgaaaccatcctggctaacacggtgaaaccctgtctctactaaaaatacaaaaaaaaaaaaaaattagctgtgcttggtggcaggcgcctgtactcccagctactcgggaggctgaggcaggagaatggtgtgaacccaggaggcggagcttgcagtgagccgagctcgtgccactgcactccagcctgggcaacagagcgagattccgtctcaaaaaaaaaaaaaaaaaaaaagggtggtacatatcatggcagtaaaagaaaaccagtttttatagcacagggctataagaaatagttcataaactaaataggtcaagaaattgatgtttttaaaagcccagttcccttagttgactcaaaggtggaatatctggtatattttgaaaggtctaggacaatatcctgtccccaaattctcccttactatcttataattcctagaattccagcattacagatttcttacctcctttagagtcttaaagatttatgtcactcaaaatcctgatttaaaatgcatctagtgctgaaaggattactaccttaagacgcttcttttttttttttttttaaacagtcttgctctgttgcccaggctagagtgcagtggtgcaatctcagctcattgcaacctccatctcctgggttcaagtgattctccagcctcagcctcccaagtagctgggattacaagtgcgcaccacacccagctaatttttgaagttttagtagagacaaagttttaccatgttaaacaggccaggctggtctcaaactcctgacctcaagtgatctgcccccttcagcctctcaaaatgttgggattacaggtgtgagccactgcacccgacccactttagttaatactttgtgagtgaaagggactttatgaataaatgtattgaggatgttagtgtactaggaggtattaggcattgaagaaaagagtggaggatggcaaagacacctatacctaataatttttccagagtgagaagtcttccttagaagattttccctgcatgaagatttttttccccttctggatttatgtgcataaataaacataagtcattttcatgttatgctttgatctgttctttcatttggagacagcttaatgaggtggtagattagctgcccagtgcaattcgagcatatgcatatggtctcaccttatggagtgcgtggcataattagttcacaataaaatgttactctgaaacactgatcaaatctgcctaacatagcatgggcagtacattctggctcaaccactagtttgctgaagaaccctaaacagtcatctacaatgatgttgcaaagttgggtgaggatgaagagagtcaaaatgtcgaaaatctttcacgtggccccagtgaatattcagtaaatactcattttcttccttcattcccattcattcattgtggagatccatgtgtcaaataataatttcctaactctggtgatgatagttaacattttctaagcatttactatgagccaggcactctcttttttatttttattttaagttctggaatacatgtgcaggacatgcaggtttgttacatggtaaacgtgtgccatggtggttttctgcaactatcaacccgtcatgtaggtattaagtccagcattcattagctatttatcctgatgctctccctctccccacccccaacaggctccagtgtgtgttgttcccctcccaagccaggtacttttgtaagtgacttatatataccatctcatttaagccccatagctacccttctgaagttggcagtgccagaaagtcaggtgtcccttgtttttgaaagtcagggctgacctctgcagtttgttctcattctataggaattatagtaatctgatccaataacatgcatggatttttacctttcaaatgtcacaccttatacaaacattcaagagggtgttaacaaatcagccaacaatataaaaataccttaatttaacattttaaatcatcatcctaaataaaattcatgcatcggagagatgatacttaactttttagaaagaaaacatttgaaagctattttctttctctacctcacaccaaccccagtacttggccatccttattcccctggaatttcacctctttacgtgcagaacaatatacacaaagataaaaatgaacctacaaccactttcatacagggcagtagatgctctctgtcgtattctaagagattttgtgcgtgtttttcacagtcatgtctcattatttactcctcatgagagcccttttgcaaaatagaaatggctggtgattcttgtcctagaatcatcaggggatgaaacagcctaggagggggtccagcactggtccctggayatcattcccatttgcccccgcaaagtcaagtcttggatgtrtccaaaagggatttggtcattgtgaggaatagtttagtttttgggaagctcctagaaatattttcactctgaaaagccatagattaagaaatatgtgaagatcatagacaggcatgagtctcttctgttcactaaatctgtcatttgttactccagaaagaacattggtagaatttaaaacagcaacaactacaaacgcagatagctcagctactcagatagatcatattgaattcattgaactttgctgatcattaatctgaaagctacctggttgtttagggagcatctgaaaatactacatggagattgttggtaatcagatatctctggagtcatactctaaaccaagacccctgttgatgctcactctgtctttcctttcaatcaatcaaattgccactgttacccattatgaggtctagtcaatctcattgaggtgctagtggaaacaaacaacaggaaaaaaaaaaggtcttagaatttaggacaaaactctagggtttaagttttaagacaaaactcttttttatttttttcattttaaaggccaaaaaaacttcatgcatggcatttcaaaccaatttcaatttacattacaaatgtaaatgttattcctctagcaattaagttttgcttaaatacacatgaaagtgtatgcttgattgtagattaagtaggtaacaaatatttgatacagtgaaaacaaaaaaaaatgaattgataatgtgtgtgaaagtgctttgtaaacagaaaagcaccatgcaaatgtaacatattatcgcatttatcatcattgcctgagaatagctgacgagaaatggtgatatttcatgtatacaattagctgttacacagcaacaataaaatcccgggtcttcttaaaatctaaaggaaatattaaacaagatacacatctacaggacctttgactaaattaaccccaagtaaggctgtttgtcaaaggatgatctttctcccactctctctctccacttcaatttgcatctcctttaaaaatattttgagctgaggcaggcaatttctttgagtcgtcttcgtctccagctgtatggaatgcatgcgtcatcactcaagtgctaaggcgagtgaggggccttcatcatacagctgagcacagaagctgacaactgtggcatttctctgtggtaaagaggaggaggatagtctacatctgaaagtgtaacctggtaaaaccaggagccctcctaggtgaagagcaatcacggcgaaagagattggttatttttcctgagtgtcctctgctattacctaaagctaccagaaaaaaggcaatgtggatgaaaatagttttgcttatttataatctttttagggttactgcttttgtaatgtgtttcattcctgtatcaaggagattgttttcgctttattcatgtaaatgatatgtccatcagtctaatactggggtgacttctttttcagtttagggctaatgtgtacatcaaatgtgttttatttatgaacttcaggaagatgacagttaaaaattattccttagtaatttattaaaaatatgcagttgccctatttcttagaattgtttaggatattgtttggcttcactcattgttaaaagcagtagctggatttatttttaaggcaatttaaattatttctaatatgacatggaagcatcatgtttgcataatctctaatccaattctaaatgtaaaatgttgcaggattatataaagtcaaatttctaccttgaaatctctaattaaatcctaaatgaagacacggacccttaaggtattgaaacaacgtgcagttcaacagaaattgaatacaaattccccaataggaatttgggaccgttagctgtcattgtctcaaggtttgaactgggacaaaagtcctactgcacaactggtacttctagcactatcattattcagtgtttttattcatttgttgtttcatttatttgacaaatctttattaagcacctacaggggctagatattctcatagacgacccaggaaacgatctcgtggaagagccaggtatcaaaagtgaggtgtgccccagccctgaagagtgcacatacaagtgcaaaagcgtggaaggggcccacgcaccccagctgtaatggagagagctgggaagtctcctagaaaaggagacgcctaatgtgataatgagttaattgaggggtgagagtcagggattatggggtaataggggaatggtggggagtgatggtatttcagacaaaggaaaccatatgaagaaagtcataaaagcaaaaaccaatatctctatttgttcacctatttcaacctagtgctgcagaggcagtataacatggactctggggccagactccctgggctggaatcctggctctgctgtttgctgactctgtgacctttggtacttcaattaaccttgctttccctccatttcttcatctgttaagtgaagataataataatatctacttcatagtactgttttgaagatcaatattaccatacaagaagcacttagaattgggcctggtatgtagtaagaatggtatagatgttagttctttttgttataaagcaaatgacagagtgcaaagtaatctggctggaagattgggcaatagtcaaatctttcagatttttttctgctagaataataagctagaacttcatgttatgggtaatagggagtcaagaaaggattttcagcaacgaaatgacatgagtttgtgtctttgctacatcactggttttgtagaagatagagcagaggggaatgaaagcgacacacttagaccaagcaataggctgctgcctaaatggaggcctgaattaaggtaatgatagaatggtagacaagagtgtttaaataaatatttaagaggttaaatgaacagaactttattgattgggtaggatggattataaagagggaagaattaggcttcagttatgaagacataaaaaatcaattcaaaattttaagtaaggcaaatcagaaaaaatacaatcacatgtgttgacagatgagtatctttaaggaaacaagctactttatttgttacaatccacagacaagattaacaacattactacagtctagccaaaaaagacacgtttatttaattwatttatttatttatttatttgagacagagtttccctcttgctgcccaggctggagtgcggtgactcgatctcggctcactgcaacctccatctcccgggttcaagcgattctcctgcctcagcctccctagaagctgggattacaggtgtccgccaccacgcctggctaatttttgtatttttagtagagacgtggtttcaccatgttggccaggctggtctcaaattcctaacctcaagccatccgcccactttggccttccaaagtgctaggattacaggcgtgagccactgcgcccagccagaagacatgtttattagcattttcttttttgttgttattcttttattgtttttgttgtttattaacattttcaaatccatcttagttggcaatgctttggcagattttcataaatcataaatatcctagtgatagatcaaaaaattctatattcattcataattccaaatatgtgtctgacactcttcctgatgatataaggtggttgatttgttacaatgatttttttttttttttttttggcaggttctggctctgtcactcaggctggagtgcagtggcgcgatcacagctcactgtaaactctgccgcctgggcttaagccatcgtcccacctcaggctcctgagtatatgggaccacaggcacacgacaccatacttagcaaattttttttttttttttttgagatggagttttgctcttgttgcccagactggagtgcagtgggacgatctcagctcacctcaacctccgccgcttgcctcagcctcccaagtagctgggattacaggcatgcactgccatgcctggctaattttgtatttttagtagaaacggggtttctccatattggtcaggctggtcttgaactcatgacctcaggtgatccacctgcctcggcctcccaaagtgctggcattacaggcgtgagccaccgcacccggcctaattttttaattttttgtagagacagggtttcaccatgttgcctaggctggtctcagactcctgagcttaagtgatctgcccaccttggcctcccaaagtgctgagattactgatgtgagccaccgcacctggcctgtttgttacattgatcttactgttgtgtgtcacttcacatcgcagcccccctctcaggcttataatcttatattacaatctttacactggtttataatcttaacattcagttgcgttagcttgcctactgcactccaaaagtattttcagacaatgatctcccacttggcttgtgtcagataattttacactgtatttccatgaacaaatgtgcacgcagatgcttttttttaatgcatattttgagtcccataacatagtgagtcacttttaaaaatccatgtcttttttttctgttggttatctaaaatggttttgcttatttgaagaagaaaatcttatggatctctctatttcgattaattctgcagttccatgatcaagcagagggggaatgcctggctcagcagtggcctccagaacttggctgcagcactgtggcccttctaattggtcagtgctggtgccattttggttgttaaatgtttttagtatcactcttgcttattctcatggttcaggatcttctccacagaattttgctttagcaagcagaggtttatcttaaatggttgttttattattagattatttcagtgataatcttttttaaaaaaccttcagactttttcacccataaataagctgtggttattactaaaactttgaccctatttgacagtggagtaaggtgagtaacatctacttgtgagagaaatataaaatttcatctagtaaattttttcaatcagagaatcaaatggttctgcaatacagaagcattttacttatgttactccactgaaattcctgggccagataagcattcagatgttttggtaaaactgtcaaactcatcttcccactcacttttttatacttgataatccatttattatctagaaattcgggctgtaaaataactaactgttcatagtacagattccctggtggctatacacaccatttaagaaaagctttaaaaattgacttatttggccaggtgcagtggcttacacctgtaatcccagcactttgggaggctgaagtgggccaatcacctgaggtcaggaattcaagaccagcctgaccaacatggagaaaccctgtctctactaaaaagaaaaaaatacaaaaattagccaggtgtggtggcacatgcctgtaatcctagctacttgggaggctgaagcaggagaattgcttgaacccgggaggcagaggttgcagtgagccaagatcatgccattgcactccagcctgggcaataagagcgaaactctgtctcaaaacaaacaaacaaaaaattgacttattggccagacatgttagctcacacctgtaatcctagcactttgggaggctgaagcaggaggatcacttgagccaggagttcgagaccagcctgggcaacatagcgagaccctgtttcaattttttaaaaatggacttattaagacatatataagtacaatgattttagtatctgatactatgtagtttctgtaaatagtggcactttgttaccctccagtggaactggtaaaaagacaaaataattctcatagaatgtcagtgtttccttctcaagtaggtctctttcctgcttacttgcagctatatatctgttctaaaaataaggaatttcttacagttttccactgagaaaatctgaaatgtggccaggtgcagtggctcacacctgtaatctcagcactttgggaggctaaggcatgaggatcacttgagcccagaagtttgagaccagccctggcaacatagggagaccccgtgtctacaaaaaattttttaaattagctgggtgtgatggtgtgcacctgtagtctcggctttttaggaaactgaggcaggaggatcacttgagccagggaggttgaggctgcagtgagctgtgattgcaccactgcactccagcctgggtgacagagcaaaactctgtctcaaaaaaaaaaaaaaaaaaagaaaggaaaaagaaaatctgtaatgttactgtttgtactagctaatatgatattttaaatgcttccttttttcctgcaggtattcttggcgttaccaactgagagaatttaaaagtgaatatcgagttgtagcactggatttgagaggttatggagaaacagatgctcccattcatcgacagaattataaattggattgtctaattacagatataaaggatattttagattctttaggtaggttagtttgaaacaaaacaactctttttaagggacaaacattcaacaaattgtgaatcaatgacttcttttcttgggaggatgcatattccatctacccaaattatctggatcctgtcactatggtttcagttagtcagcccaaaatatctgtacaggaaatttaaaatgatgcatctagagcaactattctgtctaccagccaagaatgacttttcagatttgtttttaaacatagacctaatggcccgggtgctgtggcttgcgcctataatcccagcactttgagaggctgaggcgggcagatcacctgaggtcagagtttaagaccagcctgaccaacatgttgaaaccctgtctctactaaaaatacaaaaattagccaggcgtgaacccaggagatggaggttgcagtgagctaagatcgtgccgttgcactccaacctgggcaacaagaatgagactctgtttaaaaaaaaaaaaaaaaaaaatagacctaatgtatgctgtttattattttgagaaataattattgaaaagtttatacttagaaagtttatttctttagaacacacacctaaatattcattttaaaatgttatacagatgcacttgcattatttctgttgtatcaatcagttagaaccacaty

SEQ ID NO: 96243 - DNA, 17918 bp, Homo sapiens
ctgagtgacagagcaagaccctgtctctaaaacaacaacaacaaaaaaccaaaaccagagagcttaggtgcatctaagaccaatagcttgttctggtccattcacagaaattttctttgttctaaaatctagatactaaagccatttcattcactatatgattatttttttctttaatttctggccccatccaaatgacacgtcctcagtttgccagtcttctctcacattttccccagtttcctgtctctgactcactgcccaaagcacccttaatgaatcatgtctgtatttgtgccagagtttttttttaatttcaaattttattttagatgcgggggggacacgcgtaggtatgttacgtgggtatattgtgttatgctgaggtttggggtatggatcccatcacccacgtagtgagcatagtacctggtaggtagtttttcaaaccatgcccctctccctccctccaacttctagtaatctgcagtgtctattgttctcatgtttatgtccatgtgtgctcaatatttagctcccacttataagtgagaacatgcgatatttggttttctgttcccgtgttaattcacttaggattatagagctcaactaattacttcttgtaacccttgaattacatctttagcacttattggcaatcctatcttctccaataaattgtttgtataattctccgcagtagcaatttcaaaccctctcctctctcctcaaacttttaatgctcacttttagcagatgacctctagtgtgggagtagagaaaaactgaaaccagcagaagatacctctctgaaattgccaccactaaaactgcaaacatacttgctttcccccaccttttttctttttcattcttcctgctatagtggaagtaagaccttattatttacagcctctatctctacctgtgaaatggaccccatcttgtctgacttcctcatggacttgctgtattgattatctccaattttccctatctatcaccttcttcctgttatcatttaaggaaaataaagcctcactcatctaaaatacagaacccgaggacatgtttctttgacctactctctgattgcctcctctatttcctttgcaggcagttcttactcgacaaatcctgcaaagtctgtttcatatgattctcctatctgtgtctccttgcctgtctctctcttcattctcttttttacattccttgttctccttggagctctggttcatccacctggagatttcttccccatctcttcatttggctaacttctactcatccttcaagtttcaaacttcacttcccaaagaaggtcttcttctgaccttatattagggtcctgcgacatgcttctctacctcccttttcctttgacattcacgatgattgttcttgttacatctgtctccccctcattaagcattatgatgtatgagagcaagcttcttatctcccttgccatggaatcatcattatagaatatgatgccagcatccagtatgcatttgtattagttttctaatgctgtgtaaaaacatcacaaatttaatggcttaataaaaatacacatttaggaggagttcaagaaaaaattagtggataggagcaggactaggttgcagctcccacttggagggacagagcagcatgtggatacccacatcgtcaactttttctccaagaactactgcaggaataatgaaaccaagaagaaaatttaaaaattctttgaactgaacaataatagtgacaaaacctatcaaaacctctgggatacagcaaaagaggtgctaagaggaaagctcacagaattaaatgtctacatcaaaaagtgtgaaattgcacaaatagacaatctaaggttacacctcaaggaactagagaaacaagaaccaacaaaacccaaacctagaagaagaaaagaaataatcaagattagagcaaaactaaatgaaatggaaataacaacaaaagaaaatacaaaacatacatgaaacaaaaacctagttctttgaaaagataaatagaattgatagaccattaatgagcttaaccaagaaaagaaaagggaagaatcagataagctcaaccagaaatgaaatgggagacattacaaccaataccacagaaatacaaaagatcattcaaggctactatgaacaccttcacatgcataagctagaaaatctagaggagatggataaattcctggaaatataaaaccctcccagattaaaccaggaagaaatagaaactctgtacagacctataacaagcagcaagattgaaatggtaattaaaaagttgccaataaaaaaaagtccaggatcagacagattcacagctgaattctatcagacattcaaagaagaattggtaccaatcctgctgacattattccaaaagatattgacactattccaaaaagggaatcctccctaaatcattctatgaaggcagtatcaccctaatatcaaaaccaggaaagaacataacaaaaaagaaaactacaggccaatatccctgatgaatatggatgcaaaaatcttcaacaaaatactagctaacagaatccaacagcatatcaaaaaggtaatccaccatgatcaagtgggtttcatactaaggatgcagggattgtttaacatctgcaagtcaacaaatgtgatatactatataaaaagaattaaaacaaaaatcatatgattatctcagtagatgcagaaaaagcatttgaaaaaatccaacatctctttatgattaacacccttagcaaaatcggcaaaatgtggcatagaagggacatatcctaaggtaataaaagccatctataacaaacccacatccaacattatactgaatggggaaaacttgaaagcattccttctaagaactggaacaagacaaggatgcccactttgatcacttctattcaacatagtactgaaagtcctagccagagcaatcagacaagagaaagaaataaatggcacccaaattagtaatgagaaggtcaaactctcattgcttgctgatgacatgatcgtatacctataaaaccctaaagactcatccaaaaagctcctagaactggaatatgaattcagcaaagtttcaggacacaaaactaatgtacacaaataagtagcactgctatgcaccaacagcaaccaagctgagaatcaaatcaagagctcaatcccttttacaataaccacacaaaaaaaggaatatagttaatcaaggaggtgaaatacctctacagagaaaactacaaaacactgctgagaaatcatagaagacacaaacaaatgaaaacacattccgtgcccatggatgggtagaataaatattgtgaaaatgatcatactgctaaaagcaatctacaaattcaattcaattcccaccaaaataccaccatcattcttcacagaactagaaaaataatcctaaaattcatgtggaaccaaaaaagagtccacatagccaaaggaagactaagcaaaaagaacaaatctggaggtatcacattacctgacttcaaactatactacaaggccatagtcaccaaaacagaatggtcctggtataaaaataggcacatagcccaatggaacagaatagagaatccagaaataaagccaaatacttataatcaactgatcttcgacaaagtaaacaaaaacataaagtggggaaaggacagccaattcaacaatggtgctgcgataattggtaaaccacatgtagaagaatgaaactggtttcatctctcactctacacaaaaatcaactcaagatagaccaaagacttaaatctgagacctgaatccatgtaatttctagaagataacataggaaaaacccttctagacattggcttagacgaagactttatgaccaagaacccaaaagcaaatgcaacaaaaagataaatagatggtacttaattaaatgagaaatcttctgcacaacaaaagaaataatctgcagagtaaacagacaaccctgagaaaatctttgcaatctgtatagctgccaaagggctaacattcagaatctacaaggtactcaaacaaatcagcaagaaaaaaaaaaacaatcccatcaaaaagtgggctaaggacatgaatagataattcttaaaaaaatacttacaactggccaaaaaacatatgaaaaaaaaatcaaaaccacaatgtgataccaccttactcctgcaagaatggccataatcaaaaaaaaaaaatagatgttggaatggatgtggtgaaaagggaacacttttacactgttggtgggattgtaaactagtacaaccactatagaaaacagtgtggagattccttagagaactgaaagtagatctaccatttgatccagcaatcccactccttggaatctatccggaggaaaagaagtcattataggaaaaaagttcttgcacatacatatgtctccatagctttgcctttcccagaatgtcatataattggaattatatggtatataatcttttcagactagctcttttcacttagcaatatgcatataggtttactccatgtcttttcatggcttgagagttaagttttttaaatcataaaatctctgaataacatttcattatatggatgaatcacactttgtttatccatttatctattgaaggacatgttggttgcttccaagatttggcaactttgaacaaagctgctataaacatttatgtgtaggatttttgtgaacacaagttttcaaatcttttggtgtatcaagaagtgtaattgctgtatcatatagtaaggttatgttgagcttaataagaaacttccaagctattttctaaagtgactgtaccattttgcactctcatcagcaataaattctcaccagcatcagttcttgatacttcatatcctcactagcatctgttgttgtcagtgtttgaattttagcccttccacagggtatgtagtagtatcccattgttgttgtaattccctaatgacatattatgttaagaattttttcatatgccatttaccatctgtatatattctctggtgttatcttccccatcactgcaaaatatatctgtttgaaggcctaaacctcaatgcaactgtattgaagatagggcctaaaaggaagcaattaaggctaaattaggttagaagggtggagccctgatccaataggatttatgtccttataaaaagagtcaccagagagctttctttccctctttatctctgtgtgcacagaggaaaggccatgtgaggaagcagtaagaaggtgatcatccacaagccagggagagaggcctcaccagaaactgaatttgacaacaccttgatcatggacttctgacctccagaactataagaaagtaagtgtctgtcgtgtaagacacctagactgtggttttttttatggcagtccaagcagactaaaacatttggtaaggatctttggcccacttttaggttgtgttgtttgttttcttaatgtcgaattttactatttccttatacatgaattatttagcagatatgtgttttgcaaatatttttatctagtctgtggcatatctcaatttttagccctgaatactttgtttcataaccatcaacttaagtatcattcccactagtctgtaagctcttggaaggtaggaaagaaatccttcagttgaggcaaccccaacagcaagcacagatcctagcacaagttagatacataagataaataattagcaggttggttcacagaataaatggataaacagtgacatgaaggaaaaggttaatgtatttcaaagaggagtttaatgtcaggcagaggaagcaatgtcagctccagagggctacattatgtccactggagaaaaatagcatcacacagtgggggatagcatcacacagacaggaggggcagcagcccacacatagtttagaggggaacctgcctaccaaggctggcaaaaaggagaccagasaggaggcgtctgtagagatatcatgaacttcaacttagctttggtactttcttccctgaagacagagggcagaactctgagttccagaaccattttcaactgtattggggaccaatcacttgactctattcttgtctctctgacagatgacgctacactctcctctgaataatggacaccatttctaaaactgaatcctgytactaaaataattcagatgatatatttttccaattctacaatcttgctttgttttatttagttgttttctctctctcttcccagttttccagagactggagctaaactgggctttcaacatcatcatgaagtttatcctcctctgggcyctcttgaatctgactggtgagtgtgtgcatatttgtctctttacccaccaaagagaaatcctgggaaaagcatgaaagaygggtaacagcgagaggcatcattccagaattcaagtgtaggatggtcctctgtccctctccactgccccgttcccatcaagtttcctcctgtgatagtgcctgcctgcctgccgcaggaggtttgcttgtgtgcttttgtgggaggcgtggacattgtcactcaaataccagacccactcctaagacctgactctggacctgtctgcaacaggattgatgttctgcaccacagagggcacagcagaacattgaagaatcagatatctcctggcacagttccagttactcaggcataaacccaggcttattcataaatcctctctttctctcataccccacgtttgatctcttagaaaaatgttggctttrtcttctaaatgtatcytaaattcaatcacatctcaccatctccactgctcacaatgatctaagccaccacctcttgcctggattagcaaattattctcctaacagacccctctacctctatacttctacactctacaggttctccatgaggagactgtcatcactcctttgcacaaatccttgagtggttccatttgtactcaggaaacaaggccgagttcttacgatggtctacaaaaccctccattcttctttgagcccctttcctcctctgctccccttcattcactctgggtcagcagccatggcctctgtgatgtaactgacacaagcctcaggacccatgytgcagctgttgcctctgcctggagtcccttcacccagatatttgactagcaacttcccccgttttcatgttattgttcaacattgcccatgaagttatactctgatgactggtttaatattacctgagactggagtaatggctcatgcctataatcccagcactttgggaagctgaggtgggaggatcacttgagcccaagagtttgagaccagcctgggcaacatatcaagactccatctctattwaaaaaattaaaaaatttaaaaattaaccagatatggtggcacacacctgtagtccaagctactcaggagggtttgcttgagcccaggaggttgaggctgcagtgagcctgatcttgccactgcactccaatctgagcaacagagtgagatcctgtctcaaacaaacaacaaacaaatactgcctgaaacccctccttctcccscaacacacaattggtaatacctttctctctttccctgtcctacttttatttccatagcactaatcaccatttaacatcatatatagtttacttgtgtgtttttccatagcactaatcaccatttaacatcctacatagtttatttgtgtgttgtgtttattattactgaatatcttcattaattgtaatatatgagagcaggaatatctactttgttcactatatagcccaagcccctaaaacagagcttgacatatactaggtgctcaatgtatatttggtaaaacaatacattatttttcccctcctcagactcttagcatttggtctgttcttgtcatgatacttatataattctgtcttgagttgttgttgggaaaaagagataagacttattaaagcattctaaataagaatgccttaagacttattgaagcattctaaaattggtaaaaatagtgaaaaaaattcgttgatttagcatacaacccactaaattgtggaaggtatttaagaaagttgaacatttaatttgaaagattttattgacagtgaaaaagccaaacactttttatttttcaaaagagatatgtttctaccatttgtcttttcttcgtgttttagaacaaagtaagtcattttacagataaagttgctagagaaaaggataggggaacttggagcctattaaatgactttcctgaagtttttctggtgatgactgagaaatcttggaatttcttgtctatgcttctctttccagttgctttggcctttaatccagattacacagtcagctccactcccccttacttggtctatttgaaatctgactacttgccctgcgctggagtcctgatccacccgctttgggtgatcacagctgcacactgcaatttaccgtgagtgataagccttcaaaggcactccattctttgggttctcaggttgggcacagactctcacccctgtctgagaccatctcccaattaaatgggattagaaargcctttgggagacatacgagggtacagaaaaaggtctgtggggagggataatagaggctcataatgatggagaagccatctctgttaagtcctctcataaacgtctatattgttccagaaarcttcgggtgatattgggggttacaatcccagcagactctaatgaaaagcatctgcaagtgattggctatgagaagatgattcatcatccacacttctcagtcacttctattgatcatgacatcatgctaatcaagctgaaaacagaggctgaactcaatgactatgtgaaattagccaacctgccctaccaaactatctctgaaaataccatgtgctctgtctctacctggagctacaatgtgtgtgatatctgtgagttcaagacaatgttcttctctcagaattagacatgcttctacaccttygcgactcttggcttcttcaattcggcctagtgaagctttcttctaacctctttcccccctttccttttctctgtacctcactgaaggagtgcttcaaggtttttgggttttttttattcacccgctgtatctttctatcattttctctttcatatatgatagaagtggttttagtggaaagaaaacatttgtattccaatcctaattttctatgtgacagcaggtcattttaccttggagcctcaatttccttaactctaaaataaagcagattactmtgttgtatattttcaaaccatttcaggcaataaagcaacttgaagcyttgaaaagtcatgaaataaatatcagtgtattaaatgtaagataaatatataatattttactaaatgygatagaacttccttatgtaagattttaataaagatacagagttaaagttttaaaaagaacttctgaaataaacattttaaactggtaacattctaagcattcactcatttcttcagaaaattgacaaagggctaccattatttttatcaatggaagttttctatacataatttgaaactcctgaactagatagtctatctaaactttgttctaggcctcatrtttcatattccataaaacacccacaacttaaggcaactttctgttttctaagttgcatctccatctgcccattactccatctccaaatttctatgcaaaccctaattaactgtctatagttgctaattacgagagttgagagtagtggtgaaagggagttgattacctattagcaaaatagaacaatgatatataatcccttgtgaagaattattaatgcaactttactcatgagtaagtttgagtatatataatatacatcatacactagataccatagtatgaaaaggagatttatttgaaacaaacytgtcagattacattcatctatccatcactactttctttttatagaaaccaacgggcagatgtacacttattctatcattgttgccatgattcaagccttttaaaactaatccttagtaaataccttcagatttagagcacattttcttgaatatatcaataagtagaaattatttgtcctctgagagtcaatttgatttttggraagagccaaatgtccttctgtgagcagtatgtttgattcatctgggttatggcataaggttcaaaacgagatatgacttcaaaaaaaatgcatcttattttgatctgggtcatcaagtagttaagtaagcatttcctacagaagtattcccaaaagaaatgtttagccatgaaattattgcttggaaaataaagtgaaggatcttatacattttmttttcaagaactaatacattattttsaaataaaaacattaaacatactcttccattattaaaaaaaccaaaatcttaaaatacagtacttcttcccaaagaaaygtccgtggaaagaacacrtgccacatktgttcatactactttgttgtttttctcattttgtttcagattggacaaattttgttacaagtgtgcacaattcacagtatttgtggactattgatacaaagaaaagaactttaattaggaaccaggaaayccagttttaaatcttagctttaccatttactagctttatatgtttaagaaaactgctttttcagtgacttttttgtgcagatactcggttttgttttgacctgacaattgagaaagtaggccagatatctgtaaattcattcaaactctaaaaattacatctcaaaagaaaccctttgaatgtttaaatttccagaaaagtttttgggtttttttgagatggagtctcactcttgtcacccaggctggagtgcagtggcgcagtctcggctcatagcaacctccgcttcttgagttcaagcaattctcctgcctcccaagtagctggcattacaggcactcatcaccacgcccagctaatttttctatttttagtagagacagggtttcaccatgttggccaagctggtctcgaactcctgacctcaggtgatccacccatcctggcctaccaaagtgctgggattacaggcgtgagccactgtgcccagccaaatttccagaaaagtttaaaacaaagtgtttcatttcattcctggagtgtctcacatgtacatgtaactcccaagaatttgatcacttttataaggtcaccgattttgcatcataagaaattgttaatctgatcatctcctataccctcgttgtcctaactgccacagttctgacttctctgaatgtttgatctcttttaatttctgatggtagaagaagaaaagttttttaaaagaagttttaatacctaacaaaactcttaaggaagtttgacttctatcttttctttagacaaagagcccgattcactgcaaactgtgaacatctctgtaatctccaagcctcagtgtcgcgatgcctataaaacctacaacatcacggaaaatatgctgtgtgtgggcattgtgccaggaaggaggcagccctgcaaggtaaaatactcttcatccattaattttcccattttcttccttctgtcttgccagaaagataatctgcttttttgttgttgttattattgttttcctggcaggaagtttctgctgccccggcaatctgcaatgggatgcttcaaggaatcctgtcttttgcggatggatgtgttttgagagcygatgttggcatctatgccaaaattttttactatataccctggattgaaaatgtaatccaaaataactgagctgtggcagttgtggaycatatgacacagcttgtccccatcrttcacctttagaattaaatataaattaactcctcacattgccccatgcatacctgtctcaattctgctaaacagagtgggtgcttgagcagttttacttgtacatatcttcactgtgattattcataacaacccttcttgccttctagataaggatggaaaacccaaaattcctcagataattgaagtttatgaagtgggaattatgttctctctaacgaattggtaactgacataaaataaaggccactccacagccatttggggtacaaaaccctttactacatgcaccaaattagacaatgtgtgattttggcacattactatgctgattgaaaaaaggaagtctaataaagagggatctatatagaagggcaaaggtgagaggggaggggagggcaaaggtgagagggaggtgttacacttagcttctccttgcccatgcaactctcaatgccatcgatggattctggtcattcatgttgcaggattctgagtgtttactggagacatgaggagttactataaaagttaactgaggtttatggcacagcagataaacgggaaatcaatgacagattttcctagtacatacttgccttttatataaagctagttgcccaggaactccactttctcactctatagtattttcctctcttccttccttctctcttcacttcaccctgcagtctgttaccccctgagagttttaattgatagttttaagtggagaggtgtttttttggccagttgactgagtatttaaaaaaacaaaaacaagaacagattttagagagttcagcctgtggctgctacaagtggactactggagtctttcagcccagctagggaagaagagaaccccctcaggaagcagaagttctagtaggaaaacttcatctatccagggctctaaaacccctaaatcagtaacgcctagcttgcagtattgagaagctaaattgggagtgcgaattattaagtgcaactgtgacagcttcatttgcacatattttattaactgaaattttagtttggagaggaaaatggtttggagaccatttttcagaggagcaccttagcctctaaagatgtctcccaacttgagctggtcctaagatttcaataggtcgtagtgatattgtataaggccagctgatcctaggtggtgaaacatggcaaggccactggattccataagcattagcactatctataagactccactagcactgtgaggtgacctccttggttggagaatacatcatttttgtgtggaatgcaataaggcattcagagaatccaaggaatgtgatgctaggacagtaacggtgacaggggaaagaaaatccaaattcagaatatgttattttgagtgaggacaaatagctactccctctggcctgagctgcaccatgttgcccatttctttcttactgtacatgtgctaacaaaaaagggaagatgaagcttctatggtggacatgcctggcccccaggtacaccttttcttttggtgtagctgcaggcatctccccatgcaagtttccagctttcttacctatgtttgcagctcaatatttcaggatgctctttgttagaaaaaaaaaaaaaaaatgaggccaggtgcggtggctcacgcctgtaatcccagcactttgggaggccgatgtgagtggatcacctaaggtaaggagtttgagaacagcctgatcaatatggtaaaaccccatctctactaaaagtacaaaaattagccacgcgtgatggtgggcaattgtaatcccagctactcgggaggctgagagaggagaatcgtttgaacccgggaggtggacgttgcagtgagttgagatcacaccactgcactccagcctgggcaacaagtaagactccatctcaaaaaaaaaaaaaaaaagattttaaaagtacttttgttctcatctacctttgtagagaggttttctgggttgggggattttttttctccttgaattatttctaataatatttatttatgaaatatatttaattatatttgattaattcatataattatataatattcaattattttacttaaacttaataatagatttagttatattttcccaacagctcatagtgttgccaccacccagtagtgggaccttgggtttcagcagcttcatccataggatggaaataataacaaaaattattatttttttattacattttagataatgtatacattatctaaatgtatttagggtcaatacattttagaatagagcttggcacagactaagctttcaataagagttgacttctatgattgcaatggtaaattttaaattcaattaaaatatgacaactggtagtaattttagtctttaattaccattcacttagtactcaactgagattaaaagcttaaattctcagaatttttttaattttaaaaattatttaaaaaaatttttatgcatacatagtaggtatatacatgtatggggtacatgagatgttttgatacaggcatggaatgtgaaataagcacatcaagcatttgggcaacatgatgaagccccgtctctacaaaaaatacaaaaattaactaggcatagtgatgcacacctataatcccagctattcaggaggctgaggcaggaaggtcgcctgagcctgggaggtcaaggctgcagtgagctgtgattatgccactgcaatccagcctaggtgacagagtgagaccttgtctcagaaaaaaaaaaaaaagcctttatactttgggttacaaacaatccaatcacattctttaagttcagtcataaaaaagaatgagatttacctatttttcaacattgataaggggcctcatttttcagaaagcttggaaaccaatcatctgggaaattcaacttaaaaggccctgtatccaccatctctccaaccgcagcattttacagagagcaagaaggaggcacagaggggtttagaaactgaacttcactatttcaagacctgggactgcactgccctcaggtcggtgaccctcttgtggtgtcttccctgtcacaggcacttgataaatgcagaagggaagcagggccagccccagccccatctccctagagagcctcacacaggtgtagcaatggcctggcttcctggggtggaagccagataaggatccaggagaagagaccctctgagtctgcagtcactgctcccagctctttattgaggaccttgcctctgtgctgaggacagtgctctgtccagcaggacagattgcaggataagggatcctgggcccgtctcaatttacaagactggctatcctgtctccctactgccccctcccttaatccttaagtgagattgggatcagaatgtctccacgcacctgttatctctctctctctggtgttactgctcctcaaggtcagtgcctcccaggctccgacctctcctcttctcttggctcagctctggtcctgggccaagataagcctcttgcttccagatggctgccgagctccctgccttctctgtcaggcctagagttaggggctgtggctgcccccttgaggcatttgttttctccctcaccacaccccaattactactcaagtgctcacagcagcagcaaacaaccttagctgggtcctcaccagctttgatgagctcagtagccaaaaaaaaaaaaaaaaaaagactatgcctgcaatgagaagctgtaagcagatcgtgccggcatctgtacatctactcctgagctgaattcctctgtggagaggtgaggcccagtctgtgtgggagaggccctcagggtccatgtcctctccattgtcaagtggagagccagcaaccaggggtcagatgaggtgacttctagctctaggtcagctgtgtcagtcaccagggggaaaatactgtggagttagagtcagactttggtttcttccctaagaagcagccaacaaatgtcactaaattcttccaccaggacaagccatgtggaaatgcatggcaggggtctggtacctgtagggtgtctgtgacctaaggaaattatggtcagggaccatgacccaccattgactcaacggggcatcaagcaccactcttgttaccctttggagctcccatttcatcatctagaaattaaggagatagaaatttttggaaaactaagtggctctaaagttcttttctattctggtgttctaatattctaaccttccttctgtgttgcttccattgtttgcataatactaatgtgctcaatcgggcaagctcagcctgccatgcagccattaaattaatttctctgaaaggtaattgatggccggaagggaaagcacaaagcatcccaaaggcaaactcatgtttatttctcatcttcttcccctcacctcctctctcttcctgctcctccctaggagtgtgcagaaaaccaaagctgcccgactcaaccatctgagaagctgatatccctcctctcagtgtccttctagggattagtagcaaagcctcctctagcagatggaaattgcagccttccctccggtccctgccagctacttccctccttcctgcactgcactgggaaattgaaagactaggtttacaagcagtcccacatccttgctagtaccgaagttctatacatagacaaaatgggaaatgcccacaaaaagtggggtgggggcatagtccagaggcagaatgtcctgtaaagacatccaggatagaagatggaagaggtgggcaggaagggagggggagaaaaagaaactaaactttcttgattctgcagggtccccactggcaggacgctggcatggggtcagggtggaaagtctaaatgattcaatcctaagaattttctgccaggcccctgcttcagagtgaaagcaaccttccctgtatcctctctgggcacctctcacctccagagttatgtaaggggcatcgctctgaacccggaggataatcagatcagaagtgccccagcctggccctcccccatggcatggtgcctggcccaggtaggacataaaactctgaagctctcgaatgttcatctgcaagggagatgctccaggtcccaggagccatggcccatgaccttctcttcaggctttttccacttttggccctgggagtccccttacaaagcaaccgccttggccccacatctcgcctgcgctattccaggttcctagatccttctaatgtcattttcctgcgttgggactttgaccttgaggctgaaatcatcagttttgagctccaggtccgtacagctggctgggtgggcttcggtgtcacaaatcgctacaccaacgtgggaagtgatctggttgttggaggagtcttgcctaatggcaatgtctatttctcggtaagtgtgagggtgacttgcttccaaggatgagggtctttgttgggttgaggatggtttctgtccagaaaggattcacattccccgaggatatctaaacacactcccagaatgccagctgaatgctggtgtgtccctccagaaatggtccattgtagagtttgaaatctatgtcttccagactgcaagtctctaagactgctgagagaatgaaaccattagattgtgagatagtcttgcaccacttacttgctaaagcccactaaatgcaggtcactagggaaaattcaaagctgtctgagaaatagttacatgaagagccacatgagagaatgaatgtcatacatacttcagataatatgtgagacttcaagaattagggatgcaggaatattagactttatggacatgagatttgaaatgggagaagtaaagcaaggacaggtggtgaaactccattatccataaaagtgtgctctgccatgttcttcatgccatgctttgcccaaggagaaaaactacataataaagaacacctgggctctgctactctagtatcctaggggagctaaaggaacagctactgctccaaagcatgacatttgaagctcctagttcttacttcttgaccttcactggacccaaggat

SEQ ID NO: 96244 - DNA, 18569 bp, Homo sapiens
  misc_feature (1)...(18569): n = A,T,C or G
tgctcttgaagcactgacgtctcactttgtggagactaatgaatcaaatgcgaagtaaaatgctgcattccagagccaggtgtctcctgcggtaaaggagagctgggaagaccagtttgccaggccctctaggcccccagcagctccagctcaccaatcatttcagtcattccagggggtaacaggaaaaaactgtcaatcaaaagtgtccaggtccatttcaacccctgcctagagggggaaacttcttgcagaaagttgcacagtttacactgcccaggactagagagggtttgagtcccagtacagcaaatatgagctcaggaagggtggctgcaaatgtctgaagatcccttacccaactcccaaccaggaagtgctgcctttcattcctcctccctcactggttcaactccaggagattcctcccaggcttccttctgccttggggaagctacaagtctaggcacctgtggaaagaggagccctccccttcccttcttagccttcagaagctctctccaacctcatcctccaagccaactctgagatcctcccctgccttcaaaagggccctggatgggcaactgcggggaaacagaatccgtggttgccgagtaggaggtctgtgtcccaatctggccaccaggtggtgtctgtacgcctggagcaccgcctatcctgaagccccacacagcccccgcctcagcactcattatgcacctgcgggggaccccagcccagtctctcgcttccttctctccggctattttgccacacccctccaccctctgccagccagctcccctccctgccccagcgcctgcctgctcccaccaccaccagccccaaccctgcccctctgccatcggtgcatctggtgccccccgggagccactgatctctgcctgtcacctcaagatcctgggcagagcgacaagggacccccgctgcagcttggaaggcatacccctccagtcagcatcccccactccgcctgtcaggacctgctaggagaaggtccaccaggaggcagtttctcaaactacccacccgggaggcaggtgggaagccctcaccttggcctgagagatgggaagaaccagggacagaggctgagaaccagggacagaagctgataccgaatgagaggcagaaacccagaggcggagagacagggggacagaggcaaagacccagagacagggcgagtagtgtgcatgtgtgtgtttgcacttgtgtttgtgcgagcgcgcacacatgtgtgtgtgtaactggagagagaacaggtggcctgagactgtagctaaaggaggagagatgcagtgggttcggcccccagaagaccaggaccctggtaatgggcttctgtcctggacagcctacgcctaggtgtgcccactgttcccacctactactgaagcagcccccgtgcctggaacgtgggctcagggttctggctcaaggccttttggccttgagcctgaacatttctgccccttcctgcctctctcctctccacccccaccccggcacccaggttcctgcctcctggcttctgcctgtctccctgggtgtctctgaatctgcctcgtcctctcagcaccggtccttttcctgactcgtgtgtgtggctgtcacgtcccatatctatctgtccatttctttgtatgtgcccccacttgtcttctgggctgccagtgacagcatacacctgtgtatgtctcagtgtgtgtgtccacctctgtgggtgtttgctctctgccaagacaaagagagggtgagcgcactgagcaactgtctgggtgtgctcgtctgggtgcaggtgtgctcacctctgttgctgtgctcctctgtgtgttggggtgccgctaggtgtgcgcctgtctctgtatttcgctctgtgtgccctgtccccgtgaaggcatctgcgtgcatccctggggtgggctctcaagggatgtgtctgtctctcagtctctttgcttgtccctatctctgtctaggtgttggtcataccacaacctcagccacagcctcagtgcatagcaacagctgacagctgaaaccacccgggcaggagagagagaggcagtggggaggagggaaccgaggaagaaacagagaagaggatgggggcagagagctggggctggggacagagacaaggacagagatagggaatggggacaaggatctagaagagctggtggtgaaagatgggacggcgggaggggaggaacagagactgcaccaagaggccaggcaggcggcgctgagagggatttcctgcccagcccccatgcagaggcgcactgggcctcgtgggggtnnnnnnnnnnnnnnnnnnnnnnnnnnnnnnnnnnnnnnnnnnnnnnnnnnnnnnnnnnnnnnnnnnnnnnnnnnnnnnnnnnnnnnnnnnnnnnnnnnnnnnnnnnnnnnnnnnnnnnnnnnnnnnnnnnnnnnnnnnnnnnnnnnnnnnnnnnnnnnnnnnnnnnnnnnnnnnnnnnnnnnnnnnnnnnnnnnnnnnnnnnnnnnnnnnnnnnnnnnnnnnnnnnnnnnnnnnnnnnnnnnnnnnnnnnnnnnnnnnnnnnnnnnnnnnnnnnnnnnnnnnnnnnnnnnnnnnnnnnnnnnnnnnnnnnnnnnnnnnnnnnnnnnnnnnnnnnnnnnnnnnnnnnnnnnnnnnnnnnnnnnnnnnnnnnnnnnnnnnnnnnnnnnnnnnnnnnnnnnnnnnnnnnnnnnnnnnnnnnnnnnnnnnnnnnnnnnnnnnnnnnnnnnnnnnnnnnnnnnnnnnnnnnnnnnnnnnnnnnnnnnnnnnnnnnnnnnnnnnnnnnnnnnnnnnnnnnnnnnnnnnnnnnnnnnnnnnnnnnnnnnnnnnnnnnnnnnnnnnnnnnnnnnnnnnnnnnnnnnnnnnnnnnnnnnnnnnnnnnnnnnnnnnnnnnnnnnnnnnnnnnnnnnnnnnnnnnnnnnnnnnnnnnnnnnnnnnnnnnnnnnnnnnnnnnnnnnnnnnnnnnnnnnnnnnnnnnnnnnnnnnnnnnnnnnnnnnnnnnnnnnnnnnnnnnnnnnnnnnnnnnnnnnnnnnnnnnnnnnnnnnnnnnnnnnnnnnnnnnnnnnnnnnnnnnnnnnnnnnnnnnnnnnnnnnnnnnnnnnnnnnnnnnnnnnnnnnnnnnnnnnnnnnnnnnnnnnnnnnnnnnnnnnnttccgggacgcgaaggtcccagtgtgcgaggggctccgtgcgcccgccccgcccccagctccgagcgtcccaactttgcgcggcgcgggggaagcggacagacagactgcccgattcaggacgggcactctcctagcgcaagttggctgaggcttggagagggtgccgggcggaggtcccccttgcagccgacttcaggcgcggcgggggaggggacgaagcccgacccgcgagtgcgccagacagagcgggagtgcgagacagacagacaagccagcagggtgtcagccttgccgtctttccgcgccagtctcgctcgcctgcctcactgtctgtctgtccttccacccctccacccccgccttcccatttctcttctctgcacttgtcaccatgccaggtgggctctgtgtcgggagcatccatggcccgagcacacacgcacacacggactcaggcagacacggctgaacttggctacagccagcctcccatcacatttcccacggagacaccatctcccctgcacgacctcacagacacacccccctctcgtgccccactgaagggggaggctgtctggaaggggagtctctcctcccatgccctccctgcctccaaccccactccaaggcctctttccctgaggctctcgggcgaagagccagaggctaagggagctcagacttgatctgcctccttcctgacttggaggcttcaacctgcgaacatgctgtgctcatatgtgctgggtggagggcgtgggtcaccgtgtgcacctgtgtgcatgtgtccagggaagccaggcttggtccagtactggggccgagggtacatgtgtatactggtgtggtgtgtggtgttggctttgcatgagtgagtgtcagtgcctgcctcacagtgcagccatctgcctatgcccctggtgtgtgcccgcaatgggggcccaggccccagtcccccattttccttctaccagcctcccctgcctatggcttccctgttttctgacccccaactgtgacctacctagtttgggggcaggcaggtcattccccaaaccctcattctctgtaccctcagcccctgtagagtctagaaggggtgtatttcttcccccaacacttggacctctgcctgctcagccaaatcacatttggcaaaccccagcagggcaggggctgccccagtgaagctagcattagagctccctggccctcccagccccacctggtgaccttgaggggctgcacggtaggcagaggagcccctccatgaaaactgcttccactagcaggagcttcttagggacttgctgcccaactctgtccttagtgaactggaggagtggggggggtctgtgccctaccacccacccacccatgtgtgaaggcctggggtcaagaggtggtaggtatggcattctcttgcccctcctttccacttcctcccacctcatctccactctcccaggcaaataaactcccctgtggacagatctggtttaatttcctttgccccctgagggggaatgaaacatctggtggagacttgagtgagagtgagcgtgaggatatgagcaatgggatctatctgagtgtgtgtgtgtgagctgcagctgtggggcctccgtgttggagtcaacagggagagtggatctgctggttagcccagcttatgtgcatgtgagaatgtgtttacatgtgtacacactgcgggtgtgtgaatatgtataactgcacggggaggtgtgggtatatgagtgtttgtgtgtccaaatacctgtgtgtgcttctgtgcacttgtgagtgtggcgtatgcacatgtataccccggggtttctggtgcatctgtgtgctggggcccatgtgttgtctgtatgagtctctggggtttgtgagtgtgtttctgtgtgcttgattgtgagtgcatttgagtgtgctatgagattgtgagcctcaggatgtgtttatgtatctgagtgtggcttatgtgtgtgggtgctcaagggtgtcttggtgccagcactgggagtgggcaaaaggtgaggctgatcctgggtaagaggtggctaggggacagtttacagggcaactttttggcaaccctaaccatgaacggctgacacctctgcctctcccgtcctgcttgctcaccctcctccaggtttctctcccttcctcctcactccaggcttcccatttctcagagcctgggactcctggcttccactgcctctggggttctggcctctcagccagggattcttgaggatctttctcatacagtctctgactcctttccctctctctctgtctccccgaccccttgccaaagcagctgcctactgggagaagcagcaggcgatcaatagtcactaatcactaatcactaattactaattagctgggggagggcaggggcggggccctgtgggacctgccagctctatcccgcctcaggaaaggattaggtctgattctcttagagctggctggccgaagcccctcagccagctaccccctcctgcctccacaccctcctctagccccccagctaatctctgcctgggctacttaggcacgcacagcctgggctagggcccagagctgctgccggggatttgggggtaatcaggggccgcagctgggccagggggacaggggagggcctgctgtgacagctcccttgggccagagcctgcagtggaagcctcacattcctaataggaggggcatgcgtcagaaaggagaatttagagtgtcagggttgggatgggtagaggagctggagacccaggagcggggtgactggcgaagaggtgaggtaataaggacagaagcaaggcaaagaggggtcagggacgaggtaattggagagagacaacacaaacgtctaaagaaaacaggtaagtggggggayctcacaggggtcagagatggagtaattggcaaggagatggggaactttggacctagccctgcaactcaagatgtgtgggatccgtgagggacagggcaacagagagggggcagggtcataggagagggtcccagggctcaggcgcaggaggagtcgcagggcgtggggtgggaagcagctgcccagtggggatggggagcagggagcgctgccttgagcgctggaaattggcgcggctccccctctcccccgcctgcccctcctccacctccaccccgcccactccccctccggctccggcttcgggaaattacatccccgctccgcggctccccccaacccccaccgcgccccggagccggcgcctttataggcacatttattgcaataataaagtgaggcgcggggcggggggcgggagggcagtcgttcccgcggggaccgcgctggctccaggaagcagggaaataaaataaaataaaataaaataaaaattcagataacggtgagccttgcgcggcaggccaagagaagtcaggcaggcaggggtagagggagggggcgtccagcccaagggcagagcctaccccaccccaccagcggtccccgccccctcatgcagtggtagggtctggaaagaggtgtcttcgcttcaacctgcctggccccctcccacagcctgatcctgcctggtctttgccttgcyctctggctcctctcccatacctgtcctcagcccctgtctctgtccccgtctcctgtgtcttcccttgtcccccatttcccattccagtctccctttgagtcttccatccccatctcctgggtctctgcatccatcactgtttctgcccagtaaccatccccatcccccatctctgttttgccccaccctgaccccatccctgcctgtcccctgtgcttatccctcatccaccattcctgtccccatgctgcttcctggactgttctgtagcccatcttcatttctctggtccttaccccatccacatctctgtctctgccccacgcctggccaccatttctattctgcttctcatccctgtccccaggcctatcctcattgtatcctcatccctgtactctatatctgtgcctgccagtccccaatcccagtccccctccctctctgtctcagtcctcaccccaggctgtcctttccaccccacctctctcctcacccacatctctatccctcgttcccagccagactccaccggcccctattgcagcacccctgcctctttctaggtgcaggggctcaggatgctcttttctccccttccccagcccaggcctggactgtcccttcctccggccagatcctgggagcaccctgcctgacccaggtggtaggggaaaagcaacgggccagcctggaggcccaggggaggtgcaccctgcaatgcggctggggggctgacagcctgatcctcccccaatcccagcagtgtcatccccaaagagccactccccgaagtggagtttgttgcccccagcagcaggaggccacctcaactccctgcaggtgcgtgggcccgctgcctcgggggtaaagccctcctggtgcagctctccccgctccccgaatgggcctgaaggagcctgctgaaccccccagctgccgcgcacctccgccccgcccccgcgccgacagcagcgctagcctctcccctccgcaaatgtcaccgcgcccaattagcttaattaagccagctctggagcaagggggacccctcctcggacaacatcctgctcccaccctcagccatggaggtgggcgacaagagctctgggcagaggagctccttaccacctgccttcccaactcccccacctccccccatgttgctggagacagacaacctgaaggacagcaggagagaaccacagacagagggagaaaatcagaatcatgggaggaggaaatttgagacagagacagtgagaaaagagactgagagacaaaagagactgagagaatggggagggagagatggaaaaacagcacaagagagggagagagagcacgagcaatcaagggagccagagggaggatcttattttattttattccatgttcccatttctcggctctcgtttcctcacagactctcacccctccctgtctgaactcccctacaaggtcgcttcagccgtgcccccccaactcttcctttttatcttggctgtctacagtagtgggtgggggcrggactgcccaaagccaggggattcgccaggatcagagaagcacagacrgcactttgtctgagatcagagatgggggtgacaccctggaacctctccttaccctgctgaacctcctcccctccccctgccccttacttctaccccctgcccctgtctggtagaagtcactggcctgaatcaccccagccaggttctgactgggtacaagacataggggtgctctggtctgctgggaggagatggcttggaggcatttggggtcataacatctgatggcatggggataggggggacctggatgactgggcttctggaaagaacagcggttgggtgagattagggaccagagttcaaatggcccacccttcagctttcccaggaaacctaacctccctcccccaatgccctctctcagattcaggccctgccctctccaagcccacttctggggcctcttctccctcccactgtaccctgggacccctccctccaccctctctcaggcccaccctccaggtgttagctgctggcttaagcctgtctgtgggagtcaatcattcttgctgcccccgccccctcacctgggctgagaggagggatggatgggagggggaatgaggggggcgataaatatgtatgacgagcgggtggtggcagcattaataacccgggatcgcagcgtggcrgggacggggaccaggcggtggagattctagcccagcagcttggctctgctgttcctgtccccagtgacactgygtgtgtacacatgggtgtgggcaaacagasgggggcacccatgcttcctggcctccttacctacccacagcacagcctgtgggccagtgtaggacacctccccagagaccactcagatacaattgacatgcatgtatgtcacccccatcrraacacagcaagaccacacttgttctatgactacggatacaccccctttagaaagagcttgacacttgggcagaggatgacaggggctcacacaggaaaggtgacacctccagacaaccacatatagctaccctcagaccgctatacacagccatatagccaacccagacacgtaaccacaccagtcacacagacaccactccacaaattgacacacacacccagccaatccaggcacatacacacagtcaccgatttacacaacagacatgcagccacgacaagcagccacacacacacaggctcctcagactcataaccatgggcatccagatacacacccacacagccaccacagccacacacacatgtaccggccacacacacacaaccatttggggctaacagagacaccagaaccccaggctgacacacatggtactgcctccccccatgggacctgtgcacagtcagggccacagcacgcggcggtggtggctagctcaggctgactgacacactctgacatgcagctcctctcttgcctgctcccctcgctggagcggcatctccatatttcttcctcttgcttcctgtctccttcactcctggccacccccactcacccctaccccagataattgatggcccgggcctggcccggccgctcctgcctctcgatccatcttgtcctcgagcccatgctgtctccaagatcggtggccacctgagacacatagaacgggtgggagcaggagggggctccttagcccccttggagcccaggaaaagaacggccaggcggcctccaccagagtggagcactggcgactgggagggatacccaggctttcctcctctgctcaactggttcccagcactcactccttgcaggccagttggggctgaggcccaggtgggggctctggtctctgaggtcctggagcctctttctttttctttttcttttcctttccttttttcttttcttttcttttttttctgagagggagtctcgctctgtcgcccaggctggagtgcaatggtgcgatctaggcttactgcaacctccacctaccaggttcaagtgattcttccacctcagcctccccaatagctgggactacaggcgcaccccagaacgcccgcctaattttagtagagattaggtttctccatgttggccaggctggtctcgaactgaactcctgacctcaggcaatctgcccacctcagccccccaaatgctgggattacaggcgtgagtcaccgcgtgtgccgggcgggagcctctttcttgatgctggatgttaatgtggtcacagcctccctggctcagtttgctcagagtccagtccctccctggctcattactggaaccaaccaggtgccgggccaggaaagatgagccaggatccagagctccactccctactcaccttcacactggctttgggtttttggccctcattggagctctgtgggccacatcaggrttcttgacgtcatttcacagatgtacaaactgaggcccagatccatgaagtgactgggccaagactacatagcttgaaagggctgcagttctcctccaaggcacgctccctgcccgctgcgggactgcgtgattccatttggtctcctagcggctgtggaaagggactggcgtcgatagggctctggcaggatggcgggrgacaaccccagcgtctctctctcctctttcttcgtgcacaggccgtcagtgcccagataccagagtccggaaggccgcagtacctggggctgcgccccgccgcggccggagcgggtgcccccggccagcagctcccagagccaaggtcttcggacggcctaggcgtgggccgcgcctggagctgggcctggccgaccaaccacacgggggcgctggcccgggcaggggcagccggggcgttgcccgcgcagcgcaccaagaggaagccgtccatcaaggcggcgcgcgccaaaaagatcttcggctggggggacttctactttcgggtgcataccctcaagttttcgctgctggtgaccggcaagatcgtggaccatgtgaacggtaccttcagtgtgtatttccgccacaactcgtccagcctgggcaacctcagtgtcagcatcgtgccgccctccaagcgtgtcgagttcggaggagtctggctgcccgggcctgtcccccaccctctgcagtctacgctcgccctggagggggtgcttcctgggctggggcccccgctggggatggcagcagcagcggcggggccggggcttgggggctccctcgggggcgcactggcggggccgcttgggggcgcgttgggagtgcctggggccaaagagtcacgcgctttcaattgccacgtggagtatgagaagacaaaccgcgcgcgcaagcaccgaccgtgcctgtacgacccgtcgcaggtgtgcttcaccgagcacacgcagagccaggccgcctggctctgtgccaagcccttcaaagtcatctgtatcttcgtctctttcctcagctttgactacaaactggtgcagaaggtgtgcccagactataacttccagagtgagcacccctacttcggatagcgcccctccccagccagtcctgagcctcccgccaaatcccagcctcactaggtgggacccccttcccagtgttctgccgctcctgtggccatgtcgcccactccttccactctgggggcggaggggaatggcttctcgggaccctcagctagcgtgggtgcccttttccttatgcggagtgcccgcaaggctggggtagccccctccagtacaccccaaagtgaargggataagagtgcagccccagaataggcggggcttggaggcggtcccaatgtcccctgggtccacagtgggtccccttttcacccttggcgctaggctgcgcactccctttccccgcagctttaataactcctggcctggcaccctcaccccaccctgactttcccatcccccagcgcttgtcctgcttcaccctaccccgcctaagactgtaaaggcctaaaaacctcggcctgtcctcccaccattctgcctgccatatgcctgtccccttttcctccaaaccctattagggtaccggaagcagaacccctgggctgaggccctggccctgcccccggcccctgcccctgcccgcccccctccagtccaggcagtcgagctccacctgccctctcctgctgcttcctctcggtgatattttttctacgccaaaacagacgggaaagggaacaaaataaagtgaaatccaatacacgcctgtgtgagacctttgtagggaatggggaggtggcgtggggcttctatgtggtagagacctggccaaggccttctccctcagcggctcttggggaaaccaagacaaagactgacagagctagcaccttggaagtcaccaaagaccagatcaaagagagctgagggttaccctcggggtaggagccccgcctgaggttgggattctcctccctgaggtgggcgaagggaagctgcagcaagtgggatggaaatgagacctgagtggggatcaccagcggacgatttggggaaggaggtgtaagaccttgaatgggatggacagggacagtgtaggcagagcgctgacaacctgctaagctccacggggccggcgggaggtggcaggttgggagggagggggaacggtgttcgcggcatctggagtcatcgatcttccttttccttcctaatttcgtgggcgctgagtttgcagacggaggaggtggggagggagctttgggatgagggggtgggggaagggaccagcgcgggtttggagggcggggcccgtggccgctacttgccactagcaaacacagccccctttagccagctgcccaccctcccccaacccctgcctccggctccctcctgcagccgaggctgctaattttatccgcccccgaccctggcctgggcgttaattggctgcggcttcattagcggttctccgctcagccgccccctccccttggggcccctggctggaggagggagggggggcggtgcggacaagctgaggcaccgagaaactcctcatcttcgccttgagtccggggtcagggtgcccactgggagggcagtgttccccaggggcttgcccactggctccagcctgaaactgagtcagacacggggtctgacccagacatatctgggagtgaaaagtcagtaagcagaaaataaatatctgctggctggctggctgaataacagggtcaactgaaaagaggagggagatcaggaatggttctggatccgagattggccaaaagcagaagaacccggaagtctcctaacaccaggcttattgctggaaacacctgagaagagctgagcctagaatggcagggaaggagcttccggctaaggggagatttctaagggctggtatgagaaccaggtgggaacggctggaattaacaaattcgcccatctgggccttagtttccccacttgtaaagctacagtaaaatagtgtgtggtggggattctatgaggcttttcctgtgaacatgctgctgtgctggatagtcctcccctcttcctctgcctcctcctcttcttcctcatacagctggacatctgagagcagagttaggtgtgtcttcctgtcattgcacttgtcacactttgttacctgttcacctcttggtatcctagcagccagtgagctcttcatgtatctccagggctatggaatgcctggcatagagtaacattgctacataaggcaatgattcgcaaaaccactgcttaacaggctggtccaagtgcagtgatgtttacttgatcataatcagttacattatgataattgatcataatcagttacaggtttctttgtttcttcttcactcccactgcttcacttgactggcctttaaaaaacaatttttttggcctggcgtggtggttcacacctgtaatcccagaactttgggaggccaaggcaggcggatcacctgaggtcaggagttcaagatcagcctgaccaacatggtgaaaccccgtctctactaaaaaatataaaaattagctggacgtggtggtgggcgcctgtaatcccagctactcaggaggctgaggcagggagaattgtttgaacccagaggcagaggttgcagtgagtgaagatcatgccactgcactccagcctgggtgacagaatgagactccgtctcaaaaacaaaaaacaaaaaaaattttttttgaagacagtcttgctctcttgctcaggctggagtgcagtggcttgatcatggctcaccttgaactcccgggctcaagtgaccctcctgcctcaaccttcccagtagctgggactgcatgcacataccaccatgcctaggtaatttaaaatttttccttttgtatagatagggtctcactatgttgaccaggctggtttagaactcctggcctcaagagattctcctgccttggcctcccaaagtgctgggattacaggcatgagccaccatgcccagccaaaaatttttttttaattaaaaaaaaaaacttggcttatcagaatcactgaggagaggtttagttgtgtgacagcataagtgggcaaatgtctactctttgagatccattgaattagaacctctgaagacagaccccacactcatatttatatcatattttctaacccattctgatgctgaggtttgggaacctactcctggaggggttgatgaatcccattcccaagggtttcttccggatgaagtcaggctaaaaggaagatcccttccagtctcaaagatctatagccctggggaaaaaaggagagcccaccgactcctgggacatcaagaagtggacaggtaacaaaatgggacaagtgaacaacaggaggggtgccttcctctgctcccagatgtctgaggagaaagaggagatgccatgtaggaggcaggtctgtgggtcagaggaagaggggaggacaatctgtcacagcgcatgttcacaggaaaagcctcattgaatcctcaccacacagtattttcttgtggctttaccagggaggaaactgaagcccacacaagctaatgcactagtcccagagccggaacttgaattcaggtctccgacccttctaaaccacggtgctttccagtgttccatagctctttatcttgtgtgggggtctagatctcctggagtctaataatgctagctagatattcagtaggcaccctataaacgtttgtcttgacaacaagcagagagaaaaccctgaaaagcttcaagatagtaaggagagggggcggcactggacctctgtttttgttttttgtttttttccccccaggcaagggcctctaaccctggggctacagacgggaatcataaagaaaaaagcggtgagtgggcgaactacaattcccaaaaggccacaaaggggccaccactacgcatgcgtagatccctcccgttagctttggcgcctcagcgagctcttctcgcgcatgcgttctccgaacggtcttcttccgacagcttgctgccctagaccagagttggtggctggacctcctgcgacttccgagttgcgatgctgtacttctctttgttttgggcggctcgggtaagaatggggctccaaacgctgggtaatcagtggaaaggaagctcttctcctaccttagttcctagtcacaaactctggggttctcttggcttttccatgcacgtggattggggcctcagggagcggacgtgtaactggggaatccccaagacccctgggcgcgcgtggagttaactgcgagcctgtcctcattctggcgatcagacgccccagggcctcgtgaccgcccatttcacgtggcattaggggagaggacagccccggatgccccgcggacccggtgctggcaaatgagcggagttttcggcctggtctcacaagctgagcctttccggccagctctgagccctgcagatgatgcaaccgagcttcactgcttgcatcaggcaggggtcccggcggcagtgagggctggaaggaggtggaacgggtagggggctaagtaaggggaaagggtattggcttactctcgggcagatccccacccccaccactcccacacagctcttcctcacggactgctaaaggtctcccctcccacctgcattgctctacaatctgtggcctcagcccttgccaactctgcctcttcccccgctgactggggtatcagtttatggtgccctgcaggaagaccctcttgttcctgtgggtgggaaggttctggaatctcagttgccctctctggagttggggagacataggcttttggaggacaagctttgcagagtggttcatggagtgaggtggtgggagatttctgaggtgcggtgcggtgaatggagcaaatcagaaccaccccttggacgttgatctcaagcttggctccagaactggcttttgaaggtggaggtgggggtagtgagaactgaaacaggctggctggacaactggcagcttggtgtggccttagaagcatgagtgagggtggccgggagacgatttgtctggactgttgtgatttcaccctgacttttcctgccttcagcctctgcagagatgtgggcagctggtcaggatggccattcgggctcagcacagcaacgcagcccagactcagactggggaagcaaacaggggctggacaggccaggagagcctgtcggacagtgatcctgagatgtgggagttgctgcagagggagaaggacaggcagtgtcgtggcctggagctcattgcctcagaggtgggacctggggagatgggcaggggttgggccaccatgggtacaggaagtaacaaagttatcttaactgatatttctccaaaaccccctttcacactcaggacctttctttgggctttatcttcctttcttatctccctcaagcaaaggcagtgcaagtccagtttatggggttgggacatttagggagcctccagggtccctacagtttcatctgatcccttccttcctcctatgaggaaggaggagcctagaagcacaagtttgagtgggtaggtggcattgaggggccactgctcatggcagatgggtttctgagaatgctgcctctggctttgccccaggcctggtgctgagtgaatggagctttctgcagggagtactcccgctttcagctctggctctggcagggagggactgtgggagtccaggggaaggggctcaataccttctgacattgccccccaccaccccagaacttctgcagccgagctgcgctggaggccctggggtcctgtctgaacaacaagtactcggagggttatcctggcaagaggtgagggctggagggcagtgtcagggatggtgctcccagtgggggaacccacctgtaccttcccagtgttcattgaggagtgaacttcccagtcctttgctgatggttgagagtcctttctctgtgccctcattacccctctcccacggcagatactatgggggagcagaggtggtggatgaaattgagctgctgtgccagcgccgggccttggaagcctttgacctggatcctgcacagtggggagtcaatgtccagccctactccgggtccccagccaacctggccgtctacacagcccttctgcaacctcacgaccggatcatggggctggacctgcccgatgggggccagtgagtatggatgggctggctgatggtcttggcggcaggattggtgtgggaaaggagttatttattgaatacctactgtggaccatacagatggaacaggccttgccctgtcctgcatgtcacagtggatgaggaagataagatcccagttatagtgcctaccacagagtggacagagcagtgaggcggtgtgtcctaggactggtgttctggggacagagaactgtggagttgaagggagtggttaagtccgggggtccttccacccaggccttcttacttcctctcacttcgcagtctcacccacggctacatgtctgacgtcaagcggatatcagccacgtccatcttcttcgagtctatgccctataagctcaacgtgagtgctctagggtgtggggaggggctcttggccctggtggtggtcctcccctggagaagctgagggcctggagcgccgggccgtccttagggttaaggaggagagtgagctgccctgcttccttctcagggctttagctgtttgtgtgtctgtc

SEQ ID NO: 96245 - DNA, 12532 bp, Homo sapiens
agcctatggccaccggacataaaaagtggggagtgagcaagaatgtagtgagaagaaaaaaatcaccccattaaaatagcgtccttcatagaagccaaccagaaaaagctggaatggtttcagcaacagaataaatggaggtattaataaatcaaaaaaaaaaaaaaaaaggaaatacctgtgaatctacgctaatataaagtaattgaatcagaaataaacgggggaggggccaggcgctgtagctcacacctgtaatcccagcacttttgggagtccgaggtgggaggatcaccagagaagaggagtttgagaccagcctggtcaaagtggtgaaaccccatctctactaaaaatataaaaattagctgggcatggtggcatggacctgtaatcccagctccttgggaggctgagacgggagaatcgcctgaacacgggaggcagaggttgcagggagccgatatcgcaccattacactccagcctgggcgacaagagtgaaactttgtctcaacaaaaagaaaagaaaagaaagaaatgggggagaagggatagctctttcttcagaagaattccaattactgactataaaaagagtaagggaaatacatagtcaccactagccaagcatcatggtaaacactgctgcaggcaagatccaacaatagaaagtcagcatgtgaaagtttaaggaaaacggggctgccagcatcatctcaaaacatctcccttcaaataattatgaatttcaaaggaaaaattaataacattacattggaaaaactcagcagacatcaccttaaccaagtgatcaaggttaacattaccagggatgagacagatcaacattatgttctacctgagataatatactaagaaagataccacatcatttttataatgttcttgccaaaaaatgcttacactcagctaatgatgagaaaatactggacaaatcaaggtctcaagatcagaaagaaggaaataagtaagcaactatcaaagactgaatgctccaagccaggtgcagtggctcatgtctgtaatcccagcactttgggaagccgaggtaagcagatttcttgagcccaggagctcaaaaccagcctgtgcaacatgatgaaaccctgccttgataaaacaaatgcaaaaattagccaggcatggtggtgcatgcgtatagtcccaggtactcaggagactgaggtgggaggatcgcttgagcctaggaggtggaggttgcagtaacccatgattgtaccactgtgctccagcctgggtgacagagtgagaccgtgtctcaaaaaaaaaagtactaaaggcaccaaggagatacaacaattaaatataatgtggcatcctggactagatcctggaataaaaagatgacactgctttagtggtgaaatttgagtaacaagtatagttaaatattgctatttctgcaacttttttttttttttttttttttttgagacagagtctcactctgtcgcccagactggagtgcagtggcactccgcttggctcactgcagcctccagctcccagcttcaagtgattctcatgtctcagcctcccaagtatctgggattacaggtgtgcgctgccatgccaggctaatttttgtatttttagtagagacaggatttcactatttgaccaggctggtcttgaactcctggcctcaagggatcagcccgcttcggcctcccaaagtgctgggattacaggcatgagccactggtgcccagcctacttctccaacttctatgtgagtctaaaattagttcaaaataaaaattgacagaacaccagtgaaatggctgtcccttagagcaggtggatgtcctcacaatatctggtgtcaaaacgcccttgcttttagaaagtaatattgattgttgatgggggaacagtgttagtttttgttgatttttgtcgttgtttttaatgtgtttttcttttgggggaaaatctttttgacaagcttaaattggtatcctcctttttgttttgtttttaaaaagtttgtttcctgaaatccaaaattctgagaactgctaagctcatttaaaattattttctaatgattgaatagtgaaggcaaatttgcaagatgagtgttgttccctccacagaaaactaacaatcttccaagtcacaaaattcattcctcatgtttttgctgtgtcaaagcaaaattaagtccatagtcacctctcccaggaagtcttccctgttcatcccagatgggaatggcatcatgccttgtgtgtttctcacaccgaattatgagcttctcaacatcagggcttctcatgcacatcacgttgtctcgtaaaaggttgtgtttttgtggcagttgatttccacaatgaaaatttatttttttaaatgttacggtatctctgtagcttttgaaatatttagtatgttaaatgtattttttaaatcttgctttaactcataagctataagatgctgaaaaactcatattctaactcattttaagtctttttatctttcagctctaagatagattaaaaaagaaaaggtgtttcaacgatttcttaagtaccaactatcgatcctttatatgttttctaaatgtgctccttacagcaatttgggggctctcatgattagtgtgttaataagaattaagcacagcagaaaaaaacttaatttgtatatgctacattactaattagcctgagagctttagaggtttttatgtaaaatgctaaaactttttgttcaaaacttatttaaaactgaaaagaatattggaacaaattgccaagcaaacccaggccttctttgtgttatcaaaggagataccagctcacctagcaagtaatacaactcactataaaatgacaaatacatgatatggtgaaggtataggaaggtacagacactcagacactgctgcagaaagagtatatacagggaagaagctttctcaagaattatctatttgcatttaaacttcttatttagccccaggtaaaccagcaacgttgctcatgactgaaaaaatggaaaacagaatctgtgcccagcaataagggattaatttactaagttatgaagctataatgtcaagtcagtacaactgtactgccaaacagtatgtattgacatagaaacatggccactatatgtttggttaaaaaaaaaaaaaaaaaaaaaaagaccacagtgtgatttcaactttatgaaatatatttgaattttaaaaagtcaggaaaagctacacaaaattcacagtaattgttcctgacacaaggaacaatttttccctcatttgtatatattcaactcatttgtatattttccctcatttgtatataattcatgtacatacacacacacacacatatattatttattttttgacacggagtcttgctctgttgctcaggctggagtgcagtagaactatctcggctcactgcatactccacttcccaggttcaagcgattctcagtcctcagcttcctgagtagctgggattacaggcatgtgccaccacacccagataatttttgtatttttagtagagacagggtttcaccatgttggccaggctggtctcaaactcctgacctcaagtgatctgcccacctcagcctcccaaagtgccgggattacaggtgtaagccactgcacttggctataattattatatttacaacattgactttattactgtgcaatcaaggaaagtaattcattagcagagttctaatttaatcaaatagatacattttgtatgtaagtgtataacatacatgaatgaatttactgatgacagcactttttcttcttttttttgtaaatacaagaggttatccttcgatatgagaattgttgattaatgtgtgttgagaagatacttgacaattagatttctctgtgttattaaacattttacctggtgcatgatgcttttacaataacaaagaactagttccaagtgtatgcagaaagatgaaaaagttctcgtgcatatggttcattatgtgtgttctacccagccctaatgcacagctccacatctccggcaacaggtccccagttgtatcagtgacaaagaggaataactggccttctcctactcaatgcgtccaccgcttaggcaagaaaacaggcacagaagtcagcctaactgagtttgaatcccagctctgctaccggttagctatttggatgctgggtgattaattcaccaaactcccagggatcgggtgaaatgggaataattacacatacccagcaagagtgcagcaagctataaattaggtaataaatatgtagcacccagcactgtgcctggcatgtggaagtgatcaataatcacagctagtattgataataaccatcctaacaatgataatcctatctccaacaccacaaagctgtgttgaacattaatgatatggaaatgtttagcatagaatagcccacaaatgtgtcccagaccacgttttctctgattatgcccaattctatccctcaaaaatcaaggttatgataacatcacaaagacagtgttgcaggaaggttacagattgaagggaccaagtggttgattcaatcaatcattcattgattgaatgaaccaaaatacaaacaccactggaaagagaagtggctatgcagggagaagcaagatggcacagtgcaggttcctttgcattctggagtgtgtttgtgtggtgctgagaaagataagtacctatgctattcccaaagtcaggtctcaacagaacctagcatgttctttgtgctagtggctcccatgttggcatgacaccaccatccagagaacccagctagcaactcatatgactcccttcataaggagtactgtcaaacatcaggaactttactgcagtgactcaaagattcaaactaggggccacgaaggctctgagaaaggaaggtctatgcctggtgtctcctggccagcacccctgcctgggccttctagaaatccatccctgtatcttgataaatggatgtcagcaaatgccagtagtactgaggcaaaggtatacatggccataaaaaggtaggcatcatttaggaattggccatttaatccttgattgggtgaagatctcatataacatattgtgtattggaacttttttttgtttgttttttgagatggagtctcactctgtctgccaggctggagtgcaatggtgccatctcagctcacttcaacctccacctcccaggttccagaaattctcctgcttcagcctcccgagtcgctgggattacaggctcatgccactatgcccggctaattttttctatttttagtagagacggggtttcaccatgctggccaggctggtcttcaactgctgacctcgtgatccactcgccttggcctcccaaagtgcttggattacaggcgtgagccaccgtgcccagccggaacttttgtttccatgtgatagtctttcaaagtgcacctctctatcccactgccctgcacctacctctccacattcagagcactggagatgaggtctagggtaggcgacttacaacaaactagagatgtgtcatatctccttccttcctgcctggggactgagattttcccacgggtccacaaatccacaggaaagttaagcattttagaagaaggctttgaatctttactacttaaataggttgtgctcttattttaaacaagttgagttattttgaatatgtgagacataaatcaaggtacacacacactagaaaaagaaatgtgatatatatgtatatgatacatatattttatatatgtgtatatgattcacacaaatatacatatatgcatttttatttatttattttgagacagagtctcgctctgttgcccaagctggagtgcagtggcatgaccttggctcactgctccacctcccgggttcaagcgattcttcttttttttttttttttttttttaggaaaaaaaaatcttggtggtcatatttattggaagagcttgagaaaaacgaaaataccatttagcttaagaagttgtgaattatctgcaaatcaactcatttcaggagtggaagaatccccagaattatttcttaatatccaaatgtatgcgggtttctcttttgaatatcttgcacctttagagaggccactgtacaaagtctcctgttttccrtacakgacaaattctttgtttcagccaactctcagtggaggggsaaccaggaaaatgccatctccccggagaaagaacactggaatattctgttttgttgattcatatgtctcttcatatgtttcctcatcaatttctatagtagtcacagtttcttccacgtctcccaagatcatatttaaatgttgatcataagtatgtaatctgcctcgaagctctcggtcgtttctcattttcacacaaattcgctcctctgggctgagcctaagatccaggrggtcctccacagtgttggtagtttgctgctggtctatgtcgtctgccatgtttcatcaagtaattcttcggtctcagcctcccgagtagctgggactacaggtgcccgccaccacgccaggctaattttttgtacttttagtagagacacggtttcaccgtgttagccaggatggtctcgatctcctgacctcgtgattcgcccgcctcagcctcccaaagtgctgggattacaggcgtgagccactgcgcccagcaccatacatgcatttttatctatacacatacatatacgtatatgtatacatacttttttttatatacagacacacacacacaggagcaatgacttcagagaaaaaaaggggtttcctaatagttactatagagtgactggcagacaggaacctcattatactatcctctctacttttcttttcttttgagacagagtctccctctgtgacccaggctggagtgcagtggctccatctcagctcactgcaacctccacctcccaggttcaagcagttcgcctgcctcagcctcccaagtagctgtgactacagacatgcaccaccactcccggctaatttttgcatttttaggatagacagagcttcaccatgttgcccagtagtcttgaattcctgacctcaggtggtctcctcaccttggcctccaaaagtgttgggattataggcatgcaccaccacccctggctgtcatctctatttttgatgatatatgaaaatttaatcaaaaatatcaagaagtgttaaagacaggccatctagaaaaacccaaaaacatgaaaaatagaaaacaaaatttaacagaatgagagaacataatgacaaacaattaaaacagtttacctagtttaagaatattcttacattgaaccaaaaaacaaaatccaactatttatcaggcaaaatataataaggaattcagaaagcttaagaataaaatgtgataaaaagcctttaaaagtggcttgctggatattcctaagcatatgaaaaataagggtctcttctaaactagaaatgttttccagttgtaattgccagtttatacaagttttcaatacatcatcaaaaaccagcatcaaaattaaactgcagtaatgagcggattaacgggcttcattggcattaattaaataaagtgcctgagtccctctggaaagtcatttgacaatatgtgcaaagtctatgggtttcagtcacatacctacacacctgaccaaaaaaaaaaaaaagttaagcacatcagcagacactgtcttctccctatgccaagcaaaaagagattaatccctttatttctggcaggggtgggggggtgctggggtgggcaccagcaaacgtttccaaacagatgtttacaaacagaaggtaactgataaaaaccaaaacacaaagctgcattgtctttcctgattcacagatgaacccactggaactactgcaaacagcctttctggaaaacatccagcaattaaaaggtgcaaacaagctgcctaatacccttgcgtagactgaattcttatgaagaaaataaagtttattgtctggaaagagagaaagcatgaggaaagcactaaagcgatggaggtgaacaattagacagatgttcagttaaggaaataaagagaacagaagaagccatcacccaggaattttacgagaatcctgacaactcggcaccacatcaagggcaagggtaaagcgaacgccacccaagcccaggctgtgcaacttgacgctaactgctgaccttgcagatcctgcctgcaggtgatgtggctctgagcaaaggcaggtgagcctgctcacttcaataagttcttaagttcttctccaaggtgagccacagactgcagttcttcaggacagagttacatctctaatcttcataatattactgcaggtaatggcaaagataatactaattatccccaagtctttgcatattggtaaattccttggtgaataccaagaatatagctaaggattatttcagaaagtctttggcttgctaatcctgtcccaactggctagaggagaagggacagaaaggtgctacgtattgaacatcttacagtggcactgctgctggatgatttctattaatcgatagatttggtgaactgtctttctcttggcttacacccctggaaggctcacaggtaactcttcagcccagctgtggcaactgttcatagcttctggccaatatttctgcacagtgctttacctctcgatttacttgattttcccttaatcccaatagcctcatctgtgtctttttctcttgaggtattatacacgggcccctacataaacaatctcaaatcctctttgcaaagcagcaatgaagagttgctaagataggtgttatgatgaaaaggcagaaaaaggaatgcatagttagctggctggctggaccacaaatagaaagatcaaaggaaaacagacagtattttatttattcctcatacaaaaatctgagttacaaactgccattattttacaaaagaagaaagacaaataaattacccattccagttaatttctaagactgcttttcaagtaagtgagagaaatatttttaaaaaatcattaaagaataaaataaactataagctagtgctatgattgatcttttctctatactcctaaccagtttctttgtacagccaatattcaatcaaccgccaatccagaaagatctatctaactctgctatacactccaaggacataaaataaagactcatgcattctttaagaagcatatacattataggtactgctgtatgtggaatgccctctaccccaagatgttcatgaactaatccctgatatctataaatatgttacatagcaaatggtaattaaggttgtagatggcattaagattgctaattggctgaccttcaaataggcagattatcccagattatcagggtagactccctgaagttacaaggttccttaaaagcagaagcagaagagagagaaccaggaacagggcagtttgagaaggacttgagcagccatccctggctttgaagatagaggaaggggccatgagccaaaggatttgggcagtccctggaagctggaaacagcaaggaagtgggttctcttctagaacctacagaaagaaatggtgtcctgctgacacatcgattttagcccactgagacctattttggaccactgacctccaaaactgtaaagtgtaacttttgtgtggttctaagtcactaacattgagaaaatttattacagcagagataggaaacaaaatacagttatgtaacatgtttaatttgtgagatttcacattgcacatccaaacttctggctcctgtgaaaaatgaagacagagaagccaaggtctggcctgcatatgctcacattttcacaatcgcgtaggccgaggtgcagctgttccttgagatggggcactgaccctcttgtgcgccaccatctccaccactctctactgtctcgctgactccaaagctctggatcatcaactgctcccaccaaacatttgagtgtttgactcttgatctaggtttgaagaaaaacaaacatactgctgggcgtggtggctcatgcctataatcccagcactttgggaggctgaggggcgcatatcacctaaggtcacgagtttgagaccagcctggccaacatggtgaaactacgtctcgagtaaaaatataaaaattagctgggcctggtgatgcacgtctgtaatcccagagactcgggaggctgggagaggagaatcgcttgaacctgggaggcagggtttgcagtgagccaacatcgtgccactgcattccagcctgggcaagagaccgagactctgtctcaaaaactaacaaaaaacacatgcatagccaagcagggctgatattcaggagctatgtgcaatatagagccagcatctgctccgcttagtcaggatccatgccatccgtgaatgttaaatatttagagtagaaacagaggcagcctgcttcctgaacattcctgcctgcacaggggcagaccacccctctgccccacctaaagcatatatgatatcccccctcaccccatccctgggggccaggcaaggtttcatggccacagttctggctaaaccaatgcagtcgggcatcccagttttctacctgacacaactgctggacaatcagtacttttttctgcagaattattattctgaaactcttgtagcacaaaaaagtaaagggatttaaaggaaaagtgatatggactataatttagcctctctatattgtaatcggggagcagtgtttgttggggatgtgaatctttcctctgaaccagaaggatctctgtaagctcttggtatgtgcctaaaagcacacactgcactgtaagaaaatgaggtgggcatgattacaggtgtgacctgataaccgctgaaaaaaatcatccatccaataatcatatgaagagatgttcaatatcctaagccatcaagaaaatccaaatcaaaatcacaatgcaataccgcttcatacccaataaaatgacaagactaaaaagaaaaatgacagcgagtgctggtgaagatatggagaaatcggaaccttcctacactgctggttagaatgtagatgggtgtggctgctgtggagaacaatctggtggctcctcaaaaggttaaacaaggagttccccgtgatccagaaattgcactcttaggagcataccccaaaaaaggaaaacctatatccacacaaaaatgtgtagacaagtgtacctggaagcattatgcacaatagccaaaatgtggaaacaacccacatgtccgtgaactgaatgcatagatgaaatgtggcatatccgtaaatggaatattactcagccctaaaaaaagaagtactgatacatgctacaacatgaatgacccttgaaaacatgatgctaagtgtaaggatcgagacacaaagggccacacagtatctgatttatttatatgaaaagtctagaataggcaaatctatatagagacagaaagtagatgagtggttacctggagctgggagagaggttgggagtggagagaaaaggaagtggggaaaaggatgccagtcaagggtttctttttgggaaaatgaaaatattctaaacttgactgtggtgacagctgcaaaactctctgaatatactgaaagcactgaattgtacattttgaatgggcaaagtttatgtatctgtgttatatatcaataaagtagcttgagaaaatttacaaacttcagctcgctaagaatttctagtaataaatcatttgaaacatacctcacaactgatggagacatatcaggcaactattgggactctgatgagattgtggattgagaaaagtatggtaaacccatatgacagaatattgcctagctgttggagatcacggtaagaaacttaagtgacatggtcaaatgtttgccatttatcattaagttcaataaaaagcaggctactagagaataatacacagtacgatgttatttggcttaagagtgtacaaatgcaggcatatgtatggtatgggcattagctaattcatagaagagaaaacacttccataacacaaaccgaaatgttaacagggattatttctggggaatgagactgagtcaaaagctgagcccagaaatacaaaatcaatatagcttaaagttgagtcattgttttccaatcactgggcttgctaaaattatttctacactgaatttgtcaccgcaaggcattgctgtttcatccatgacacctgcactccaagcataatttcaatcactgaaacaattgcaaatttcacttggctgatgaaacgtctgggaaggatgaaggattgtcggaagggtgcaccattagggctcataccaatccatggataaatgggaaaaggtatggcaaggctgtgaaggtggcctgcagcaccaggcaagacagtcagggccatgtaatctcacatcagctgactagga

SEQ ID NO: 96246 - DNA, 24789 bp, Homo sapiens
ctatataagtgggcagtggccgcgactgcgcgcagacactgaccttcagcgcctcggctccagcgccatggcgccctccaggaagttcttcgttgggggaaactggaagatgaacgggcggaagcagagtctgggggagctcatcggcactctgaacgcggccaaggtgccggccgacaccggtaagccctcgccgaggaggggtctggccgggccggggccggggccggggcaggagtggcagcgccctctcccgaggccccgaggccccgaggccggtatccgcgcggacctgatgcagggctgtgggacgagggccgctggggtccgggcaggggcctcgcagccgcagccccgtcggtgcgtcgagggggcagggcggagcacatgatgccccttggactatggggcaggtaaggacgttttgggtctcctggaggaaggtggccccggggcgcgcactggggctgtgcccgccaggcgacggggttaggagcggagcccgaggctctgcgggagaccgggggaggctgggccgcgtgggcttcccgctccctgcgccctggcctcccgcgccgtgcgccgccgcacgtagccccagactcctccccttcctcgccggcgtccgcgtccccgcgccgagctgctcgggctccctgagcccccagatctgaccccttcccttcggcaacctgaacgactcccgccttccacggaagggaccgagcccgtgccaaacaggctgagcgatttgggagtgaggagccatcctaccgctttccccaacctggaaacagcaaagcgcaaggcctctgagtcagttaggtctctgccacccacgggcaaaggatgctctcctccatcctccttcctccctccaccgaaatcggagagccgcgggcctgatccaaagaggcatccccttctcgttcattccccagaggcctcaatacaaaccccaggagttggcccctctccttttgctacaaatccttgccttgcaaaggggaggtgaggatgggctattttagaagggaagcagggttgctccctggagaatgctgagtctgtgaggtgcctatgccgagaatagctcgaggaaattggagccccagctgttaaaagagcagagggcagggtgagggccgtggcctctcaggggtatctggaaggctcttcgagttgagtgcagacccagcctgggctggaaaatggacaaaggtcatcttgctggggtgaaaagggggagagcagaaccaagaagaagagggtgagggctggggggctccagggcactggttaggaattgtggggaatgaaggctttctttagtctcatccccctgtggtaccatcttgtcctcagaggtggtttgtgctccccctactgcctatatcgacttcgcccggcagaagctagatcccaagattgctgtggctgcgcagaactgctacaaagtgactaatggggcttttactggggagatcaggtgagatcgaggtggagaggggtgtgtgggacccttccctcactttcctcgttgaggggaaagccacagggtgggctccctgctgaaccttggcttcatctcttcctttagccctggcatgatcaaagactgcggagccacgtgggtggtcctggggcactcagagagaaggcatgtctttggggagtcagatgaggttagtagccaagagagaagataagggatgtctttttccaagaaggatgtctcaccaagtctgtttctcaacagctgattgggcagaaagtggcccatgctctggcagagggactcggagtaatcgcctgcattggggagaagctagatgaaagggaagctggcatcactgagaaggttgttttcgagcagacaaaggtcatcgcaggtatctctggagaaagggacctttgagcctatccagggccacagagactcagagggtagggtcaggccctggagcctgtcttggtccccatgctgatccagaaaaggaaaaaggggagggggagtgacaatctttgcttggggcctatgacttctccagccccaaggtagatgccacctggaaatcccccaatgtccactagggggcagtaggccaccgttcttcgtactccggagaacctggctggagagctctttcttgttcacccttccctccatctgtatctctgccctgcagataacgtgaaggactggagcaaggtcgtcctggcctatgagcctgtgtgggccattggtactggcaagactgcaacaccccaacaggtaaccgggcccaggagccctgccctcatcccagcctgcctcaataggtttggacagacacagcccacatggggcaaccccttatttcaaagacacagagaccttgaacccagagacagtgacttgtccaagggcatccagtccagggcctggcttggatcagagccctggtactctgactcagtcagaaaccacactaagtgtccactggtgccagtgatttttcctcttagagaggcagaaaaggtcttacttaggccagcttcttgttctaggcccaggaagtacacgagaagctccgaggatggctgaagtccaacgtctctgatgcggtggctcagagcacccgtatcatttatggaggtgagtggctttggttcccggctgaggtggagtgggctgaggactagactgagccctcggacatggaggtggggatggggcagactcatcccattcttgaccaagcccttgttctgctcccttcccaggctctgtgactggggcaacctgcaaggagctggccagccagcctgatgtggatggcttccttgtgggtggtgcttccctcaagcccgaattcgtggacatcatcaatgccaaacaatgagccccatccatcttccctacccttcctgccaagccagggactaagcagcccagaagcccagtaactgccctttccctgcatatgcttctgatggtgtcatctgctccttcctgtggcctcatccaaactgtatcttcctttactgtttatatcttcaccctgtaatggttgggaccaggccaatcccttctccacttactataatggttggaactaaacgtcaccaaggtggcttctccttggctgagagatggaaggcgtggtgggatttgctcctgggttccctaggccctagtgagggcagaagagaaaccatcctctcccttcttacaccgtgaggccaagatcccctcagaaggcaggagtgctgccctctcccatggtgcccgtgcctctgtgctgtgtatgtgaaccacccatgtgagggaataaacctggcactaggtcttgtggtttgtctgccttcactggacttgcccagataatcttcctttttgaggcagctatataaatgatcatttgtgcaagaaaaaaaaaaaaacaagaacaggtttctataacaacatctcttactatttttacttgaaaaaatgttttgcgtagcagactgtcatagccttgaacgccggctccctttcttcctccctccaagtggctctggggctgttgatttccgcagagcttgggttggggtaggggctcagcctcaccagctttcagcagctggtctaggccagcagtgcctccccacctccccaaggggaggggtggtggcaagacctcagcacagtctgtggtatcacagggctcactggtagagcaggtagcgcttcatggcagggggcaagggcagggcagacacctggccgagccgggtatcccccaggttgtggcgcacacacaggcggctcaggtgcagaagggagtgtggctccgctgggagagagaaggaggggaatgtaagtatgggtgcagccaccagccagatgtcctcaaactacggggtcctactcagatgcctttctgctttcctgcttcgagtgtgcccacctggctgaaaggggaatttgagatacccggaagttctgcctcccagataagatttcacacatccctagtcagagctgggggtgaagagctggctaaggccctctaaacaacaggccaaggtggctctgacagtggtggagctggcccaggctttgactccagaggcttgggagctggggctgaggtgaggagggatggccctccactctacagcccacacaactgcagagagcagctccaagccctggacccagtcagttcctggggaggctcctcccctgctgccccaccctaaggccctgcctcctccactgctctcctccctggtgcccagggccccagtgtctccatcctgaggtgtggctgaggaaggaagtaggtatgtggcacagagacaggttagagcccagggaatccggtatacagcctgggtacctggctctgcccatccttcttttggacctgtacatcaaacccagtacctaacgctttgcacctcttgctcaggggttgatatctcctgaattctctcatccctgcagttcctccctccattctgaaggttcaccatttactggccaagagaacttgagaaagttgctttctcaagcctgtttcacctctattgctgttgggttaaattaaataacagctgtgaagacccctagcctttcccagcactgaacagaggttgaggcaggctggatgaaggtccatcccctctgctcttgtcagaagagtttccatcccaaaccactgccaccagggacagaaagttctccccacgtctgccccaggcctcacctctcctttcgcccaggtagcggatgcggacctggcactggccccagacagcgcttactgccggatagagggtcctgcccttcagtccgcggaatgctggccccaggtaggtgcccccaatagcgtagcccagagttccctcctccatgtccagaaccaccagcagtctctctggcacctccagctgctcaccctgagttcccgctggatactggggggctccgggccccttgctctgatggtacagcttcccccgcccgatgtcccagccccacgactcgctgttgctgcccagcagcgccgcgtagtggtcagtctgcagcggggcgagggccgtggccacgcccaccacggcatgcgtgcccctctgctctaggggccagctgatctcccaggcgtgcaggccccttgaatagcccctcttaccccgggccccatcagtgctctgggccacgggccgccgctcaaagtacaaccctccttccttgacctcgatgttctctgaacagtctttggggttccaaccgtggcgccgctgggcccccaggtcaggagggggtgcagacagcagctcttccaagccctcgggacaggagaggtcagggtacagggcctgtggcgtgggggtgctgctgctgccccctgccagagctgtctggcccatggaggtgaggagctagaggactccccgaaagaggcttgctggggcgtctttctcttctgaaagttgagctccagtttggattgacctggaagggagctgggagaaaaggggcgtgaagagcagaatcctggcgggggctcgtcacccaggtaccccatcctttcacccaagtttgccaacgggcccgctcctccctcctcgctgccccaaagctcctgggcccttcatctgccctcgccccatctgatccaggtcgccagagactctcgcgagttcgccccatttgggcctcagcatggaccatcccccttactcgcccggagccctcgccgctgcccccgaacctcggttgacttcccagccctggaggtcgccgggcctctgaaggagccgggcggaaagaagccgaggcgcgcagggcgcagaccgccggccgcttccgcccccagctcctcccttgggccgagcccgtcccgcggccccgcccctccagggccctctggggcttaaccctctcatcgccgcccacggccgtgcagctccgaggccacgcccctgtggggccccgccccctcctgggcagttaccgctctataccggcagcagccgcggagagcatgccccgcccccgtggagcccaccccgggcggttaacctcgggtctcagtcccgggctgtgaccctccccgaggcyccgcccccacggcgaaggcccggggcagttaacccttctcttgctgcggcagagtccgcacccgggcaggcccatctcagaattaacgctttgatggcatcaccgcgtcgggaatccctggggatggtgttctccaccgtcaagacctttgagccgcctgagcgactaactcctgcgcccctgagggtaaggagcatggggtcaaggaggggcttcattgtgccgaatcccatttctacttccctgtgattctgggtcactgtttctgggctggtccctttctgccccgggttgtgagtcagcctgtgccacctctgaggctgtgaaatctgcttcaggctctaggctgtacgcatcatagttctcyctgctggtccagtcttcatactggatgccaatccattactgagccgttgatctcatttggtagagtgtcctgattaagacttcgagtttgagtgaagctatgccactagttaactgcgcgatcttggggaagttgcccgatttctcttttttttttttttgagacagggtcttgctgtcaccaaggctagagtgcagtggcgccatcacagcccactgcagccttgacctcctgggctcaagtgatcctcctacctcagcctcccaagtagctgggactacaggcatgtgctaccacacccagctaatttttaaaaaaatatttttatttttatttttatttttttcgagacagagtcttgctcttgttgcccaggctggagtgcagcggcacgatctcggctctctgtaacctccatctcccaggttcaggggattctcctgcctcagcctcctgagtagctgggattacaggcacctgccaccacgcctagctattttttgtatttttagtagacacagggttttgccatgttggccaggctggtctagaactcctgaccttgtgatctgcctgccttagcctcccaaagtgctgagattacaggtgtgagccaccacgtccggccaaaaaaaaawtttttttagagacagggtctcccaaagtgctgggatttcaggcatgagccactacgcccagccccagatttctgtagttttctgttatgtaaaataggagcaatgatggtagttacctcacagggttgttgtgcagttgaaataatccaggtaaagcatgtagcacagagctgggtacatagtagtcactcaccaagcatagctgtcaatgtgcttaatgagtgccgacactataaggaggcaatataatataatggcaaacatgccagctgtgggaccagactccccgggcatgaatacctgaaggccagtgtgtgtatgaccttgggcaaattactgaacctccctgtgcctgtttcttcctctgtaagacagagatcacattagtatctattgcatggggttggtagtgagaatccaatgaggttatagatgtaacacatttggaagagtttctggttcgcatttaatgatttgtgctaagcactggagattaagcwgtgaatccttaaggaggttacaaagacttttataaaataatgtatcatgtagtaatagtaaataaaattatggagatataaagaaagtactataggagtaaaaagaataggactcctatccggggttcaagcagttaggaaaggagcatctccaaaagaggttcacacctgggctgaatcttttcatgtcctagaagaggttcacaccttcacactgggctgaatctttctctttttttttttgagacggagtctagctctgatgcctaggctggagtgcagtggcgtgatctcagctcacctctgcctcctggggtcaagtgattctcctgcctcagcctcccaagtagctgggactacaagcgtgcaccaccatgcctggctaatttttgtatttttagtagagacagggtttcactatgttgcccaggctggcctcgaactcctgacctcgtgatctgcccgcctcggcctcccaaagtgctggggttaccggcatgagccaccgcgcccagcctgggctgaatctaaaaggatgaccaggaattggcctgagacgagccacttctctgcagtatggaggttgggttacggttgctgcatgtagaagatattccmgacagaagagtccgcatgaaaaaaagcaagaagcagcaggtgggtttggggaagtacgatatcttcaaggttgctacagccagaaaggaagcatgagaagggccagataagtagacagcaagtcacagaggccttctaggctgagttaaggaatgcaaatgttttcccataggacaggccagtgatggggagccactgtaggatagaagaagagaggaacatggtcagataggcatttgatttatttatatattttgagccagggtctcactttgtcacccaggctggagtggagtagcgtgatcacgactcatggcagccacaacctcctgagctccgctgatcctcctacctcagcctcctgagtagctgggactacaggtgcataccgccatgccgagctaatttatttttatttttttaatttacaaattattatttcttaatttttaaaatagagacagagtctcagtctgttgcccaggctggtctcgaactcctgagtcaagcgatcctcctgcctcagcatcccaaagtactgggattacaggcgtgagccactgtgcctggccagatctgcattttagaaaaaccaccctggcagcaacatagaggagcttcaagggaaatagaactggaagttggctgggcgcgatggctcacacctgtaatcccagcactttggaaggctgagatgggcgaatcacctgaggtttggagttcgagaccagcctggccaacatggagaaaccctgtctctactaaaaatacaaaattagccgggcatggtggagcatgcctgtaatcccagctactcaggaggttgaggcaggagaattgcttgaacctgggaggtggaggttgcggtgagccgagatcacgccattgcactccagcctgggcaacaagagtgaaactctgtctcaaaaaaaaaaaaaaaaaaggactggaagcaaagacaccatttccagcagcccaggtgacaagtgtcaacagcctgaaataggacagtagaaataaggatgaaaataattcaagaaacactgatgaaacggcaagatttggtgactgattagatatggagttgaggctgggcacagtggctcacgcctgtaatcccagcactttgggaggccgaggcaggcggatcacctgaggttgggagtttgagaccagcctggccaacatggtgaaaccctgtctctactaaaaatacaaaaattagctgtgtgtggtggtgggcacctgtaatcccagctacttcggagggtgaagcaggagaattgcttgaaccagggaggtggaggctgcagtgagccgagatggcgctaccgcactccagcctgggcgacagagcaagactccatctcaaaaaaaaaaaaaaaaaaaaaagagaaagggaagtttctagcctggaaaaattgattggaaggtggtgccaccaatcaagatggagatgacagaaagaggagtaattgagggcaggggcaggagggtgggagagggagatggtgagttcagtttaggatatgtttttgaggtgtctgagccacaagcaaatggaaccatccagaacacacaagaaaatggcaggtctggaggcagaatgagaggcctgggctggagacagggatttgggaggtgtgtcagtctttagtcaggagttgaactatgagaatgagtgagtgaaatatgggcgatggggacaaagagagtgtggagcaacagaagggtcaaggagaatagaacaaggtagaaaattcagttttgattacttacaagattgttttggtcagaggtcactggcaaccttggtgagagacagcacatgtggggactggtaggtggaactccaggctgaaggggctggactgtcacaagctttacattttgaaggaatagaaaatgaggagaagtaaattacaattatgtcacatagttaaagttacccttggaaatcccttagtaggctgggtgcagtggctcattcctgtaatcccaccactttgagaggctgaagcaggagcttgagcccaggagtttgagaccagcctggaagactagtgagaccccatctctaccaaataataataataaaataggccggacgcggtggctgacgcctgtaatcccagcactttgggaggccgaggcgtgtggatcacctgaggtcaggagttcaagaccagcctggccaacatggtgaaatcccgtctctactaaatatacaaaaaaaaaaaaattagccaggcgtggtggtgtgcacctgtaatccctcagcaggagaattgtttgaacccaggaggcggaggttgcagtgagtcaggatggcgccactgcactccaacatgggcgacagagtgatactccatctcagaaaacaaaacaaaaaaataaaataggctgggcatggtggctcatgcctgtaatctcagcactttgggaggccgaggcaggtggatcacttgaggtcaggagttcgagaccagcctggccaacatggtgaaaccccgtctctactaaaaatacaaaaattagctgggcgtggtggcatgtgcctataatcccagctacgcaggaggctgaggaaggagaatcgtgcctgtaatcccagctactcaggaggctgaggcagaagaacccgcaaggcagaggttgcagtgagccaagatcctgccactgcactccagcctggcgacagagcaagactccgtctcaaaaaataaagtaaaataaaataaaaataattgaggaccacaagaactaggaaaaaaagaaaaaagaaaaaagaaaggccgaggcaggcagatcacctgaggtcgggagtttgaggccagcctgaccaacatggagaaacctcgtctctactaaaaatacaaaaatcagctaggcatggtggcacatgcctgtaatcccagctactcgggaggctgaggcaggagaatcgcttgaacctgggaggcagaggttgtggtgagctgagattgagccattgcactccagcctggacaacaagagcgaaactccatctcaaaaaaaaaaaaaaaaagaaaaagaaaatccctcagttactgcatctgttaggtgagcatatattcgtttgtgtaaaaatcactatgtggctgtatatatatatatatatatatatatatatatatatatatatatatatataaaatgatgtacaaaatattttataatgttttaaagaggaagaagaaagcagcacactaagaagtaactcaggaatggaaaaccaaacatcatatgttctcataagtgggagctaagccatgagaatgcagaggcataagaatgacacaatggaccttgggtactcagggggaaagggtgggaagaggtggagggataaaagactataaatagcgttcagtgtatactgcttgggtgatgggtgcaccaaaatctcacaaatcaccacgaaagaacttactcatataaccaaacaccacctgttccccaataacctatgaaaataaaataataataaaaagaagaagaaagcatactaaaataaagatatgaacctgaaacttgtcatccacccaacctggatatgcttgccagtatgtgacatcaataataacatcatgactgtaagaccaggcacagtggctcacacctgtaatcccagcactttgggaggccaaggtgggccgatttgagatcagaagttgaagaccagcctgggcagcatgatgaaaccccgcctctacaaaaaatacaaaaaattagccaggctttggtggcttgcgcctgccatcccagctactcaagaggctgaggcaagagaatcccttgagtctagaattggaggttgcggtgagccaagatcaggccactgcactccagcctgggtgacagagcgagaccccgtctcaaaaaataaataacatcatgactgtgggtggcagcctatgatgaatagtagtgaaggacccatgtgataaccaaggcctggggacagagaacagtgcctgccccatggctagctctagctcagcttgagaatttaatcacgcctgtgctgctgatgctgctgctgctgctgctactggttgtttaaaacatggttgttggccgggcacagtggctcacgcctgtaatcccaccactttgggaggctgaggcaggcagatcatctgagataaggagttcgagaccagcctggcctacatggtgaaaccccgtctctactaaaaaatacataaaaattagccaggcctactggcacgtgcctgtagtcccagctactcaggaagccgaggcagaagaaccacttgaacccaggaggcggaggttgcagtgagccgagattgcgccactgcactccagtctgggcgacagagggagactttgtctcaaaaaaaaaaaaaaaaggttgttttaaacaattcatcagttgatgccactgaatctggagctggtcaaacatttgttgctaaaaggtaaaaaatttcgtaatgctacaagtaatttaaattttttacttaaaaattaaaaaaaaaaaaaaattggccgggcatggtggctcacacctgtaatcccagcactttgggaggccgaggcgggtggatcacaaggtcaagagatcgagaccatcctggctttagtagagacagtgaaaccccgtctctactaaaaatacaaaaaaaattagccaggcgtggtggtgggcgcctgtagtcccagctactcgggaggctgaggcaagagaatggcgtgaaccctggaggcagagcttgcagtgagccaagatcacgccactgcactccagcctgggtgacagagcgacattccatctcaaaaaaaaaaaaaaaattatagatgaggtcttgctattttgcccaggctggactcaaattcctgggttcaagtaatccccccaacctcagcctcccaagtagctgagactacaggcatgtgccacaatgcctttttacttattttattattttgttgagacagggtctcagtgtactccaggctggagtgcagtggcacgaccatgactcactgcagcctcaccccagcctcctgagtagctaggactacaggcacatgccaccaggcctggctaatatttaacttttcgtagagacagggactctctctatgttgcccaggttgatctcaaactcctgtactcaagcaattctcctgcctcgtcctcccaaagtgctgggattacaggcatgagccaccatgcctggctgtttttaaatttttatatatatatattttgagacaaggtctggctctgttgcccaggctggagtgcagtgcacgatctcggctcactgcaacctctgccttctgggttcaagcaactttcccgcctcagcctctggagtagctgggacaacaggcgccccgccagcatgcctggataatttttttgtatgyttttrtaaagacagggtttcaccatgttgcccaggttggtctcgaactcctgggctcaagcaatccacccatcttggtctctcaaaatattgtgattacaggggtgagccactgcgatcggtccttttaaaaaaaawgtcccctcccaccactgccgtttttactttttgattgagatgtagcatatataaagcacactaatcttaaattgcccagtgaacttttacatacatatacacttgggtgacaaccaccaaaaagatcaagataaagaatccagctggctgggcacggtggctcacacctataatcccagtactttgggaggctaaggcaggggatcacttgagctcaagagttctgagatgagcctgggcaacatagggagacctcgtctctactaaaaattcaaaaaagttagctgggtgtggtggtgcacgcctctagtcccagttactctggtgggctgaggtcggaggactgcttgaggctgcagtgagccctgaccatgcccactgcactccagcctgagtgacagagctggatgctgtcttaaaaaaacaaaaacaaggccgggcgcggtggctcacgcctgtaatcccagcactttgggaggccgaggcgggtggatcacgaggtcaggagatcgagaccatcctggctaacacggtgaaaccccgtctctactaaaaatacaaaaaattagccgggcgtggtggcgggcgcctgtagtcccagctactctggaggctgaggcaggagaatggcgtgaacccgggaggcggagcttgcagtgagccgagatcgcgccattgcactccagcctgggtgacagagcaagactccatctcaaaaaacaaacaaacaaacaaacaaacaaaaacacaaaaaaagaattcagcatctgtcttgctctttccctgatgatacattcccaagggtagctcctattagaccccctatcagtatagattagtgttgtctgttcttcaatttcatataaatggaatcataatgtcaaatgcagtgtcacttgcctctagtcacagctacttggaaggctgagatgtgaagactacttgagctcagaagttccactgcactccagcctgggttacagagggaaaccttgtctctaaaaaaaagaaaaaagaaagaaagaaaaagaaaacatagtatgtattctttgtgtctttccagcattgtatctgtaagtcatccatgttcttgcatgaaatagctcataattttcattgtcatatagtattccatcatctaaatataccacaatatatctattgtactgttgatggattttttttttaagacagtcttgctctctcgcccagacaggagtgcagtcgtgcgatctcgactcactgcaacctccacctcccaggttcaagcaattctcgtgcttcaacctcctaagtagctgggacttcaggcatgtactacaacgcctggataatttttgtatttttagtagagatggggtttcaccatgttggccaggctggtctcaaactcctgacctcaggtgatccacctgccccagcctcccaaagtgctgggattacagatgtgagccactgtactgggcctgttaatggatatttaaattgtttccagttttccaccattataaagttgccatgtacattactgtacaagtctgttaacaaaagaccatgaggcctgcagaagaaaaacaaaggagagctttattttttggaaaaaaaaaaaaattccaaattggggaatgctgctggtttacacactgttcactggaataaagtctctttcctctgaattcctttacagcctgtgatcccagtattttgggaagctgagatgggaagatcagttgaggccaggagttggagactagcctaggtagtatatcgagacctccttagccaataattttttttttctgttgcccaggctggagtgcaatggcactatctcggctcactgcaacctctgcctcccgggttcaagtgattctcctgcctcagcctcccgagtagctgggattacaggcatgcgccaccatgcccagctaattttgtatttttagtacagacagggtttctccatgttggtcagactggtctcgaactcccgatctcaggtgattcacccgccttggcctcccaaagtgctgggattataggcatgagccactgggcccggccaataaaaaaattttttaattagttgggtgatggtgcacacctgtagtcctagtactcaggatgccaaagtgggaggattgcttgagtccaggagttcaaggctgcaggggctgcgaatgtgccactgcactacaractgggcaacagagtaagaccctgtcttttaaaacaaacaaactaataaacaaaacaaaaccaaattccttttcagagaacttttttcacaagtctttggtggagctaggcatgcatttttcttgggtgcaaaactatgtgcagaattgctgggtaataagggattacaacatatagatttaaccacatgcaattttctgatttctttccatagggacattttattcagaaattaaatcattcagagttccagcactgtcgggggtcatcgggctctgtccaccgccataggcctagcattgtcaccaactgagccatagagggacctcggcccaagctggggcctcttcattgtcgaagaaggcctcttgccagaccaggmtctgtgggcgcggccaggctggaggactagggcggtggcagtggccaggtgagtgcacatggctgtgggtggtccctcaattgctccctcctctctttcgctaccccctgggctgkagggaggcagggcacccagccggaatggcatgatcctgaagcccaacttccacaaggactggcagtggtgtggccatgtggctcagccagcccatggggcagacctgcagaagcaaggtggccagcaaaagcaggctgcatggcccactgatatgggcccatccacccatagtaaggtgccccatgctgaggcatcactacaaagcacaagctggcaggggcctcagcttggaggagttaagggtggctggcatttacaaraaggtggcccagaccattggcatctctgaggatgcaaggaggaggaaccagtccacccaggccctgcaggccaaggtgcagaggctgaaggaggaccgctcctcactcatcctcttccccaggaagcccttggcccccaagaagggagacagttctgctgaagaactcgaactggatactcagctgacaggaccagaaatgcccatcggcaatgtctacaaggagaaagccagagtcatcrctgastaggaggaaaacttccaggccttgttagtctctgtatggcccatgcaaatgcccagctcttcggcatataggcacaaagagccaaggaagctgtagaagaggacgcttaaaaaaaaaaaaaacgggtaggctcgagccgctgcatcagcttcgcgctgggtctctcggtcccgcagccatgaggaggacgctgcccagactcactacccgccctctcrgtcccgcagccaygaggaggacgctgcccagactcactacccgccggctccctcccccgcgtccctgtggtggtgggcgaagatgacctgttgtgcatcagatgcctttgagacatacaactggagatgtgagataggaaattgaatgtaaagactggaagctcggcagagcagaactctgaacaacgtgcctcaggagtgcaagttgctgatgaagtgtgtcgcattttttatgacatgagagttcgtaaatgctccacaccagaagaaatcaagaaaagaacaaaggctgtcatttttttgtctcagtgcagacaaaaagtgcatcatgtagaaggcaaagagatcttggttggagatgttggtgtaactataagtgagcctttcaagcattttgtgggaatgcttcctgaaaaagattgttgctakgctttgtatgatgcaagctttgaaacaaaagaatccagaagaattgatgttttcttgtgggcatcagaactagcacctttgaaaagtaaaatgatctatacaagctccaaggatgcratcaaaaagaaatttcaaggcataaaacatgaatggcaaacaaacggaccagaagatctcaatcgggcttgtactgctgaaaagttaggtggatcctttttttttttttttgagatggagtcttgatctgtcgcccaggctggagtgcagtgacaggatctcggctcactgcaacctctgcctccygggttcaagtgattttcctgcccagcctcctgagtagctgggattataggcgtgcgccaccacacctggctaatttttgtattcttagtagagtcagggtttcaccatattggtcaggctggtctcgaactcctgacctcgtgatttgccctccttggcctcccaaagtgctgggattacaggcgtgagccagcatgcctggccagtggatccttaattgtagcctttgaaggatgccctgtgtagatcatcattcagtgccacaaattgaaagcttccacgtttaatgttatcctcttgctatataaataaagcaaatatatttaggccagggtctcactgaggggagctgtcttgtcatcttttagagtaaactaaatactctataaacatatgcaaacagccctaaatatatctgtaggggtgggttgcccctccacacctgtgggtgtttctcgtaaggtgggacgagagacttgggaaagaaaaagacacaaagtatagagaaagaaataaggggacccggggaagcagcgttcagcatatggaggatcctgccagcctctgagttcccttagtatttattaatcatttgtgggtgtttctcgaagagggggatgtgtcagggtcacaagacaattgtggggagagggtcagcagacaaacacgtgaacaaaggtctttgcatcatagacaatgtaaaggattaagtgctgtgcttttagatatgcatacacataaacatctcaatgctttacaaagcagtattgctgcccgcaggtcccacctccagccctaaggcggtttttccctatctcagtagatggagcatacaatcgggttttataccaagacattccattgcccagggacaggcaggtgacagatgccttcctcttgtctcaactgcaagaggcattccttcctcttttactaatcctcctcagcacagaacctttacgggtgtcgggatgggggatggtcaggtctttcccttcccacgaggccatatttcagactatcatatggggagaaaccttggacaatacctggctttcctaggcagaggtccctgcggccttccgcagtgtttgtgtccctgggtacttgagattagggagtggtgatgactcttaaggagcatgctgccttcaagcatctgtttaacaaagcacatcttgcaccgcccttaatccatttaactctgagttgacacagcacatgtttcagagagcacggggttgggggtaaggttatagattaacagaatctcaaggcagaagaatttttcttagtacagaacaaaatggagtctcctatgtctacttctttctacacagacacagtaacaatctgatctcttttgcttttccccacatatatctaaagtctaaagttgtttttttaaaaaaaaaaaagaaaagaaaagaaaagaaaaaagaaaatagccaggcgcggtggctcacgcctgtagttctagcactttgggaggcgaaagtgggtggattgtttgagctcaggagtccaagaccagcctgggcatcacggtgaaaccccatctctactttaaatatacaaaaaattagccaggcatggcggcgtgtgcctgtagtcctggctacgagggaggctgaggcaggagaattgcttgaccctgggaggcagaggttgcagtgagccgagattgtgccactgaactccagcctgggcgacagagcaagactctgtctcaaaaaaaaaaaagaaaagaaaagaaaagaaaaaaaataaagccctgttgaggacttgtaatatatcaggaataatgcaaaaaaaaaattattcagacattttgcagcatgaaacacttcagtaaatttatgaagctttagtttggtcttttcctttttctcctgagggtgatttttatcagttcctcaagattttttattagtgtttctctgtggctctcaaaaacttctttatttttatgattatttccttatattttagagactgggtcttactctgtcacacaggctggagtgcagtggcgaagtagctcactgtcaccttgagccatgatcaagggatcctcggcttcagtccctcaaagtgctgggattactggcatgagccaccatacctggccaggccaagaagttctttactttcttcctcaatgatgtataaacaaagccatcacgatccacttgctaggcgacttgcacaatgagtttcacttctttgtcaatagaaacccttggccaggcgcggtgctcacgcctgtaatcccagcactttaggaggccgaggtgggtgtatcagttgaggtcaggagttcaagaccagccaggccaacatggtgaaataatactaataatgtaaaataatatctctactaataatacaaaaattagccaggcatggtggcacatgcctgtaatcccagctacttgggaaggtgaggcaggagaattgcttgaacatgggaggtggaggttgcagtgagctgagatcacaccactgcattcccgtctgggcaacagagcaagactctgtctcaaaacacaaaaaacaaaaaaaaaaaagagaaagaaacccttaaaattctgaacacattccacatgcattgactgtcaggcttcgttgcttccattacctgtttgtttgtttgtttgtttatttatttatttattgagacagggtcttgctgtatcacccaggctggagtgcagtagcatgagcatggctcactgcagcctcaactttcccaggcacaggtgatcctcctgcctgcacctcctgagtagctgggactacaggtgcacaccaccacgttcagctaattttctgcagagatgaggtcttgccatgttgcccaggctggtcttgaactcttggactcaagagatctgcagcctcccaaagtgctgggattacaggcgtgagacaccacacctggcctcccattgcctgtttaaatagaaatgatgcaactagcaatatggaaggacttccagatctttaccacattaagattagggtcagcatccatggctctgggagtcaagggagaatctcagcctaatgtatgtggctttgaaacagcaaataatgcttagatcagcagagtgaaggatggagtcatgttgggacaggaaaccttcattcagcgcctttatgagcacattcataaagtgtgtggtacatcagtgtggtattgttgtgtcctgcagcacaaagccagattttttctctttgaggtcctgcttgacttctagaatgaagatatttgaaactgaatcagggaaagtactacagtcacccaggactttgcatttgattgctagagcacaggcaggtttttgtttgtttgttttttttgacagtctcgctctgcagccgcggctggagtaaagtggctcaatctctgctcactgcaaactctccctcccaggttcaagcaattctgtctcagcctcccgagtagctgggattacaggggtgtgccaccatgcctggctaatttttgtatttttaatagagatggggtttcactgtgttggccaggctgtcttgaactcctgacctcaagtgctctgcccatctcagcctcccaaaggctgggattacaggtgtgagccaccgtaccgccgttttttgtttgtttgttttgtttttttttttaaagggcaccaggatttgtagaatgacagccctgtagaactacactgcccctgcacttgggggcaagggcaaagggtggaggggaatagcattcagaagatcatgagttgctttcaaaccagggccttgtgtttctagtttggaaatattaaatgcagttgggcatctttccccagaagatagcaaccactaacctcatggtattctggaagatggccttttcaccagtaatttttcttttttttgagatggagtcttgcgctgttgtccaggctgcagtgcagtggcacgatcttgactcactgcaacctttgcctcctgggttcaagcaattcttctgcctcagcctccgagtagccgggattataggtgcccatcaccatgcccggctaatttttgtattattagtagagacggcatttcaccatgttggccaggctggtctcgaactcctgacctcatgatccacctgccttggcctcccaaagtgctgggattacaggcgtgagccaccgtgcctggcctatgccaataaacctttctaatagctctgagtgggttgtgctgtctgttcctctacagacacatctcaccaatagtttgtgtgtttttgaggtttaaatgggcttctaaaatcattatgccatccttggctggttttgaaatctttccatccaaaggctgacttctctagtaggaggtttgaactatgacttgagatgaagagtttttttcttctctttttttgccacgtcttgccattgtaaggcacatatttctttttggttttctttctttttaatatatagaggcagggtcttgctctgttgtccaggctggagtgcagtggtgcaatcatatctcactgcagcctacaactcctggcctcaagaggattagcttctggtcttgccctcccaaagggctgggattataggcctgagccactgcacctggcccagacacatatttctggtttttgtctttcggtaatgtttagtggcctttctattttcttttttctttttttttgagacggagtttcgctcttgttgcccaagctggagtgcaatggtgcaatctcggctcactgcaacctccgcctcctgggttcaagtgatactcttgcctcagcctcctgagtagctgggattacaggcgtccgtcaccacgcccggctaatttttgcatttttagtagagacgggttttcgctgttttagccaggatggtctcgaattcctgacctcaggtggaccacccacctcggcctcccaaagtgctgggattccaggcgtgagccaccgcgcccggcctgccattttcattaaccacatatcttcgttgtcactttagcagttgtaggagaatctgctgacctcgcttcacaaattttttgaatcttgattgaatgtacagattttttgaggccgtattttttttttttccactttggggatagacttgtatgctagcatggaagggaattgtttcttcggttgagtgcctaaagtgcttgatggcctttcagatggatcatgtcatacagaaaggaagtatcttaaaacactacaatctagtttaagacataaaacagtagaatcgctgtcagcgtcacaagatacaaacgaagggctcagaactgggaccaagagaacatagtctccccatcttacactcgctcggaatgggggctggccccactctgctctatttaatctgagcactgttgaatgaatctgcgatgaaactccacatttcctttaatcctcacaacaaagataaaccaatttttagattcgtaaactgaggcttagagaagttaaacgtattgtccgagactacagaactggaaaatggcaaagtcaagatccaactccgaagagcctccccctgcccactagcggggaggaaatggcaaatgacacagcaaaaaatgtttaaaaccaggattctcggtcgccgtcccgcccagcgccaacgctccgtcccgcctcgcatcaacgcctcgctcctccccgcccagcgccaatgccccgccccgcgcagccgcccaggtgccagttgcgtaaccacggcaaagctcgcggcagggggcggggcagacgctgactgtcgccgggcggcggtcacgtgagcgggagcgcagcaggccggcggtccgagtgcctcgcgcgcgccccacagcggccgcacgcgtctcgggctctcctcccagtagttcactccttagtggctacagaaactggagcccgccatcgggctttcccctgaactgcagcttccgtccccgccaatctcttctccggccccagcgctgactttcatgcgtggagcattctggcccggaacagagatcccagggcggaaactagggcccgaggctgaaagtccgttcttggcggcgagggccgccgctaaactggctgctgagggcgtctctagctcgggttccagaagagagtggaatggactgagtgcttgtgagaaacttcctaattgaggcttacctactaaagttctttacgttttaaagggttccattgcatcagccctcaaaatgtttccttccccagccctctttcttctatcatggtggttatgtctagggactctccactgggagacaatcattttgttctccccgaggagggaggtcagaagtgggagacacccaggttgtgttagaaactatggtagctggggcgatggctcatgcctgtggtcccagctactcaggaggctagggcaggaggattgcttgagccctggaggtcgaggctgcagtgagctatgatcacgcctgtgaatactctgggaggatgggtgacatagcaagaccctttcaaaaagaggagaaagaaactgcagcgtaaagtagcacacctgttacaaaggtaaatgctcttttgtctatccttgctatttttaaaaatactcaatttttcctagttttccttttttgttttttgagacagtctcattcggacgcccaggctggagtgcagtggcttgaacttggttcactgcaacttccacttcccaggttcaagcgattctgttgcctcagcctcccgagtagctgggcttacaggcatgcgccaccacgcccagctcattttgtatttttagtagagacgggatttcaccatgttggtcaggttggtctcgaactcctgacct

SEQ ID NO: 96247 - DNA, 12797 bp, Homo sapiens
  misc_feature (1)...(12797): n = A,T,C or G
ttgtcctcccaagatgctgggattacaggtatgagccaccatgcccagcaaaagccccaattaaaaaaaaaattattattatttttttaaccatgacacagcctcaggaggtcctgatgacatgttccccaaaagccccaatttttaactcccaagctgctctgcctctcatatcctattgtaatcacatgtacttcatcctgaggtggtagtggaagggtaatgatctgcagaaagactgaagagaaaggagttggactgtaagaatattctgtctcttgtccagtgctatccaaggccaaacaccctgtgtctggcagactggggtctctggagtagttgtatttcctgggaccaggaaagctagctcagtttttctggagaccatctaatgccaaactgtccttctctctctcgctcactcatcatacatttatagaaacccggctacatttcccacactgtgcttgatcttgggaatacaatggtcctgggggcaggacaggcagagaaagaaaacccctacagctcaacatggttattgccatgaaagtcaataaaagaaagtcagtgagagcaggaggagggagatgggggccaaccctgcaggacagaatcaaggcgcaggaaggctgcctgggagacatgatacttgagctgagcattagagaaacatgcaccacatttgcttgcagcatatttagagtttcactttttacattaaaattgttttgggcggggcccggtggctcacacctgtaatcctagcactttgggaggccaaggtgggccatcacaaggtcaggagatcgagaccatcctggccaacatggtgaaaccctgtctctattaaaaatacaaaaatcagctgggcatggtggcgtgtgcctgtaatctcagctactcaggaggctgaggcaggagaatcgcttgaaccagggagtcggaggttgcagtgagctgagatcatgccactgcactccagcctggcgacagagtgagactccgtctcaaaaaaagaaaaagaaaaagaaaaaattgtttttattgctctgggtctttgttttggtataagatgtgaggttcaaatctaccttaattttttttcaaatggtaagctagttgcaaatgcttttcaaacaatccatctttcctcactcactcaagatggtgcctctatcatatgctacattggtatatatgcctgatctattttctctttttattatgttccatcaatctagggaaggaggcgctagactgcagtggtaaagtatgcaggctctggaggaagatcggctgggttgtgcctcagtgtcctcatttgtgaaacggagatagtagtacttatttcttttttctttttctttccttttttctttttctttttttttttttttgagatggaatctcactctgttgcccaggctggagtccagtggcatgatctcggctcactgcaacctccacctcccgggttcaagcaattctcctgcctcagcctcccgagtagctgggattataggcatctgccaccacccctggctaattttgtattttcagtggagacctggttttaccatgttggccaggctggtctccaactcctgacctcaagtgatccacacacctcggcctcccaaagtgctggcattacaggcgtgagccaccgcgcccggccagtagtacttatttcgcatggttgctgtgaagattgactgagataatgcacataaagcactcatcacagtgcctgacacataggaatcatagtgacatagagctgacacatagtgaatgtcagctgttgtgatgaaccctaactgcccattcctgtagcagcaacacagtagaatgaaagtgctaagaatatagttttgggtccaatgaaacagctttgctgtttactatctgcacaaccttgagctagttacttaccttttgccctctctgtgtcatggtttcctcattcatacatgggaatagaaaagtacctacttcattcggctgggtgcggtggctcacgcctgtaatcccagcactttgggaggccgaggcgggcgaattgcctgaggtcaggagtttgagaccagcctggccagagtggtgaaaccccatctctattaaaaatacaaaaattagctgagcatggtggcaggtgcctataatcccagctactcgggaaactgaggcaggagaatcgcttgaacccgggaggcagaggttgcagcgagctgagattgtaccactgcactccagcctgggcgacagagcaaggctctgtctcaaaaaaaaaaacaaaacccaaaaaacagaaatactttataatttattatctatccttatatgtggtggtgtaagcccctaaaatgttctggggagtttcagggccaagtctactgtgtatgaataaaatggactttctggatctgcatctgcaatgctcgtgtccagcccctgtaagtataccaatatttgaaagtcattgtgaccagtgagtccttgattgagaaaccagaaagatttggtgtggaaatggaaatgtggctagggctttgaaggtcgtatagcaggtttaaaannnnnnnnnnnnnnnnnnnnnnnnnnnnnnnnnnnnnnnnnacccgagggggcgaatcacctgaggtctggagtttgagaccagcccggccaacaaggtgaaaccccaactctactaaaaatacaaaaattagccaggcatggtggcaggtgcctgtaatcccagctactcgggaggctgaggcaggagaattgcttgaacccgggaggcggaggttgcagtgagccaagaccgtgtcatttcaccccaacctcggcgacaagagcaaaactccggctcaaaaaaaaaaaaaaaaaaagtttgggctgagcgcggtggctcacgcctgtaatcccagcactttgggagtccgaggtgggaggatcacaagctcaggagttcgagaccagcctgaccaacatggtgaaaccctgtctttaataaaaatacaaagatttgctgggtgtggtggtgcgtgcctgtagtcccagctacttgggatgttgaggcaggctaatcgcttgaacatgggaggcagaggttgcagtgagctgagatcatgccactgtactctagcctgggccacagaacgagactctgtctcaaaaaaaaaaagaaaagtttttatttgttttaatttttactttaacaaaggaatttgtatagttttaaaagccaactagttcaacaaatatttttcggggtggcggggcattttcaagtgaaaaccgggaaacctgctcaacaaattctgaaagctgtaacttcggtgggcgccgtggcttacgactgcaatagcagcactttgtgggggctgagatgaattgcttgagcccaggattttgagaccagcctgggcaacatagggagaccccgtctacacacacacacacacacacacacacacacacacacacacacacactagatgggcgtggtggtggtggcccacttctgtagtccctgctactccagagtctgaggtgggaggatagcttgagtccaggaggtcgaggctgcagtaagccatgtttgcaccgctgctctccaccctgggcaacagagcaagaccttgtctgaaaaaaagaaaaagaatagaaaaaaaaagagctgtaactctacaaggcttttaatgaaaaataaccatcccctgctcctcttctttaacccttacatatacaacctacatatacaactacgctccagtttctaggctgcttcttctggtacttatctgtacatttcttcaagcaacactcccacctaggcctcccaaagttctgggatcacagctccactgtccccagctccaatttttagttaaatcaatacttagtgtttacatcgttacggctgtgaaaattttcttcacagctgagccatttgtgtttgtgctaagactgtgaatctgtaaaaactgcttttgttaattaacatccaggacatacggctgagaaacttcattttctaaaatcatagtcacaaactttgctatttgaaatcagtcagtgcgaatggaacatcctactcttgccagaagttctgagccacgtggattactttggcctcccaaagtgttgggattacaggcacgagccactgtgcccagcctagatagtgggtttttggacactatattctatatttatcttgactttgtaatttccaagtggtccctcagcttggacttcttgatcccttcacttaaagttatgcttacctcgaaccgatcaaaacactgcttcatttaaattttagctagcctatagtatcagccacttgggaggctgaggcaggaggatcacttgagcccagaagtttgagcttcgcctgggcaacataccgagacttcaactctaaataaataagtaaataaattttaaaatataaattttaaagtcaagcctttcccatatcctgttgtattagttcattttcacattactgataaagacatacccgaaactgcaaacaaaaagaggtttaattggacttacagttccacattgctggggaggcctcagaatcatggcgggagacaaaggcacttcttacatggcggtggcaagagaaaaatgaggaagaagcaaaagcagaaacccctgatgaactcatcagatcttgtgagacttattcactatcatgaaaatagcacgggaaagtctggcccccgtgattcaattacctccccttaggtccctcgcacgtgggaattctgggagatacacatcaacttgaaatttgggtggggacacagccaaaccatatcatctgaatgaccatatttcttcctttttaatgagttgccccacagttcttctagtgtgtgatctctctgttgtggcaagttaataaacctaactgtcaaactacagatgtggtctttataagacaggcttatcaattgtctttcctttcttatataactctttgtttcctctgaagttgataattgcctaaccttttctcttactttgttctctctctctctttctctctatacataataaattcatccccaaaactgttctaaagaattatactctttctttcaatgccttcaccacttcaggtaattcttctggtctttcttttcttttctttttttttgaaacccagactcctggagcccttcttcctctggctccaagttatattggttgttgtccttgtaaaaatatgactacctctgttctaacaataatctcaagccttcatggttagttgtcaatgcaactgcttcactgactcctgctttccccctccacctgaaaggggtcgagtctcttgacatctctgtatctccaaagtctatcatggtaatcaagaaatgttctggccgggcgctgtggctcatgcctgtaatcctagcactttggaaggctgaggtgggccagtcacttgaggtcaggagtttgagaccagcctggccaacatagtgaaatccccgttctctgctaaaaataaaaaaattagcccggcgtggtggcgcgcgcctgtaatcccagctgctcgggagacagaggttgcagtgagctgagatcgagccactgtactccagcatgggcaacagagcgagactttgtctcaaaaaaaaaaaaaaaaaaaaaaaaaaaggagttctgtcccgcctaggcactatagagagaccctgtcaagaatggaaagaaagaaatcttcgaatgaatgaactagtgaatgaaggaatggatttcagcgctggagaattgagtttaaggggaatggtattatattcccatcttgttgcaacatttaaggatgtcctcaagccccacgccagcctggagcgtagcccaaggtgggaaagcagcgccgaggcctctccagacccggcctgctccccgtttgcggagcacagcccactgtacccccgcctagattgaggcgctggccaggagtacaccaggcgccgccaggtgaactacaactcccagaaggccgcgcggaagcggaacgtgaaccagggaggacttccggacgccaacatccgggccgcgcggggaaggggagacgtggggtagaggtaagtgtaggttgaaggctgaatggggagggcgagagatggggagtgggtctcaaatatagagrgggtagcaaggtggaaggggcccttccaccttttgtgggcactcaagttcggacctctgggatcggcgattcccctctggccagggctggttttaatgctctccgtgggcgggcttcggttgagtttggtccgcttttcctttctgctcctcaggggagcattgcttccttctctcgcagtgaccatgacgaaattagcgcagtggctttggggactagcgatcctgggctccacctgggtggccctgaccacgggagccttgggcctggagctgcccttgtcctgccaggaagtcctgtggccactgcccgcctacttgctggtgtccgccggctgctatgccctgggcactgtgggctatcgtgtggccacttttcatgactgcgaggacgccgcacgcgagctgcagagccagatacaggaggcccgagccgacttagcccgcagggggctgcgcttctgacagcctaaccccattcctgtgcggacagcccttcctcccatttcccattaaagagccagtttattttctaacttcgtttagtttgagtatggaaaacgggtattggggattctatgtactaacggtcgagaagtgaatgtgaaagaaccaccttcttgaggccatctcagcctttatctttgcatcttgctggtgttcccatttttgctcccaaggaggcaaagaccccttctcaatatttctcaggatggaaatgacatttcactttcctggtcctttcaaccctgtaggaagtacttctttttttttttttttgagacggagccttgctctgtcgtccaggctggagtgcagtggcgtgatctcggctcactgcaagctccgcctcccgggttcacgccattctcctgcctcagcctcctgagtagctgggactacaggcgcctgccaccacgcctggctaattttttgtatttttagtagagtcggggtttcaccgtgttggccaggatggtctgatctcctgacctcgtaatccgcccgcctcggcctcccaaagtgctgggattacaggtgtgagtcaccgcgcccggcgtactacttctttttttttttttttttgagacagggtctcactctgttgcccaggctggagtgcagtggtgcaatcatggctcactgcagcctcaccctcccaggctcaaacagttctcccacctcagcctccagagtagctgggactacaggcatatgccaccacgccaccaggctaatgtttaattttttgtagtgacagggtctcgctgtgttgctcaggctgttctcaaactcctgggctcaagtgatcctcctgcctgggcctcccaaagtgctgtgattacagacataagccaccttacccggccagaagtactttcttgaagcctaagttccattcttcataacatccaagttttgttatttttaaggccttcctgggtctttccaaccttttggttctttgagataccttttctgagcctaccctaccaacctgagaataactgtggatctatccttcaccaaaccaggcaggtttagaattatgagtagagaatgaaccatcgtgggcaggggtggggaacactttattttaaggcatattcatatcagcatataaggcatattcatatcacaatggcacgatctcagctcactgcaacctccacctcctgggttcaagcaattctcctgcctcagcctcccaagtatctgggattacaggcatgtgccatcatgcctggcyaattttgtatttttagtagagatggggtttcaccatgttagtcaggttggtcttgaactcctgacctcaggcgatccgcccaccttggcctcccaaagtgctgggattacaggcgtgagccaccgcgcccggccttttaaggcatattctaaagattgcaccccaacctccaaaattaaaaaaaaaaatctctaaaaaataaaaagtgatttcatctcctaggccccaatcaatcatctaagtaaagctttttctttggtccttttatcctcaaagtcatctcttgttcccacaacccactgcacctgggaagctggacagcaggcccagctgaaacaaggaggtctctttggttcaggttggcactaaggtgcccagtggtcagatgagcagcctcaggtttgcaggagccagtagttcctgtcttgctcctgggggtacttccagaaaagccagaagcggataaagctggtgacgattcctggaaagttggacacctgaaatcacaagaactgctatgaggagaggagccagttttccatcttgcacccctgtcaccccatcccagttgtgcttaccatgatatagggatctctgagtcgaaacccatagaggcaccaggaggcagaggtgagaagggtagcaatggtgagtgggtaggagagacattgggttgatttagtttgaatcaccttagcctgtgggaaagaatggaagactctcttggcccaagcacatcgtaaagcttcacttgcctaagaatttcctcaagaaaaaggtcagacaccctccctgatctgtcacccaacctttcctgcctcccactcgcccacttctactgccttgtcttcttccagggtttggatctccccttcctcgggactgtaagccatagtatttggctatgagagcctgactcttatctctcctacctccttggacacccccactcaccaagtcagccagtggtgagaggtacatgctgatggtgaagacactgcagaagaggcccaactgctgaagccgggcctcagggttgggtaccaggagccaaaagtagccataacccaggagaaggacccctagcagggttgcagtctgtaggagcacaacacgctgcaggggagagagtacccttacttccagatgtgcactctgacttccctgctagagttaattcatcctgccttctccagtgctccaatggggaagccaagctgtctaggcctccagcactgcactgtcacagcttctttcccaccaccaacttgataggaaagtcttatccacccacaacactggagacttctgggggagataaatatgtgtttttttctgtgtgcttggcacacacagtaggagcttcataaatgcttgtgtgatttagcagggacgcagagctaatcatctcattctcacccacaggccctggctctgaaagaaatatcagagacaaaagccctttccccttagcttgttggctgaagcccagggcaggcagcataggcatctcaggctaggcagagctaccagccttgcctaaatgggggcaatgtgttcatctcagaaggctggcttcatagaggaaggggacctgcaaggctggagaggccttcctggaaaaggtggcagtgccagctgttacagtcttctaggaaatagtgtttgccctgccagcaaggcagggcgtgcagcagataggtgggtccaagggagggcctctaccttccgagggcagtaatgcagatatgccaagatatacagggtctgaagcgcagcacccactgtgttgacgacgatgaggatcccgtctcccttcaaagccccataactcagccagcccaggttgctgcagggtggaggggatggacatggctcaaagggttcagtgtgagaggaggacccaaagggtctttcactctttttttttttttgagacgtagtctcgctctgtcgcccaggctggagtgcggtggcacgatctcggctcactgcaagctccgcctcctgggttcacgccattctcctgcctcagcctcccgagtagctgggactacaggcgcccggcaccacgcccggctaattttttgtatttttagtagagacggggtttcaccgtgttagccaggatggtctggatctcctgacctcgtgatccgcccgtctcggcctcccaaagtgcagggattacaggcgtgagccaccgcgcccggccaaacctctttcactnnnnnnnnnnnnnnnnnnnnnnnnnnnnnnnnnnnnnnnnnnnnnnnnnnnnnnnnnnnnnnnnnnnnnnnnnnnnnnnnnnnnnnnnnnnnnnnnnnnnnnnnnnnnnnnnnnnnnnnnnnnnnnnnnnnnnnnnnnnnnnnnnnnnnnnnnnnnnnnnnnnnnnnnnnnnnnnnnnnnnnnnnnnnnnnnnnnnnnnnnnnnnnnnnnnnnnnnnnnnnnnnnnnnnnnnnnnnnnnnnnnnnnnnnnngaactggacgttgtccacactccgggtcattcgcatgtgcctgaggtccgagctgtaatggggccccgaagggaggggtgggggtgggaagggagaagcagagtgctagagggggatgcccaatgcctgtcatcctttccggaccaccgcagaccccgcccccctctcccccccgccagctatcctgccttctccttcaggcctagtgaccagcctcgcccttgtaccccggtcccctcgacccgatcccactttgatcccggttccggacgagccaggtgctgtggccacgtctctgtcccctctctctcctttcctgactgcctagtcctccccaacccagcccggccgcactctcacaggccggcggagaacatgccaagggtgaagaccacgcatgctccgtaaatgagcgagtccagaaagccgcccgcctccattacgactagagtcggatcccgcgcccagcgcccgccgckagcctgcggttgcygggacctactgcagcccagacctgcggctctggagccccgccccgcgyactcggctccgcccccgcacgctcgggccgtccctccggaaactgcgccgaagccccaccctccctccgacgccgaaccggaactcgcgcccctctcctccgagcgccttcccagtaccttggtccagacctcttccatgtcccggtcagtccccttcctagggctccgcgggtgtgtccccgatacctgccgctgctcacactctgcctaccccttggatcatctagacgcccccagtctcaacgctcgtgttcccacaggcctgtgcgccttcggcggtggacctccaaacaaaagcttgctagtttaacaagacttcagcacgctttccatccagagctccacatcagaacctcagttgcccagggtttgggaagtttttttctggagtgtgctgccgaagctttttctcaaaataacacattaccaggaatcaccaagccttcctcttttgccctccctctcgggtcaactttacatgacgtggccaatccactgacgcctctatcactgacccccggtccaacccacttgttactgggaactttccctcccagcctcccacacgtctctgctagtgtggctgtggggcggggccgcatgcctcagctggcgttcccagcttccctgactcaccgaaacagcgtgagtacctgaatggtagtatgccaaagccctgcggtgacggagtgggagtggggtagaggtcggataggaagaacttccagagtggagtgcagctcagaacccgagagacagctgtcaggagcactccggtcctggacagccctcagaggaggaaacatcccacccttttggcctcgtgaggggcacacattctttggagagaaagaaattcaaacccagttgctactgttgtagcacagagagcctcgcacttagcagggactcaatggtcatatgttttaatatggagtggcagaaaagcatgtccgaaaaaacacattgctttattttgagacaaagaacattgtataaaaaaactccagttgtagaaatcaggacagacacacagcaacttatatacagatactatacacgtgggccctgccctttaggctacactctaggcagaatgtacacatgggcactgcccttacagctacactctaagaacaggttggcacagcccccctgctggcacagctctggggagtgctgccccaggatgggagagaatgcagtacctggctacaaacttctctgtggcagctccacagatgaggtmttgctgggagatgctgggtcagcccaagcatgctgcctctcctgtacctggcttccaagcaagaaactgtttcttgcttttccttcagtcagttcatctgggcatcctggctctctcctggagggggcatctttgacaagctttgcccatccacgtggccccttccagctcagctcccactgtgccttaagggaccatgcctgcacagcttgtttctttggcttaaaggcaggaatggtgggaaaggactgtctccacttctttctccatccctccgaggtgaaggtggggatggcactgtcgggctggttggcctccttccggttgaaaaccttaataytgacccgttttgaggctgctaggtgatagcttatgcctgtggtgggagtggttcccagrgctgggggctctgaaagtggccccaagacaggtttggagtgcctgtccctctcttcagcctgtccctctttaaggccaggtgtggcayacaccttcacggggtttgcagcagcagaagtggaaggagcagcacagtccaggcaagtgggaagaggcgtggggcagcactgtgaccgatgctatgtagaacccgcacctctgggtcatct

SEQ ID NO: 96248 - DNA, 48264 bp, Homo sapiens
  misc_feature (1)...(48264): n = A,T,C or G
aaacaataatttttttaccacttcttagtctatttctgcagttttaatttttgcaacagagaatgtattgtatttctttttttttttttttctcttttgagacagagttgtgctctttgtcacgcaggctgacaaagagtagtgcagtgatgccatctcagctcactgcaacctccgcctcccaggttcaagctattctcctgcctcagcctcctgagtagctggcattacaggagtgtgccaccatgcccggctgagaatgtgtttcaatagatgtgtgtcttttttttttggagacagagtcttattctgtcacccaggccagagtgaagtggtgcaatcctggctcacagcaacctctgcctcccaggttcaagcaatccacctgccccagcctccccaataactgggattacaagcgtgcaccaccatgtgcagctagtttttgtatgttttagtagtatgtttttgtatgtttcaccatattggccagggtggtctcgaactcctgacctcaagtgatctgcccaccttagcctcccaaagtactgggattacaggtgtgagccaccgagtccagcctcaacagatgttttaattgaatagatgttaaaataattattaatgttcatgatgatttaacttcaaggatattccttaaaacgtgaacagaaagaacctcctcatgattttaacagtttctgatatttgctttttctgagagtttactctcttattttccatctagttcctaactcatctggaatttctgttgcataaggtatgaaacagaagctatctttccctgtgcactctccacggaggcgttcaggcactcctggctgacgcgtgctgcctgcctccttcacggcctacatccctacacacacagatgcctcttgtgggaccaggtgcagtgaggcctgctttctaacctggattccctcatccacaaggtatggttacgaccagagcttcctcctgagagcgcagggagcttgtgacacctcccagaaatgctcaggggacgctggccaccttgcagagaaacccctcctaacgggaagggaacatgggtacgcgaggctccggtactgaccgcggctgggcgacagcaggctacttggataggggacgctcactctcctcagctcatccagcttctcctgtagcttccgcacctggctgtcggagcggctgaccctctgccgcaggctcttcagctcgccgttcttcttctccacctgctcccgcaggcagcacacctggctcttgttctgccgggaggagaagcagtaggagtgcagtgagtcgatgagcttgcaggcccctgacgccgacaggatgacctcgttgatggacatggggctggcgtcgctgtgctcgctctgcacggcttccgtggctggctttggggtgacgtcggcaggaggggcagaggggctctgggaaggcttctgcggtgtcgcggtaagtgatgagctgggagggctctgggccaggcccttgtcgggtcccaggctgctcccactgcagcttggttccacatctttcttcagcctcttgcggtcaatgggctctcgggggacagatggcctttctcgggtgtgcttagaggagaaactgtacgaatgaagtgagccgataaatttgcacgccccagatcctgggggcgtaaagtcatccatagaaatgccactcttatctgtcacgcccccttcgatggaggaagtggcgctctcatcgccagcatctgtggcagacgcttctgcttttccctgactgcctgccaccatggtggccagtccatctcctggagtccgttccagagcttgctgggcctgctcctggctggcggcctcctgggccgccctgggtgtggcttcaccttgcagagcagcttgcttcaacctgcgggactctggcttggccatcgggtttccactcgaggacggtgaccaacctgcagctcctctgccggtggcggcactcgagtgtcccctcacaccccctgtggccttgctggcatcttttctccgggtgcggccatggcctccagcccccctcttcttctcggtcaggtggaagatggatggcacggccgtgggcttcagcaggcgatgctggtcctccagcctcttggagaagctgtctttggtgaaatgctcactacagagaaatgaatacttagtgggagtccagttatccctctgaacagcttttaaccattggattagacgttttgagtcctttagggggaacctacaggacaaatgacaaaaagtaattagaaataattaaatgtctccccttaaaataatcaactgtaaaagcaaaacaagtatttttgcacgcaccctaagccgtattgacttcatccacttaaaaaaatacttcaaaaagatttaaagaacatcttctacctgcagttattactggagtagaaatctgaaagacccgttgtctacccatacagagcttatagtctgtagggcggatgggaaagaaggtaaccaactgctccccaggctgtggtaaatgcccaatggggacacaggatgctgacagacagtgccaggatggcctcaggacagcaggaaatagctcctagaagctgactgctaaccaaccctcccaacttgcctggaaggtaggactctgggtaccaaaaccagggccagcatccacagacactagggcgtgagaggtcaggactgcatggaggcagccctggctgtgcgcaagcagctgagaatctggagacctccagaagactccagagctacagttctgtgttcctgttgcatgcccacctccaggagtaaaaatgctccttttaaaagtcaaccagcccagggacagggcacaatggtgctcacctgcagttccagttacttgggagcctgaggcttgagggttctttgagcccagaaattcgaagttacagtgagctaagactgcaccactgctccccatcctggggaacagagtgaaacccggtcttctcccctcaaaaaaaatcaaccaactcagatgatccttgaggacattatactgaatgaaatagggcaggtgccaaaaaacaaacactgcatgataccactcacatgaggtactcagagtaatcaaattcatagagacaggagaatgcgggttcccagagcctagggagaggaggactggggtattaatgtttaatgagtccagagattccgctttacaaaataaaaataattctggaggtggatggtagtgacagctgcacaacaacgtgaatgtatttgttgccatgaattgtacactgaaaaagcggtaggaaaggctgggagccgtggctcatgcctgtgatcccagctactctggaggctgagatgggaggaccacttgggtccaggaggctgaggctgcagtgagctacggtcataccattgcactccagcctgggtgacagagtgggactctgtctccaaaaaaagttaggatggtaaatttcatgttacatgtattataccataatttaaaaatggtgagaaaaaagcaaccagcgcaggaagatactgaataggatgtttagtcatttctttattacctaataaagatccttcataaccatttcttcattaaggcaaactctgtgtttaagaacataggcctgggccgggcggggtggcttatgcctgtaatcccagcactttgggaggccgaggcgggtggatcacttgaggtcaggactttgaggccagagttcgagaccagcctggccaatatggtgaaaccctgtctctactaaaaatacaaaaaaattagacaggcgtggtggcgcttgcctgtaatcccagctacttgggaggctgaagcaggagaatagcttgaacccaggagcgggggttgcagtgagccgagatcgcaccaatgcactccagcctgggcgacagagggagactccttctcaaaaaaaagagaaaaaaagaaaaaaaaaccaggccctaatgtgcacataagggacagggtggtcagttctaactgctatttgctccacctgaggccagtgtggaccaggacaaatcctaacaggatggactgggccgttctaagcaacaggaccttctaacctcctttctgaacactgtgaggccaactgcaaaggtacccccccacccccaattccgatgtcctttcctcccataccatgttagaccgttgcaacacgttgcctcgttttcaaaaaacaataacaaaacttctaggacacaagctctgaaggaaattgtcaagaaagtgcgctggctgacttgtgaaataatctaatgttactaattcttataatacattgtaatgatttaagacttacagcaaactactgtgaactttcaataaccctataaataacacgtgccattcccgtctttaaaacttaaataacaccatgcaacataaaacagaaacatctccaaagtggtttttaaagtctgttcgcggttctggtgcctcccgcgtgtaatccgcagaaatctcactgaaataggctgaactcacaaggccttagaggggtttgggccctgccgcgggggcccacgtgggaagcggccgagagccccgggccaggctctaagggagcgcaggaggatgccgtccccagccggccgtcccgtagactctccgcgcgtacccgcgtcctgggctcgggggcccagtcccggaaagccctctcgggggctgtcagctacggaggcgcaggtcgcgtctgcccggtcgctcctgctcgcagacatccaggccgacggcccgcgcggtccggagagtcagcagtcgcggccgagcaggacaatcggcccaggacctgcgttaccagagcgtgcggctttctgaagctaggcgccggcnnnnnnnnnnnnnnnnnnnnnnnnnnnnnnnnnnnnnnnnnnnnnnnnnnnnnnnnnnnnnnnnnnnnnnnnnnnnnnnnnnnnnnnnnnnnnnnnnnnnnnnnnnnnnnnnnnnnnnnnnnnnnnnnnnnnnnnnnnnnnnnnnnnnnnnnnnnnnnnnnnnnnnnnnnnnnnnnnnnnnnnnnnnnnnnnnnnnnnnnnnnnnnnnnnnnnnnnnnnnnnnnnnnnnnnnnnnnnnnnnnnnnnnnnnnnnnnnnnnnnnnnnnnnnnnnnnnnnnnnnnnnnnnnnnnnnnnnnnnnnnnnnnnnnnnnnnnnnnnnnnnnnnnnnnnnnnnnnnnnnnnnnnnnnnnnnnnnnnnnnnnnnnnnnnnnnnnnnnnnncccggggcccgcgtacctgtggaaggagacggcgcgcttctcgccctttccctgccggttggagcagttcacgaccgcacagcagatcaccatcgcgggccttggcccagccgcgcagccaggccccggccctagccgcccgcccgcccgcggaccgccccgagggagggagcgcggcggcgacacggctcgggacgtgggccggcccgcggcgtccgcgccgtacggcaagatggaggcgcaggcgcccgcagcgggcccgcccccgccccatcccccgcccgcgtcctcgccagccgcgggttcgggcgtcttcggaccagcggggcgccgcaggcccctcgcagcgtccgtcggcaggcgggcagacgggcgggggagtcgccccggcggggcaagtccgtaccgcgacatgggcgcgccgagcacgtccgtaccgcaagatggctgctcggacggggacagagctcgcctctgccgcctcgacaactgctcctgggtcctctaagaggaggaagcgccacccatggcacacagtgtcccgtcggacagcagaaccagccgtcgtcccacgacacgaccccatgccgcccgcagggcgccccggggctcgcgtcggcccggccgtacgccaaaatggcggctcccgcgtatttccgctcgcgcgccgtatcgtcttcgccgcctgcgccggcacacctattggcccccgcggcgtcccgtcgccgcgtcgcgttgctggcccgtcggagcgacgccgctcgggtcagtcggcggccggactgggaagatggacgcaggtgaggagttgccgggggtcggtctttccgcaggaggtgctcgccttatcattggcctcccctgctcgggtcgggctgccgcgactcgcctcggggcacgccggtgcgggccaggctgggccggggcggcgggcgctgcgggagcgcggggcggtgttggtgggtggtgggcggtgggagcgggagggggacggcggcgcactgcgccgcggaacccgccgtcggttgcgctggagcttctgcttttccggtcccgtccggagcgctccggaggttgtggctgcacaggcccttgcgccaggtcggccgtggagggcggcggagcctgccgggcggggagaggcgcggcggcgaacggggcggccgcggtccgggccggggacgcgagcggcgggcgaaagcgtagcctttccgcagctgagcgtgaagggatggaagctctttaacttttatgaagttattggtaggttggaggagagaaacgtgacgtgttcatcacagtatacgtatcttttttgtttttgtyttcaatttagtaaccagtagattctccaagctgcttttccgtgacgagaaagagaaacagtgaatttgtatcatcgggtcttagtttcttggggtcctaagagagagagaaagagaaggagtgtgtgtgtgtgtgtatagggagtgttggtttttttcctatcctttcatgcttccgctccatttttgctagcaagattattttaagtcagcgccaaacccatcgctagcccagtagccctagaaatatttttacacagaagttttagctcattcattctttgtaggaactgatttgccttttaccaagtatcccccatctgtaaagaaagattttcatctggtttaattctgtcattctgaatgggattgtttttactttttatttttctggtagctacaacataaatttattaagatctgagttggaaaactgtaatgtgtattgccaatatctattaaaatgatttgtagcagctcaccacttaaatgtggtaggtggctggaggaaacaggagccctgactccctaaggagcatgttgaccaggtgtatatcttgtgaagtttgtcttttagaataaccgtcattcacggttgaactatttgcagctgtgtactatttgttgtttactattttacaactgttgtattatatctttttaggtgttattgtttgtgatgcaggatttttctcagccactctggcagccagagacctccggctggcgaggcccctgcccaggccttgcttgggtccaggctcgccgcaggagataccccatctacttggtccaccggtgggcacctggtttgcactatggcacggataccatggccaccatgactgtatgctcagcccctggcgggagtgggtgtgtgggtgagtgagtgccgggtcccgccagctgtttcaagcgcaggcagcagagtgggctctgcagagcttacagctagacatgtggcaagcaactcccacggcggactccagcgtccagacaaagggacagtggattctggtgtccagacaaggggaaggtagtggcgcccaagcaggggtgcttacaaccctgaagcccaagaggggktgttgcagagtgtcagcagccctgttactcccattgccctgctccaggctatagctctggggctggctccgtccccgctgcttccctttgctgcctcctgtcacgtggggtgtcacagtgggtggctgccctttgccggcagagggcccagggccacagtgttacagccttctttgtacttgcattcattgggtccctagttcttgtcccacgtccaagaagaatgagactacacttaacactgacaatcgaagggtgaggagggtggagaatagttttattgagtgatgaaacacccctcagcagagaggggactcaagggtggtcttccacccaaagtcgggtggtctcccttggtgtggctgggtccagggcttttataggctcagaatggggagtgtgtgctgatttgtctgtgagtatgcaaaaaaggttaaaacaaagtcactactcaaaggtgggcacaacagtgtaataaaccaattagagaaaagtaggtatatgtaaaataggtgaagggtggggattaattagaggaaagcgcaccaaacaggaagagaggttcgcaatccagtctgtggatttatccgagactcgtcgcttggctttcaggctttaaactgtggcttgaaggttgggtttcactggtgacccacccctctctgcctaggatttgtctgcctcctgcctctatcatttcgataccttgaggctggagtatcatatgagagacttggctaaggtcaaaaacacggttcagtgtcgatcatatgacctaaaatgtgaaaatcatcatgttcaagttgggagaacagttatgttgttacatggcgatactttattttatcttttattttcccttgacaactgtgttgacatggtgatactttaataggacactggatgctgctgcatgtgggatcagagtagaaaaggtgtttgcatttaaaggtctctgtttatgctgataaaaacgtatatgatgtttgtaggatatcatggggaattttccttctgacttgatgctgtatttcctttcagagatgattaatgatctgccctcctttgatctctagagttcttgaagattctgccttccttgaccatgtgtaatacagtttctgttctgatagtcattaattcaatacactgtttgttactgactgtcagatatgtgttaggcattgttctagacactaggactagagaagtaacaacatagatgaaaaccattgccctggggtagctaacgttctagacatgagaccagcattagcagcgaagtgcgtggctcctgggggatggtgatttgggccaaggatgaggaggattggaattgtagccaggatggccaggaagggtctcactctgaaggtttaagttttgacgaagacttaaagcagtgtaggaggaagggcaggtagcaagagcctggtgtggctcrggtgcagcgggtggcggtgggagaagcaggagctgaggatagaaaggtgacttaggctcagtgtagtggggccttgccagctcatagtgaggactcggtgtttattctgaacaggatggcagctcatagtgaggactcagtgtttattctgaacaggatggcagccgtttggaaggtttcattctagaggaggagtcacatgatagactgtgttcaacaggcttgctctggcatctcttttgagaatgtactgcagaggggcaagggcagaggcarcgagaccagctaagagactgttgaacaagccagcaaggagatgccagtggattagctcagggtgggtaagaggttgacttctgcatgtgttttggaggttgagacaatagaatttgtttgtagattggaagttgggagagggatgggtagagaggggaggagttaaagatggccccatagtgtatggcctgagctaagcaactcagatggaggggggcggggcgtggtggctcacgcctgtaatcccagcactttgagaggcctaggtgggcggatcacaaggtcaggagatcgagaccatcctggctaacacggtgaaaccccgtcgctactaaaaatacaaaaaattagccgggcatagtggcgggcgcctgtgatcccagctacgcaggaggctgaggcaggagaatggcgtgaacccgggaggcggagcttgcagtgagccaagactgcgccactgcactccagcctgggcgacagagcgagactctgtctcaaaaaaaaaaaaaaaaagaaactcagatggggaagacttggggaggtcctgtctggtgggaagctttctgttgcgagtttggatttatgtgtgttgaatgtgaggtggatgttagacatccttgtagagcagtgtccagtgggcttttgggtctacaggtttggagctaaaagaataagcctgggctggagatagactggaggtcacatcagatgaggtcacccagggtgtgaatgtgggtgggaaagaaaagaggccaaaggcctctgcgggtgtggagaggtccaggaggtggcaggcagaccacagtgtggctgtgttctccaccagtccctagcactgtccctaaaagcatgctccccattcagacgactggcaggtgccagcacttaaatagccacactgcccattccttgaggacagagctggtgtcttgtgcttgcatttctagtgcatcacttgtgtctggcatgtggttggtaataaaaaaaaaacagaacttgaattaataataacctacacattcccctactatcaaagctttcagtttgtagagtttaacataaatccagtatgttagcataacatgtaatgaatgcagaggctgctggggagtggtttttttttttttcttgagacggagtcttgctctgtttcccaggctggagtgcggtgggcgcgatctaggggagtgggttttaatgtgcgcaatctgcccagtgtgtgcactgaaacagtgttttctagctttctgatgtagctaaatttggagttcctttctctctttctctgttttcattcaggactgaactactagcattctcatgtaaactcttggagatttaaaaaaaagtagtaatcatatgcaaactgttatcttaaacctaagagctttctaaaggaaaagaagaacctttgttgaatttataaaatataaatcttttggaaaataacttctaagtgttttaggaaggtttcttcgaaatgaagtggtttacagtaagctcttaaatttactcgttttttttttgtagtcctctctggttgaatgaagtgtaattggtactaaatggagagaagttggttaaattcattgagtacaattccctacatttctgcctgtcagattagtagtactaagtcacatgttttttctgatggaattactatattattaaaatgccatctgccctcttctgcttgtgatcgcagaagtcccagggaagagggcgtggaaaatcaagtgtctgggatccagccgaccaaatgggagaactgcttctaagggggactctttcttaaggtgtacagcacctctccgtctttttttttttttttttttttttttttttttttaagacggagtctcactgtcgcccaaactggctggagtgcagtggctctatctcagctcactgcagccttcgcctcctgggttcaagaaattctcctgcctcagcctcccgagtagctgggattacaggtgtgcaccaccatgcctggctaacttttttatatttttagtagagatggagtttcaccatgttggccaggctgttnnnnnnnnnnnnnnnnnnnnnnnnnnnnnnnnnnnnnnnnnnnnnnnnnnnnnnnnnnnnnnnnnnnnnnnnnnnnnnnnnnnnnnnnnnnnnnnnnnnnnnnnnnnnnnnnnnnnnnnnnnnnnnnnnnnnnnnnnnnnnnnnnnnnnnnnnnnnnnnnnnnnnnnnnnnnnnnnnnnnnnnnnnnnnnnnnnnnnnnnnnnnnnnnnnnnnnnnnnnnnnnnnnnnnnnnnnnnnnnnnnnnnnnnnnnnnnnnnnnnnnnnnnnnnnnnnnnnnnnnnnnnnnnnnnnnnnnnnnnnnnnnnnnnnnnnnnnnnnnnnnnnnnnnnnnnnnnnnnnnnnnnnnnnnnnnnnnnnnnnnnnnnnnnnnnnnnnnnnnnnnnnnnnnnnnnnnnnnnnnnnnnnnnnnnnnnnnnnnnnnnnnnnnattacctggaagtctagagatgggtctatatatttatttatgtatatatgtacatatatatatataaacatatatatacgtatatatacacataaatatatacacatatatgtataaatatatatatacgtgtgtgtgtgtgtgtgtgtatgtatatatttttccccccccccgtcgtccaggctggagtgcagtggcgtgatctyggctcactgcaacggggttttgccatgttggccaggctggtcttgaacccttgacctcaggtgatccacccaccttggcctcctaaagtgctgggattacaggtgtgagccactgcacccggcgagtggatattttttccgaagtttgactccttttctatcaggagctacatgaattaccttataaatcacatgatgtggcaygggaagatgatgaaattatgacaggggctatgaaataagacaagggaacctctccatggcgaattgctgaggcagctggtgtcaggcctaagtggatctcatwcatctgagagtcagtgaaggaacaagtgtggtggctcacacttgtagtcccagcactttgggaggctgaggtgggtggatcactggagcccargagtttgagaccagcctgcttaacatagggaaaccccacctctacaaaaaatacaaaaattaggcatgacggtgcatgcctgtagtcccagctactcaggaggctgaggtgggaggatcccttgaggccggaagggggaggttgcartgagctgagatcacaccactgcactccascttgggtgacagagccagacccttgggtgacagagccagaaggaacgtttgggaatggaatcatcgtgttggtcgatctgcagatgttagtgattgtgagcgttagttttgcacccattgtgggttctcaccccacttggaaaactggtggctgtgccccatttcatgggtgaggagactgaggctggaagaagtccaggcctgtgtctgtcctgtagctatygaccaggctctcagactccagaaacaaacctcagtaggaatcagaagtgttggccgggcgcggtctgcctgtagctatcgagcaggctgtcagactccagaaccaaacctcagtagaaatcagaagtgtcggccggttgcggtggctcatgcctgtaatcccagcactttcggaagctgatgtgggcggatcatctgagatgaggagttygagaccagcctgaccaacatgggagaaacccatctctactaaaaatacaaaattagccaggcgtggtggcacacacctgtaatcccagctactcgggaggctgaggcaggagaatcgcttgaaaccgggaggcggaggttgcagtgagccgagatcgtgccattgcactccagcctgggtgacgagcaaaactccatctcaaaaaaaaaaaaagaaagaaattagaagtgttaattccaaaaaagttatcttcctccattataaagtaagatctggaaggtcagggaggtctttgtaccgttctgatgcctcagtccatggctcctcattgtgtcttcctcttcagctggagctgcgagggtgtccaggaggggtgarttctgctcggagggcctgccgagggcattccttcctgtcctccagcatgagagggacagtgtggggcccctagagtacagggaagacctcctyataactgaagagatgcgagtctgagagtctttattggctcttttgtaggaatcgctgcaggtctctttggtccttggagccagcccgtgaggccgggggcaggctcttgctctctaaatgcagtcactcttggaggaaaggacgttatgttggattcagtgttagtaaagagactcatgtttggttgggtctctgttgaccttgtactctgtgctgcacctctgcttacagaatacctcccawccatgccggttcgtgactgctcacccgtttcagtgatctgagarggctggccctgaaagagtggttactgctcccgtgcagtttagagcttttcctgcaccttgacttgtccgtttcacagtgaggacaccaagtcacaagaaggtcactagcctgtaaggttgcgtgactgctcagtggtgggctcagacttctgactccacagctggcgctccagctgtcaggaacgtgctccaggtgtgacgtgtggacactccccacttgcagcgtcctccacagtaccgagaggagggtgcagtgtggtgggagaagcaagggatcatgttttcagagtgtccgccactagccctaggggaatgtatgactcgctcccaacagagggcaggattctcggggagggccggagtgcgtttctctggacggaggagcagagcagcttggggcacggtgtgggagccctccttagggacctcatgggtcacgttcgccgtgrctgcgccactcctgttcactgccaagcaccgtgattgctccttggatttgctcccctggggtttcctggtctccttgatggtttatacagtgagcaatctgaggccacacacctgtaattttcacagttatagctggaggtgtggtggtgtatttgaacttaatggaacacctcttattcccttcactctgaagttggcttccttgcctataaagtttggtgataaacctaagaaatacacctgctrtgcattttactgcgtccgtgatgaaaatccctcaacttcacagccgctcaggcctcgtgaccctgctttcagagggagcctttttccttttcttccttatctatacttctctcattcctttaccatttatatttttaatatgggaaactagacatcctagaagtttctcagcttccagattctgttactgcagactgttactgattcaacaatatggtccttttcctgatgacatacgccacattcttctgaagtacagatggtctccaaactaccatggtttgacttacaattttttgactttacgatagtgtgaaagcagtatgcattctatggaaaccatacttgacgttttgaattttgatctttttctgggctagcagtatgcctccagatactctcgagatgccagatagctcctcgtcagccacatcatgagaagggggaatgacccctgctctacagggcactgtgttgccagctgagtttgcccaactgtaggctaatgtaagtgttctgagcacatttaaggcaggctaggctaagctatgatgttaggtagattacgtgtattcaatgctttttttttttttttttgagacagagtttcactctcccacctgggctggaatgcagtggcgcgatctcaggtcactgcagcctccgcctcctgggtttaagcaattctcctgcctcagcctcccgagtagctgggattacaggcacctgccaccatgcccgagtaactttttgtgtttttaatagagatgggatttcaccatgttgaccaggctggtctccaactcctgacctcaggtgatccacccgccttggcctccccaagtgctgggattacaggcatgagcccctgtgcctggcctcagtgcatttttgacctaagtattttcaatttacaatgggtttattggacataatcccatcctaattaaggaacatctgtagtctacaaagagatacttgccagtgttcatttagctctgctgtactttaaataaaagatatgtgtatctttagttcaaagctggtgccttggaacggtgtcaaacatgagaagaatgttccaacagcaagatggaatcattgtcttgcagtgttgaaattagaccggtggtggccaggcgcagtggctcacgcctgtaatcccagcactttgggaggccgaggcgggaggatcatgaggtcaggagattgagaccatcctggctaacacagtgaaaccccgtctctactaaaaaaaatacaaaaaattagccaggcrtggtggcgggcgcttgtagtcccagctactcaggaggctgaggcaggagaatggcatgagccgggaggcagagcttgcagtgagccgagatcgcgctactgcactccagcctggtgggcgacagagtgagactccgtctcaaaaaaaaaaaaaaraaaagaaaagaaattagaccggtggtgttttcatcctttttccttgagaataagttttctggattttagtctatatattgaataaagcctacaggtcaaagaatagtagggacttctgaagattcaggagtggctttagagaggtagcagggacatcatgatgtttttcagctctttaaaaagataggagtgggccrgatgctgtggctcacgcctgtaatcccagcactttgggaggccgaggtgggtggatcacttgaggtcaggagatcgagaccagcctggctaacrcagtgaaaccctgtctctactaaaaatacaaaaattagccgggcatggtggcagatgtctgtaatcccagctactcgggaggatgaggcaggagaatttcttgaacccggaaggtggaggttgcagggagccaagatcatgccactgcacttcagcctgggcaacagagtgagactccatcacaaaagaataaaaaaaaggcatggaccttaattcatcctaattcagtttttgtaatcatgtgcagaaacaagtaacatatatataaaaaggcaggagagaatgtaaacttggactttatttattcacagtcaccaagcagtttggttgataatgtctctgaaagcatggacaagtgaaatatgtaagagcagagctcttgggggccaggtgcagtggctcatgcctgtaatcccagccttcgggaggctaaggcaggtggattgcttgagcctaggagtttgagaccagcttgacaacatgattagacctcatctctacaaaaaatacaagaattagctgggtgtggtggcacatgcctgtagtctcagctgctcaggaggctgagaccggagaattgattgagcctgggagtttgaggctgcagtaagctgtgattacaccactgtactccagcctgggtgacaaaatgagtcccggtctcaaaaaaaaaaaagaaaaaaaaacaggagcagagctcttggacaaagccctgctgtggaaagcttgcttcatctggctgcagccgctccacaacgcccgtcatcttgctcaggaagccacagcactactctaggaaaggggcagagaggggcctgggtctcccacagctgagaatcctttaaacagtgcctgtagggccctctattgtggatttggtagttctgcctgcaccgagggagatgctwgcaggtgcttctgaaccctgtgtttgggaattagctgcgcatacaattaaggcttttgggtatagtaaaatttgtgtgcctttgaccctgtggttctgagtcctcgatgttaatgacagagcggacattgcagcccttctgtctgccagccagcacctcattggaagtgtttcattgaaacgtcacacccatatgctgaggctgtcctgttgttatcccattttatggatgagggaacattcacacttagaagttaagtgagtggcccaggaaactacagtttaccagtacccaagctgggctttaaattctgactgccccctgcctccccaaggggattgtgcacagcacagaagttcacacacgatgctttttagtatcagcttaggtggagatctgtgtttatgtagaatgctgaggaaaccacaggcatagtatgatttcacgtacgaacctgtgcataaagacttctggaaagagtcattgctgggcaacgaggcttcacgtgatttgtgtatttttgtagtcttcagaattttttatgattagcatatgtcattcttattgaagtgtggggttgttatcaaaaagtaaatttagatgtgggagaaattcatatgtgattgattttcaaaagattgctgtaaagttgctggtgaaggatgagtgatcagacaccatcagagctggagaggcagcagatgggaattgtgtgttcccagttccctgaagagcagctggagagagatgcctctggtgccgccccagaatacgcaatgggcatctcgccacatgggtgtttgggctggtgcattgctgctggctggcgccttcttttcaggaacattgtgggacatgggtatcctcagccacagttctgtggacaggaagaccctgggcctctctagtttctttctttcttttttttctttttcttttctttttcttttttttttttttttgagatggagtttcactcttgtcacccaggctggagtgcagtggcacaatctcagctcactgcaacctccaccttctgggttcaagtgattctcttggctcagtctccctagtagctgggattacaggcgcccgccaccacgcctggctaattgttgtacttttagtagagacggagtttcaccatgttgaccaggctggtctcaaactcctggcctcaggtgatctgcccacctcggcctcccagagtgctgggatcacaggcatgagccactgtgcctggcctagtttcttaattgaagtaaaacagagtaagatggcatgcagggctaatcattagcccagcaggtaagcaccatggctctgcagccagctgcctccttagaaagtggggtgttgcsccatggaagtggtggcatgctcttctggtagcattgttgaaatgaaaacaggttcagtccttgatcactaggctttttgtacccgggtacctctggggacttggcagagagtttgatctctcagtgtccaggggttaactttctacctgagagtagcaccccatgcttctccagcacctgctcctaaccaggaaattggggtagaccagaaccccagtcttcccagcagctcagtgtttcttgcccyggagcatctgccttcatcacagtgactctgaacacgctgccatggtgacatctggtaaaccttaggatggccatggaaaacgactctttgccctgtttcttcttggcttcccttgcgtacaaggatgaaggaggtggtttaactttatttttgtcctttactttttaagtctaaagtaagtgcttgaatcgggtgggttttcatttttttgctttctcacccctcaggttggcccctracttggcctctcaccctcgtgtcagctgttagacactgactcagtggctcagaatatgaaaggctcaggaagtagcatgctggccccacctccctgtccccataccttagcagagcagctgcccagcagggcctcctyctctttcctaagagtttactccatccatggtgggtgtcttggtaggcccgagatacgagagggagtgctgctgttacaagaatttacagttgttctcttcrgcacagaaatgctgtaaatggcctctttcgatactagtttatgaaattataagtgtctgatgattgtgcatctttggtttcaacagctactctgacctacgacactctccggtttgctgagtttgaagattttcctgagacctcagagcccgtttggatactgggtagaaaatacagcattttcacaggtatcggccatgctggagcccaccctggtctgaccgcttggcctgcagaagcattttgtgatcactgttctctgctaactctgccataacttgtgacttgcaaacttaaggcgttgtgtgtgtgtgttttttttcttttaaacaacctctagaaaaggacgagatcttgtctgatgtggcatctagactttggtttacatacaggaaaaactttccagccattggtaagtactctgttttattacaacgcgggacaaaatatgtttttaggaaggaggaaaacttacgcttgtagatttgacttcaatatgccactgacttcatttgaatcttcacagcaatcctgcttaactgaattggccgaggcctcacgtgtagtagtggcaaagctagaatccacggcgcctgactctaggctagtgtgttttcaactgcaaatcccagcttattactggagctggaaatcagtatcatgagttatgaccaacgttgttttaaatgtaggacagaatgtcatagaaagcggtgtgtgtccgccacgggcacgcagcatggcgcttcagggatcttcgttttcgtttgcatgtttgagtgtgtgttctgggtcacagctgtacaatgtgtttcttacttaggtccagaatgtttggaagccattctctgtagccctcatcttttttagtattttccacacttaacctgtggggagatttgaagggccaggtgaatgtgacatgtttttatgtaacactaaggtgcattctgttaaaagccattcatcattgttgtataccctggagctggaaggagatggggactggttctcagccttgcctctcaccggcggagaactgaggccggaggtgagggccgggctggcgtcatgcttcctcagtgccaggtcagggtttggtccctcttctaggggtggtttcattctttatcctgaagtgaggtggaagtcaaatagccacaacggctggacattggagaacactgacgcgtagggacatacgacagtgtctccttaggttgatatttaatgatacaccttgtgagatgtaccctgggaatattgatatgtaatgatatattttaatgacataccttgtcagatgtgccctgggaatagttgctcattccacagtttccgcttgtttcgcagctgcgctgaacctgctctcttggccgccttggatgcaggtttgtccccagcctccatctccttcacagctaccctgccgcgtgctgggaaggagaacaggactggagcgaagcctttctggtttggcagaggccttgtggaggaggtagaggctggggatgagcctgcacatgaagcagccctgtcgcagttctgaagggcagtgtgctgtgtttccttcttagccccacggagataattttttaaaattattactttcatttttttaatagatggggtttcgctatgttgcccaggctggacttgaactcctgggctcaagcagttctccctcctcagcctcctgagtgtctgggactacaggtgcacaccaccacgcctggctctgagatacgtttttatcagcagtagagcgatcagcagtggagcgagggtgaccatgggcactgctgattgggttgttggtgggtgacggccaccactaccccaagacacagggtttattgtccgtgccagtgcatggagaagctgccggaagcccagaggtgggcacagggcgaaccttgtggtctgacccctgaatctctgcttctcaccctggtgtgcagccacctagcagcctcttgtctgctgcacaggtggccctctctgttgtcacagctgtgcagtggccttccactggacccctgctatgggctggcagtgtttcccacgtgcctgtcacatgccgcgcagttccatggtgcatgttgtccatctttctgggccccagggagtggccgtgagggcagggcccaggcacctgtgctggaagggctgagttgctgcccttgcggcccttcctgtgctctcagcagcactggatgtcatcaagcgtttgaatttctgcctttctgataattggaaaatgcgttgttttgtttaactttgcattttctggatgacttacgrgggtcagtgtcttcatatgtttgtcagacattccttttgctccgtgactgacttgttcatgtgttttgcccattttgagraggttgtcgggacatttcactctccagtaaatgtggcccttggcgttactgagtcctaagaggtgtgtgttgccccaggtggagctgatggaggagggagtcggtgcctgtggtgtgggactgacyggctgcctcctgccagtgggcttgtggcctgtggggccatctggccatgagcacttctctctctgtctgccacgacaggggggacaggccccacctcggacacaggctggggctgcatgctgcggtgtggacagatgatctttgcccaagccctggtgtgccggcacctaggccgaggtgagtcacagccctggggagggcgcatggccacggtgttctcaggaagcaaaggggactgtggggtcagggctctttagagcagaccrcaggtaaaacagtaagtagaacttgggggtttcttgagtaatgagccacttgtttttcttgatttaaaaaactgactttaaagaatgctaataaatccgcatgggcaacatggcgagaccccgtctcacaaaaaatacaaaaattagccaggcgtggtggctcctgcctgtagtcccagctacttcggagactgatgtggagaattgctagaacccaggagatggaggctgcagtgagctgagatcgcaccactgcgctccagcctctgcaacagagttagaccctatctgaaaaaaaaaaaaaaaaaaaaagaagaagaagaatgctaataaatgttttaaattactgaaactgttttctgtacagatttgttttgataacttggcgtatatgtatttgaaatcctggagaacatgggtttttacttttaaaagattctgggctgggtgtggtggctcacgcctgtaatcccagcactttgggatgccgaggcgggtgggtcacgaggtcaggagatcaagaccatcctggccagcatggtgaaaccccatctctactaaaaayacaaaaattagctaggcttggtgrcatgtgcctgtagtcccagctactcgggaggctgaagcaggagaatcgcttgaacccgggaggtggaggttgcagtgagccgagatcacgccattgcactccatcctgggtgagagagcgagactctgtttaaaaaaaaaaaaaaaaaaaaagattctgaaaaaggtttggatgccatctgtatctttagtgtgaaagtgaaaacttgtttctcatatttatggtagagctgacctgtaattttttttccaatagattggaggtggacacaaaggaagagrcagccagacagctacttcagcgtcctcaacgcattcatcgacaggaaggacagttactactccattcaccagataggtgggaggctgcagaatgtgccaggccccacccgggctgtctggagagggtggagtggtcggtttcccctcagagcttttctggtgtcgtgggatgtggagcaggaggctgtaaacctgtaaacactgacctctgaccatctgtgcgctgctgtcacatcaccyccgtgtcatcccacatcacccccgtcccacccaggcccagaccctgggccttgcccttcctgctgtccatgcggcttgcagtgcctggtgctcggcacagtctggggaaattggcctcgccccatcagtgaatctgaatgctcagattgaagtggagtgagtaaagaagagttggcctttcttgcaagcaaggccggcttttgagcactgtgttttcacttatagaaggaagtggtcccttcatttcccctccttttctaagttcatagtgaaggacagtccctgagaccttgtttgccccctcatgcctcccccgatcttgttggggcatccttccgtctggaggctgggtcgggtgctgtccaggccttcctgtgacgtgtctcctggcaccaygtgccaccagaggtcagggctgggggcgggtgtgtgttgctaatgtgtatctgttccctgcagcgcaaatgggagttggcgaaggcaagtccataggccagtggtacgggcccaacactgtcgcccaggtcctgaagtatgtactgcgcttccactgctgagcatggggcagcagggatgttccctgggggttaaattctccttgagtcttcatggctacaggaaataaggggtctctaattatttacttcatggccctcagaaggtttctcagcgatgactgtgttgaggtcttgtgaataggaatttatgttttctaacaaaatgaacaccgtagtccacatcctggctggcacattggacccttgttctttgctgcatggatccacctgtaatggtggcttctgatggggtgggcagctgaagctagtctgcagccatctgtgcgggtgccgggcccttccacctctgcaggcttgttggaggctgccctccgcgggccttgccacctgcctttctcactctacccggagactccctgtagcctcgctcaccttcccatacacctcagcgtctgaaagtgtgctctgcacctgctccgcaccgcttcctttcgcacctcactcagccccattgcgtgcccgccccccagattcctctgagatgaccttccctgcagttccagaaacttgcctgtggtttcagcttcgtgtccactcttcactcctcttgacccatccagggtcatttggtctgattccatgtgtcctggcatcccagcatttttggggaggctctggccagatcccccaggacttgtcccctcagggtctcctccccactggtctgagggccagcgtctccccagcctgtcttcagccacggcccccttgaagcctctccttctgcatctgcctgttctgtatcccactcaaggccctcaggcatcccacgttccacattcctgaaatggccctgtctcccctcacccwcagcctgctcctcagcatggcagtcactgtctccacccagcttttctgtcaggttccctggggtcctgcacaagtccgtctctgccacatcccacgtcacccgcgtcccacgtcacccccgtcccacatccccagcctgctgctccctctgtctccagggcccgccctgtgtttggcgtggcacctgctcagtccctactgcatgcccttcagagtcctctgtccagcagctccccagcccccaccacacccttccactcacacttctcttgctgctgcctggagtggccccaccaagtcagcgcygtttctctggaagcaccaggccactcgccatgctcgctgtttctcctggtcccctgcctgctccccaccagcccccgcccctgttgctggatgatcctccccaacctgcaagtgctgtggcactcaggcacatggacggcttccagggctgatttgtccctggactccaagctcaggtccagctgcttattctgcatttccacctgggtatctgtgtgcatggtgacctgacagccagagcccgtgctggccccagcctgcttctcctacagtggtccttcaggtgctcaaaccaaaatctgggattgttctagacccctctttttgagacggagtctcgctctgtcgccaggctggagtgtagtggcatgatctctgctcagaatcccaagtgattctcctgcctcagcctcccgaagtgctgggattacaggcgtgagccaccgtgcctggccaggactcctctcttttttctttttttttgagacagtctagctcagtagcctgggctggagtgcrgtggtgcaatcttgggctcactgcttcctccrcctcctgggtcccggttcaagcagttctcctgcctcagcctccccagtacctggaattacaggcacccgccaccatgcccagctaattttttcaatttttagtagagatggggtttcaccatgttggccaggctggtcttgaactcctgacctcgtgatccacctgccttcgcctcccagagtgctgggattacaggcgtgagccaccgcgcctggccaggactcctctctttcttttttttttttttattttttttccgagacagagtctagctctgtagtccaggctggagtgcagtggtgcaatcttgggctcactgctacctccgcctcccgggtcccagttcaagcaattctcctgccttagcctcttcagtagctgggattataggcacatgccaccatgcccaactaatttttgtatttttagtggagacaaggtttcaccatgttagccaggctggtcttgaactcctgacctcgtgatccacctgcctcatcctcccaaagtgctgggattacaggcatgagccaccgctcctggccaattcctctttatttcagtgggcccattcaaaatatcaattcctctttctttcagtgggcccattcaaaatatgtccagactctgaccagtgttcatcctttcactccctgtgctggtcccagccccatcttcttctttcttgttgatcttccttctctctttgtcatcctagagtctctttagcaaataacagcagagccatctgcataaaacatattggccactgctctgccttgaaccgccctggctcttcactgctgactcaggcggggctctacccgacctccctggcatgacacsttgtgctcctgggacacaccagcctcagggcctttgcatgtgtggtgcctggcacttggaccctgttcccccgacacctgcctgggttgcgccccatgtctgcccaggtaccctttggcaccaaggtcttccctgtggctacgttagtagtgccactccccgttcctgcgttactgttctctgcagtgttgaccaccggcccacgtggctgctgcttccttgtttgccctccgccaggtcagctttgccagtgctgctgtgtcccttgtgtgtgggtgcgtcttcggcactgcatctgggctagaggtgggaggaggaaggtggtgtgggagtggggcggggaagcaggctgtcctcccatcttcagcactgcagctgggctggagatgggaggaggaaggtggtggggcaggggggcagtggggggcaggctgtcctcccagtgtcccccctgggcttgtgcattgggaggggctctgtgtggtcaccccagtcccctgctccacccccacccagctcccctccacaggtcttgcattctgtccccgggagcaccaggtctttgctgcctcagggccttttctattgttttaccttttgttgaggtcctctgaccccacctccgccagacctgagatgagatcagagtcgtgttagacttttggctgcagaatctgcccttccctcagaaggggaaatccaaggccatggttcctcctcactggcgtgcacagtcgtgcttcccactaagctgcagatttctctataaggactcagattccttggttgtcagctcagcgtgtttggtggaggggagagcagagcagagcgtgaaggtgctgggaggcctgcctcaaagttggcaaaacccacagcgtctcagagctgcgttcatgttctagttcctgcctctgtgccagtgagaccagaaaaccaggccactcaamagcctcttgcgtgtgctctctatgaatggaggctggggcaagggcaggacccctgggcctcaggcgagaagaagcagatttaccctcagctttcttcctgtctgtggcattggctgtgccccggattttaggagccttggcccttctcatccgagaagcacctctaacgcgaaccctccttcgcgcagctatagctgcaaagatgaaccgtctttgaattgtacaaaagcttatggtcattctcctactctctgtaggaagcttgctgtcttcgatacgtggagctccttggcggtccacattgcaatggacaacactgttgtgatggaggaaatcagtaagtggctcagagtttccatggacaagaaagttgaaatcacgggcaacatacacacttcctcgcctgagtccccacgggagcctcggcgagtgttgtcrgtcgccccatgccgtgcaggtgctccgtggggcctgtgcgccaagccagatgcacggtggcctcgctctcctatcccggcggtcataccaagagaggagagcccaggctgtctggaggccgcgacttggtatctcacgtcgtgttttgtgtcttggttacaaatcgtttatgaaggccctgctgtgcttaggcgccctcgtgtgggaattctggtgaagttattttgcgtgccttgatgtgcgacagagagatgtagcaaccatctctagctgcaccatctcgagcaaaggcacgtcgtgaaggcagagctcttttcagctttctggaagaaaggtctgctgcaaccctgaaggaacctgggcgtggcaayatttacatctaggaggaaaactgtggctcagttttaacaaatgggctcattgagtgagttccaaattcatgtttcaccttccatgatgtagccaagctgagaactcttaaaaatgcctcayygcctttttcactcagggccacctttttcccaaggaacttctcaaaactccctcaattccaattttattgaagttctacatgtaggctattgccttgaatccaattttccataagaaagagctcatttaggccgggcgcggtggctcatgcctgtaatcccagcaccttgggaggccgaggtgggtggatcatgaggtcaggagttcaagaccagcctggccaacatggtgaaaccccgtctctactaaaaatacagaaactagctgggcatggtggcacgcgcctatagtcccagctactcgggaggctgaggcagaagaatcgcttgaacctgggaggcggaggttgcagtgagccttgatcacgccactgcactccagcctggccacagagcgagaatccgtcccccgccccccaaaaaaaagacctcattcagagccacagccgtaactgcgcacagattcacagtgggagtgggtcctgccctgtgactgtgggtgtgccaggtcaccacacaggtgtgtgctgggtcacagacacgccccttccctgcctctccattctgtttcttcgtcgtctggccatcctcgggggcattgtgacacagcggagggagtgaggcaggactttataagggagagtgaggctggcttctgcagcattgagagctttgccacagcaggctctccttccaggattctgttcctcagagacttgaacttgggatcataaccaaagggtgtttgtttcttccatctgcctttttcctccattctgtttcttgaaatttttataaaacattggaaacacaggaagagtacaaagaaagagaaaaattattgattttaccactcagaaataactcatatgagcattttgacattcttactctcagtatttctcctgtgcttttcaaaaacttacatagtttcctaagtattttctcctggccatgagtgacagcattgtaattattaactggctacacaatatactattataccttagttccctgttcactgccccatcctccctcccgtgtttggggaaatcacttaccccctcgttccgcacgcgtgctcaggatctcaccaagtcacacctcagtccctggcctcggattagggaggctgttgctgggtgcagtggccaggaaggcgcaagggtcagggcttcctagaacctccgtccctctgggtgcaggtagcactggtgggagtgttgggggcagcttgtctgtgtggactccagctccgtcccttcgggagtctcagggctgcccaaagcagtgctgctgaaacgtggcttgtcagagtgagagtggagtcaggtcctggaagagcttgaatctgcatttcccagcccctggggatggtggctcccgggaggatgtggaggctgcctggtctgactggcttcgtctcactgcgtcagctgcctgaaaggacactgttcctcacaggagcatgtggaaggtgcctgatgcccccatttaggaagaaaggcatccacatccagccagcaaaggcactggcattgatgcacaaggcttgggtttctgggttcctgagtgtggcgtggtgttgtgaggaggacatcggggtcgttctgaatgacccctaccaaaagccccaggagggagtagtggggggagggcaggaagcaggctgcttttttcagtcgtgctgctaagagtgcgcaagggaggacgtctgaggaagaagtccgcaaagccgaagctagagaaacagacgtgtccttggctaagcaaggacttttcttctagtttctcggaactgcttgtggaaggagcagttagataggagaagactgatgccattcagaaattccactaaagcttcttcctgcagcgaaagagctgcctgacggtgttcccactcagattttaggtgaagcctgtggggtaaggggagaccttactgcctacagtgtccccatccaccaacccatcccccccgcaactcatccttctgtccacccccagtcaaaggccagccaggacatccttagcatgctcttcttgtccttaacgttgatgggcttagacctttctaacgacagtagacagaatgtcactgaatgtagggaggaaatacagattggaaaacgtgtcagtctggcagtgaggacaaatgactccaatgaaagaaaagtaaataccagagcaagcacagtcagaaacagagtggggaggagaatcacaatagctgraactcaactctctgagaggcagtgcagccaaatagaggcagctgagagcagagtatgtggattagaacttttcgggagagttggccactgaaggagtaggagaaaattcccctgagttggtgagagttgagtctttagagctaaagacccccaaatttttttatcagaagtacttaaacatacatrttcctgataatatttccaaattgcagaagtaaagggaaacttctctaaacatccaaataatagtatcactactaagctgctttgaagaaaggcagtctcaactggcctgggcatctcatctttgtgccataccaaatgctactggaaaatgtttagaattctgagaaaagacctggcttcatgaggtgagagtaggtatgtgtactgtgtagttgtcattgatagagaaatataaattttaaatgtgttcaaaatataaagagaacacgagaaaatttcaggtggtggcaggaataggcaaaagcccgttgcaccctgttgacagcagggtgtttgtgacgtggtaggtcacacactcagtgctgggctctggaggcacagaagcaaccggcccagctacgcatcagcccttgagccgattcatgtgttcgatcatattcctgagacagtagggtctgtgcaggtaacaaagcaccagtcagcaggaaactcaccaccgggaagcctttctatcaaaacataacttcaaaatcagtaaagtgggccgggcatggtggctcaygcctataatcccaacttcaaaatcaataaagcgggccgggcgcggtggctcacgcctataatcccaacttcaaaaccaataaagtgggccgggcgcggtggctcacgcctataatcccaacttcaaaatcaataaagcgggccgggcatggtggctcacgcctataatcccaacttcaaaaccaataaagcgggccgggcgcggtggctcacgcctataatcccagcacttcgggaggccaaggtgggtagatcacatgaggtcaggagttaaagaccagcctggtcaacatygtaaaaccccatgtctactaaaaaaaaagttagctgggcatggtggcacgccctcgtaatcccagctgctcgggaagctgaggcacgagaattgcttgaacctgggaggcagaggctacagtgagctgagatcatgccactgcactccagcctgtgtgacacagtaagactgtgtctcaaaaaaccaaaacaacaaaaaataataaaaatatatagaaaacagaataattaacagattagctatggaaagatcaaagctacaggggacccagataacacaacaggcagagtttagtagatacgtgtcaaaccctagattgtgacagcagagtgtgcctgggaatttctatgaaactaatgcggaataaaatgaaaaaaggacaaaaccctgctgcctggaaatgtgaaacctcaaaaaagtcaagtgtagagaccstaactatgtatctgaacctgatgtgtacagaactcagaagaaaacctgtgtatcttcagtactagtatatgggttctttacaaagtgaaaattaatgaaataagcatacaactcaagaattcggaaaaagcaaaattaactgaagaaaccaaagaataatattaaagacaaatacagaaattaatgatttaaaggaagaaatgtattaggccaggtgtagtggctcatgtttgtaatcccagcactttgtgaggctgaggcaggaggattgcttaaagccaggaattcaagaccagcctgggcaacatagccagacgtctattttttttttttttttggaacagttctgctctgtnnnnnnnnnnnnnnnnnnnnnnnnnnnnnnnnnnnnnnnnnnnnnnnnnnnnnnnnnnnnnnnnnnnnnnnnnnnnnnnnnnnnnnnnnnnnnnnnnnnnnnnnnnnnnnnnnnnnnnnnnnnnnnnnnnnnnnnnnnnnnnnnnnnnnnnnnnnnnnnnnnnnnnnnnnnnnnnnnnnnnnnnnnnnnnnnnnnnnnnnnnnnnnnnnnnnnnnnnnnnnnnnnnnnnnnnnnnnnnnnnnnnnnnnnnnnnnnnnnnnnnnnnnnnnnnnnnnnnnnnnnnnnnnnnnnnnnnnnnnnnnnnnnnnnnnnnnnnnnnnnnnnnnnnnnnnnnnnnnntgcctggacctcattctataaaatattttaaaaataaattttaaaattaaatttattagaactaacacatactagaactggctctttgaagcaataacatatatgttttaaaaaaatcaaagttaaaatccctcccttggctaagcrctgtggctcccgcctgtaatcctagcactttgggaggtggaggcaggcagattgcttgagtccaggagtttgagaccagccgcctaggtaacatggtaaaacctcatctctacaaaaaaacaaaacaaaaaaactagccggacatgggggcatgtacctgtagtcccacctactcgggagtctgaggtgggaggatcccatgagcctgggaggttgaggctgcagtgagacatgattgcaccacttcactccagcctgggtgacacagtaagaccctgtctcaaaaaccaaacagaaacccaaacaactcccttaaggctgggcgtggtagctcctacccataatcgcacctctcagggaggctgagttggaggattgcttgagaccaacctggacaactccctctctataagaaatagaaaaatgaggccaggcacatggctcatgtctgtaatctcagcacttcgggaggctgaggtgagcagatcacttgaggtcaggagttcgagaccagcccggccaatgtggcaaaaccccgtctctactaaaaatacaaaaattagctgggcgtggtgacacacacctgtaatcccagctactggggaggctgaggcaggagaattgcttgagcccagaaggcggaggttgcagtgaaccgagattatgccactgcactccagcctggacaacagagaatcggcttcaaaaaagaaaagtcagggggcacagtggcccacacctgttgttccagctactcgggaggctgaggcgggaggattgcttaagtgcaggtgtttgaggctgcagtgagctgtggttgcaccactgcactgcagcctgggtgacagagtgagaccccgtctctaaaagaaatttaaaaagttctgtctcagaatccttgttttccagctgtctgttttgagaaatttgagtcctacaaaaaagttcagtgagtcatggccacaaaccctccacctagatccaccaattgtgttttgacacgcttggtttttatgagcaagcctcctacgaatgagagtgttcctgagagccacacagcctcatcaccacaaaagaggtgacgccacgactcaccagggtccgtcttggccccttgctgtccagggaacaacccgtgccgctgatttgtgttcctggttgagggtccggtgctgtgtgtatatagttgtgatgtctttctagtctttaattgagaaggttctgcctctttgttgtggttgttgctgctttgtggcatttttgacgagttcaggtcagctgaccatcccacacgctggatttgtctgcttcctcacagttgggcttgggttgagcctgtggctgagagtagcctctgggtggcagtgtcctctgctctcccatccggggcctgcagtgggacactatgtcagatccccrgagatggtgtcttttttcctttgtaattaatgaataatccagtggtgacactgagcatgtcctggtgagctgtgtgactcctgcctgataatggtggtttttctagcctgtcctttcctttcacgtttattggttggcgttctgagaagagccgccttttctcccatcacttagtgtgcagtgtgctacctgtcacctgtctgtcacctgtcagtcactgtcacctgtcactgtcactgtcacctgtcactgtccatctttttgatgcttgacggttccacctttggccggtggccacctcagtctggtggtgtcttttgccgtgttctggcrtttttcgtttatgttwtgagccctcccttatgttctgggttaagcagatgctgcaggcacctctgaacattccctgcctggccctggaatcagcctggctcctctgagtggggagtggtgttgagaaacctcgatctagacgccgggcatgctccatgctcccggagtgtcttctcccatcaccgcaccctccggttgatgtgtcctccggaccattgactcaygggtgtgtgtaggcagaaggggtggaagcgaggaaaggcgttgctgaggaggcccggagggagcgggttctggctgtgctggcactagccaggctggcaggctgcgtgggtacttctgtgattttcctctcaagtgcacgtggctttttcttgcactgtttcgtgtgtgtgctttatttcacaataaaactcttgaattaagtatgcatagaaactatttcttttttctctgggtggcaagattatgaaaaaattttcttacgcttttctatattttccaagtttgaatttcactgtaagcacctggctttgtacygccctttttctgttacacagtcatcatttgcttgcttgttgtgggagcacttttgcacaggtctgcttggttastgaaagcatgtctccctttctaggaaggttgtgcaggaccagcrttccctgtgcaggcgccactgcgtttcctgcagattccgaccggcactgcaayggattccctgccggagctgaggtcaccaacaggccgtcgccatggagacccctggtacttctcattcccctgcgcctggggctcacggacatcaacgaggcctacgtggagacgctgaaggtgggtcctgccgtgcggcgcttgccctgagtccccgtccccttctcccagttcttagtcactttcagcgcatcgtcgtcacgtggccatttgtgcagccggctctcgggggaggggtaaacaaccctggtttacaccgttgcccaaggggtgagtgggcgtgaggcacgtccatcagtaggcacgtgctgctttcgttctgcaagtgtcaaggcgagtgtcgaggatgaaagcatgaggcgcttgcagggggtcctcggaaccaggtgccactcctcggcctgacggggagccccgccccctcccgggtctccactgtgccccaggcatgcccaccccactcccccacagccctcttggcctgaggtcccttcggagggtgggttggcctgtgaggaagggacgtgtgggcagggcctggggatgggcagggctgtgtgaggagctccagccacaggctcccccatgtcatgaaagcaaaagggggcggggagcggtggctcatgactgtaatcccagcactttgggagggcaaagcgggcagatcacgaggtcaggagtctgagaccagcctggccaacatggtgaaaccccgtctctactaaaaatataaaaattagccgggcatggtggtgcgcgcctgtagtcccagctacacaggaggctgaggcaggagaatctcttgaacccaggaggcggagcttgcagtgacccgagatcatgccattgcactccatcctgggtgacagagtgagactccatctcaaatwaaaaaaaaaaaaaagcaagcagaagggaaaaccatcctttcttcaggtaactcaaattttagaccaaggagtcacatttgtatggaactgaaatgtggcttcctgttaaaattattcagttgtctgaacttggcccctccgtccagccttctgcccatcctgtggggtctcagctgcccccacacataggccccgtctccatcgcttctgccctgtcaggtcaaagcactcagcagggccacctcccgcacccctgctcacatctcctgccaggccccctcactcccggcctccccaaagcccacctctgacatgaagcttccctgagctgagcctgcagattgggtttcttgtgcctgtgggatgtcctgtggtctttcctggacagtaagctctttggtaccatgtcccctcctgtcccctcttgygtcacccagttgggcctcagcaggcccttggkycccctatggcagtgggtggggggaccgtctgctcccacctgggacctgtgctcagtcccccgcccctccacagcactgcttcatgatgccccagtccctgggcgtcatcggagggaagcccaacagcgcccactacttcatcggctacgttggtgagtccagggttcccaccgtgtccctgtgggcctgggccttttaagggcattccatgagcaggtaccacaccccaggtgaccacttgaggccactggtggaaaagcagcatgccctggggttcattttcagcctggtcgmgggcggcctcctgtgtgcccctttccctsatggtctggtgccctcggctccctccccacctcctgcccactgcttctcagtgtgatgtgggtgcagtgggtctgaaatgcggcctcctctgtccctttcctctgccggctcggccrcccacctgcccacctgcctcatcctcccaggtgaggagctcatctacctggacccccacaccacgcagccagccgtggagcccactgatggctgcttcatcccggacgagagcttccactgccagcacccgccgtgccgcatgagcatcgcggagcttgacccgtccatcgctgtggtacgtggcggccacctgagcacacaggcatttggtgctgaatgctgtttgggaatgacgaggaaaactttcggatttttgcgttttttttttcagcatgttgsgataagtactgtgttcacgtggttgggaatctgaagggtataagagccggaactgtgtccttgcaccctcacgtccctcccccaggcaccacctcctgtgcagccttcatggccttcgagtggcccagagagcgtgtgtctggatgtgagcgtgtgtgggcgcgtgctgagtgtgcatggatgagtgtgagccatggtgagtgtgtccccctcacacctacatttaaacacaygggcggcccctccacccacccctgcaccaccttcgtcacacccacatttaaacacgggcggcccctccacccacccactcctgcaccaccttttgttttccggaggctctgacttgacctctctgggggatttcctaagaaggagcttccctgtttttccattttgattacctagttgtgatttttggtgtgtgatttatgcagacctgcctgccctcaaatatatttgatggggaaagaggccaaaaaacccccctagaaatcatgaatgacggtgacatgctcagggaagcagttaaccgaatcgggggctctgttgtggatgctccgccccatttaggaggaagaaggcagatctgggcctgaaatgggacggtctctgagctgtggcgcagccccagagtgcacaccacgctccatgcacctcctgggcagggtggcagtagtggggaacatgggctggagctctgtggctcacactttttgtttgtttgtttgtttttgagacggagtctcactctgtcgcccaggctggagtgcagtggcrcgatctcggctcactgcaagctccgcctcccaggttcacgccattctcctgcytcagcctctggattagctgggactacaggcacccgccaccacgcctggctaattttctgtatttttaatagagacgggttttcactgtgttagccaggatggtcttgatctcctgacctcatgatccacccacctcggcctcccaaagtgctgggattacaggcgtgagccactgcgcgcagcctggcgcacacttcttaccagaacctagtcacgaattcctcgtckaactagaattaggtatgtttgttactgtaaacgcagcttggtggcttacagtgattgrcactctaacagtcaggtcaggctagagagccagccaccgcagacagaggagtggacgcgtgaacgttgagttgagaccaaaggggccacctggtgggataactgtcctcacccgtgaggaggaggaatgtcccctgtccccgggggagagtgctcctacaccagcgccgaggcggcagaatggtgtcttcaggggaagagagtgcccagtttgagcttctccccccatttcgtttctttttgtgttaacatctgcgcatctggcagcgttgagaattcctagtgactgtcattacaggcggcagctttaaggatgtgattgccggtgacccttggccggtcccctgtctcctggctcctcagcaggaggctccctgtgtcacggtgtccttgggcagttctcggtggcctttgccgccaagcttccagggagctgctgggcgaaggctgagacccagcggccctgcctcacagtcacagagagaagagctccccacttggccctaactcataacctgccccaatcccggaacactcggtgaggtttgagagatgcacaccacgtaacatctcgtgggcgaatcaaggcacagcaacgcagtggagcctgaggggagccgggcactggtgcaggggaccatgcacagggcaccctcggagctccrttccyggccacaggagccaaggcaggctggaatgtccagcacctgcatgctgggggcctctgctgcgccactggcagtgggaatggaagcccccacctcttagccgactgcagatgggggtgtcgtgttctgctcatcgtcatttcgttttaggggtttttctgtaagactgaagatgacttcartgattggtgccagcaagtcaaaaaggtttgtagccgccccacacccacagccgagctgagccacccagggagacaggcagyggggcgtgcaggggtcgaaggcctgcgtccaggtctcaggcagcctcactgggccgtggggagctttgtcccgcctggcacagctatgtagctgagcagggtggggcgtcctggattgcccatctggcaacacagttaacaaccctggggacggatgttgcgtgttgactttagaatgggatttccagtgtcctcatccgtctcctgttgagatgggggtggtgatggggtgctgagctacgccggccgagtgcgtgtggcccacccccctctgccgtggtggtcagactgtgctgtgtgttgatcaccacactgggttctcgtgtagcctttagtgtggagctgcctctgttttctcatcagtgagatgggatgacaggtttgtccgctggctgtggccggctggcccctttctcttggccgcagcaagcactggggtgaggctgcacctaacggccatgtctcactaacagctrtctctgctyggaggtgccctgcccatgtttgagctggtggagcwgcagccttcacatctggcctgccccgacgtcctgaacctgtccctaggtgagagctgccaagtccaggtggggtccctcggaggtacgatctgtgcccttgcttcyccagtcctggcccccttggttttgaccattaaggtgtgtgtgagcctgagccgtgagcacttggcagtggttcgcctgtgagaccaggtatggagtggagcgtcccctcctccaagcttgcgcccagcagcccaggacccacctcgtcttccccaccagcgctgcctgccsgggcgctgtggagctgggcgtgctaccatggagtcctcaggggtctggagcagacagaacatgcaggctctgtggtgacgcagtcctgggtgggggactggttcacttgggcaccactggccatgggtggcgtagacccctcggaccatggccagcgtgccgcaggagccggcctgggctcgtgcagtgaagtgagtggccgtgagcgcgtcctcctcatcyctgtctccctgtggraaactctacaaacaaggcaatggcaatggaaccactcctgatgaccacgagggtcagacgcgggacagaggcccctcaggcctgagattgtgccggccgccccctgccctcctcaccctgccctgctcctcttctctgctccctccccccatattcgcaggtctgcacaacccccggacctgttcacacccgcatggggacagctgtctgtgggctgcagagcaggcactgctcagtctgccccacgccaagggcccttractcacacccaggtggcccacccaagatgcctgatgcgctatgtcctgttccttctagattcttctgatgtagagcgactggaaagattcttcgactcagaagatgaagactttgaaatcctgtccctttgaaaatcctggggtcgggggtggcacctgtgagagcctggggctcctggtgccgctgcgtttcatccatcccgcccgctcgcctgccgagggctgcgccccgtgctgcctccccccagagggccacccgctgtgctcgtggactgaggctgcgctgcccgggaggccttactgcttggtgtcagactgcccagctcagagtgcccgtcagggcctgtgcatccgcacgcggagccgtctgttaggagcttccagagygttctctcgacactgccagccccgtgttagcacctgggcctcagtcccacttgctcccaggcgccggttctgtggttggtttggaattaaagtcctgtttgaagttgtcagacacagacatgaatttctkgggcgctccctgagtcagagtctcagaagacctgtgcaggctggcgtgagaggagcggcagccacacygcggccccacgcccaaggaytgggctgctctcgaggggggcgcgcccaccgctgtgtcctctctgcccagcctggcttaccaagggctacctcagtgggagatgaggttggaggaacgaaggcgaggttcctccttgctttggggagaaaagtattcaggaagtgggtgtgtgggaaacctgaagatggcgtgcacaggacacagcgtggkcggcctgggcagaagggcggctggctgtcctggagctgctgctggagcctgccctcagagtgtccctttccagtgctgtggcattctgtggcagcttccccaggtgtggtgacggggggggcggggcctccacctgtgacagycaggcttgagggtggacggcgtgcctctcccaggagccttccccatgtccttgccttgctgagaattgccctcccatgccgctgaggtgttaggtggtttagggccaaaaggggaaaaccacttgagtcttgtggtgtgtggtgggcagacaccacagggtggcatcacctggtggcatttccagaacctcagccccgattccagcacccaccaccgcctgaccctgtgtaacctgctgtcccgggtcccagagtgcactctgccccrctgctctgctgcctgtcctgggaaagtakctttgccccactaggaaatgtaaacaggagggcttggggagcgtgggcacttttctcatgagcagctactgcggcrttggcaggactcgctgctgctgctgctgcttgtgtaggtcggggagcyrgagatccccgaggacgcgcgccggacagtcggcactgaccggcccacctggtagcagaggacacccccagccccccaagcattgaagacatagtgtatttcctcgtatcctttctcccttgggtgtagttggggtggggaagcagggaaggctggtgcgatctccattccttgggctccrcgtccgagttcatggtgcgccgctgtgctgggagctgcagtggkaatgtgtgggacmccttgaccaaaggggagctttgtctcgtgtgttttgaaaaaggcttaatgaagagaatgttgttcattcttagtagtatagtttgcaattcttaatggcaaataataagtttcagtagaaaacaaaccttgtgtctattttttccttaagttctaattgaatgtgagttccagaaaaaaaataagtgaatgtttcagcccgttcacacgtaaaggatgtggctgcctgcgtggcgggctgtggggccctgagcaggtgtgtccccagccctggcagggggcctgtcctgcctgcagcctggctctctaccagccgtggcatcagccacctcatacaaccctagaaggaaaaagtgcaaggaaaataggattttaggaaagtaaaatggcggttcccatcttcagcaggaggaagtcacaggaagtgcctggagttgcagggtttgcctcgatttgaatcatagcaaagccttccccaagtgcgcagtgactgtcctggcctgtgggaggccatgcctggggcacagcagggggcttggtgaggacattgctcactctggccagtgcatccctgtgggcagccctggtataggtgtgaagggcccaaagccagaccggagggggccctgctgggtccccggtgaggtggctgaggacttgtggcctctccgatgctcgtattcgcttcttgtggctgctctaaaagatgatcacattcagtgcctggaacagcacagcctcttccagacccggagggcagacagccatgtcgtgctgtgggctctaggggagaacgttgctgtgcctttctagcttctggatgccagaaactgcttggctcatggctctttcctccaaccacacagccagcaacatggcatctctccagcttttgctgttggcatctcatttcctgactcggaccgcctgcctccctgttatgcggacccgtgatgggccaggcatggtggcgccagcctgtaatcccagcactttgggaggctaaggtggatcacttgagcccaggaaagagaggctgcagtgagtcaagattgcaccactgcactccagcctggatgacagagtgagacccagtcttaagacaacaaaaaaaggcccctgtgatgacactgggcccacctggatagtccaggaaagtctcatctgaaggttcctcacccaggcccatcccacagcccctggcaatgcttacccaagagtgaaatccttttgttttgcctgggtttgtctcttggccacagaagggtgctgagacccacagctgctgcccccacagatgggggaccctgcctgccttctactccagcacactgtatgctgctgtctatgcggagtgtgctctgtgggacagattctgccaggagtgtcaaatcattccttctaagtgtcacttaaaaggggatgcaatgggctcggcatggtggctcatgcctgtactcccagcactttggggaggccaaggcaggtagatcacttgagcccaggagtttaagacaagcctggctggcaacatagcgaaatcctgtctccacaaaaaaattacccaggcacagtgaaggcctgtaggcctagctactcaggaggctgaagtaggaggatcacctgagcccaggaggtcaaggctgcagtgagccacgatcgtgccactgcactccagcctgggcgacagtgagaccctgtttccaaaaaaataaaaaataaaggataggatgagaagttaagctccagggttgcaatgaaaatagcagagttaacttaggtgagttcaggacgtaagctgtgatgacactcggatatagcctggctggacccagcgagcccagggcatggctgcaactgttcagacccacagtgggactccctcaactaggcaggaaccagggtccaggaaggccctactgggcccaatgaaggctcttctctcctgggatggaggttcccattcaaagccagctccgtcctcagtctaagaaaagtgaagcgttccacaaacaattttcaggtctttttttactagtgtctggaagacatttaggagaattccaactgattaccatttacagtgatcacaatgaaactgctcagagttatcactgaacttcagtaagaaaatacaacagagtgccatcaggacaggggagagggcaggagactgctccatcgctctgctcatgtccacactgccaaggtccccaccacgggggtccccagtgcaccccagctccggggcagaagaggcagcctgcagatctctgctgccgggaaagagctcctgaagttgtggggtctggactccgctggggacggggccttccgcgagtctcccacctctcgggggactgcagggagaggcgtctccagtgggcagccttgggtcacttccatagctcccccagcggcttctctgtggcagtgcggatggcgtcctcagagagcacgcggatgtcctcatggacagcttcgatgcttttggaagcatccaccatctgttcccaccggggtttcaggagaaaaagaggctcatcagcacgttccaggctggtcacgggagcccacgcctgtaatcccagcactttgggaggcccacgagggaggactgcttgtacccaggagttcaagaccagcctgggctacacagggacaccccgtctctacaaaaaatgtggcaccactctactccagcctgggtgacacagtaacaccctgtttcaaaacaacaccatgtttcgttctgtcctctgtgctcgtggggatttcacacaggccgggctctggaaggccaacctgaacctcctggcacactgtggtgacctccgggataccccacacctttctctgaacctcaaccttgacaagtgtctacggtagtcacccggcattcctgccacagccctgatgcaggagaaacatgatgtgccaactgcccactcctgctttaagccgacctcagcctcgtgaccccaaccccgctgagtgcccacttgcaggagtgaggcacagcccacagcacagccaggcccacccagcccaccaggtcgaggtgactgtccctccagctcgcaagcggcgagtcggaagcacagagggcagaccctgccctgcccacgctcctgtggctcctgggccctgcctggaaggtgaggaagttccgcagcagaagccagacagcaggaccagtgcaacactgggcctgactcgtccttgcggggaagatgaatttggtcctaacagctgtgctgcacaatggcgtgaacggtgcgaggagcgtggggagggcataagcccgcaggacagccttctctccaccagaaggcaggcagtgagagggactcagaagcgctggcatctcagcggcatcccggcttctgctgtcgggtggcaccggacccttctcaagcttctgggacagcaaattctagaaaatctgccaggggcgtagaaggcacttggaagaatctaaccatttcatgaggtgtgaccgtgacggaaggagagtgactccctacacaagggccaccttcccagatgcctctcactggccactgtgcagccacacagctgtcgcccagaaccgcccaagatgagcctctccgggcggaatgactgccagagagaatgccgcactgccagaaaagggcactgctatcccacctgcgttccgggaaacgaaaagctgcgtgaccagcatcatctgcaggcacagccagtcgggctggggcgagaccctcggccctgctctggaggaggagctcaagggactgaagctccgcgggccgtggccacaagcgacagtgctggcgcccgacgtgccagaagccctggctgccgcctggaaagaggccacgtgggcagcggtgggcacgggcgactggagtctgggagagaggtaggggctgcggtcgggaggagcagaggcggccagcctgcgagtccactgggaggggagagtccagcgtcctgggagcagagccagacctgggactgctgagactgaaggaggcaggactgaagggagaggcagcacacagcaccctcctgaacttagatggccaggtgctgctgcagggcccatgcccagcgagaggccgcaccagaggacacagtggcaggaacaggctggcgctcgtgtctgaagaggggctgaggatgtggaggattgcgcagactctcacctgacccaccagacaaagcgccaaatgtcaacatttagcaaaactcatcgggttagaatttgctggcactggccgggcgcgatggctcatgcctataatcccagcactttgggaggccgaggtgggcagatcacctgaggtcaggagttggagaccagcctgaccaacgtggagaaaccccatctctacaaaaaaaattagccaggcatgatggcacgtgcctgtaatcccagctactcgggaggctgaggcaggagaatcacttgaacccaagaagcggaggttgcagtgagctgagatcgtgccattgcactccagcctgggttggcacccagagcaagattctgtctcaaaaaaaaaagaatttgctggcaccgagaacccctgaacgactactcccggggctccacatctgggaggaccagacggaaacggcagcagctttgctgacacgactgtgccagccaccacggtgtcatcctgagccacttctccacgcttcctagtgtgcaattctgggattctcaccttccagttcaaagtcgtgtctttcatgagctggtggaaacaccggagcgcccgctcctggaaagccccgttctcatagcgctcatggccaaacgctccccgcttggcagcatccgccagctgtaactggaggaacaggaccaggtcgggtttgggaaggcccacgtctggctgtttacaccagtctagggaaaaattctgccaagaaagaacccaacagttaaagcttagtgtagtctaggtttttgtttcgaaagtcgtaaaaacaggaaaaaatgaggggacatttggtgaggtaccaagatgtgagactgtttatattgtggctcgtttaatttttagaacctcaaacgtgtcggtttctccagtgtcacctttgtttttcctttgtaaacagacaagtggacagaaaagtaggtagatagaacggctgccagtccccgccacccacagcccaggccccatggaggccctcccagcgcagctacaggcctgctggccaggagcaaacagtctatgtacagaacccctggagacccccggcctagaacgcctgcagcacagagcagctgggtccggacacaggcacgaggtccttggcagtgtcttttctgccacacacacgccagggtctcctctcccgtggaagagcaggaagaagacaggcactcctagagcctgttatgtgccagcctagtctcatccactggcccttcttgccagggctgtgccagcaccctctctccctcccttactcatcccatctccctccaaatgctgtcctgtttccggaggaaaggtaggaccagaaaggctgtgactgcaggccacacatcacacaacagcacaatgagctgagggaaggcgtccacgagaacctcccacagagcctgcggctctgtcagctgatccgcacagcaggaagaagcaaaggaatcatgagtcttgtcctccttattatacaacgtaatacttcagaggggaaggactcaagctaacacatgaagaaatggcagaattaaaaagtgagggcgtggccgggcacggtggctcgcgcctgtaatcccagcactttgggaggctgaagcgggaggatcacttgggcccaagagttgttatagcgagctttgcttgttccactgtactccagcctgggcaacagagggagacgccctctttcaaaaaacgggggaaaaaagtactacaaatgaaccatctttgaaaatgcatctggaggctgggtgcagtggctcatgcctgtaatcctagcactttgggaggctgagatgagtggatcacttgaggtcaggagtttgagaccagcctggccaacatggtaaaaccccgtctctactaaaagtatgaaaattagctgggcacggtggtgcatgcctataat

SEQ ID NO: 96249 - DNA, 23518 bp, Homo sapiens
gccctccttccccttggattagcctgggcagatgccaaggctcctaggcagatccccgtgccactgtcccagtgtcaggagtaaacctcagcctgccttgggcctcactcaagtctgagtgccctccgtgtgggtcatgacattggagggaggaaggaggacactgcttgccatccttgttctggcacagaggagagggagatgctaggggtccttctttggtcctccccctttccaggctccacagcattcccagggcttgaaggaaaagtccagttcctgggccctacacatccaagcatttactgggaggggctccccaggagccacaggttcttgtgagcctttgaaaggaggccttgacagttccccaaacctgggttcccacttcgtcaaggagccaggaaggagctcagactggcagaagagatagcatctccctgggctggtaaaaccatgcttaccctggatagggcccattttccttgacaaacagagacagaggtagaaaaccctgagtgccctggggatctggctcagatttcatttctaaggctctgagatgtttccaggtcagacttggagtgggcagaggtttgaggcatgatgccaggaagcagatctctgccgcacttagggaaccaggtcctctgctcccatgttcatcacaattcttcctttcctcccccagaactcacccttaaaatctacagaaagcgatagcccctctctgcagagcaatgcatataaacatgcatttttcatgcaatttcagggaactcacagatcttacaactctccaccatggaccccacatgccaaggatttccaagcccaaggcctgaagaatagtagagacagaggccctggcaccctcctcacctgaaaagccggggctcacggatgtgctcaggctccagggccacaccctgcatgtactcatagcacagcccattctggaaggtgcagtagagtttgggggcacagctgtgtgctcgcagcagctggaagtttctgacctcattctcccggtccaccagcagctccgtccgctccccatacacccggaccagcacgcagtcctgcatgtcctcctccacatagcaggccaccagcttgttggtgatgccatccgtgaagcgctagcatggggagaggacagtgcgtgggtgggtgggtggggcaggatctctctggtctctctcctgggctctgtagctccagcaggaggtgctcatttgaatgccgagcacaaccaccccaagcccccagtgctttagcccagtcactcatgctcctctctgtccccaaccttgggagtctccagtctctatagagttcaagaaaaaaatggtagcttgggtttagctcccacacactcctgggtgtgcctctagtgaatgggatttggcagtggagaaatttccacactacttgggaggtagacgcctcctgctgctccttaccctccaccccagtacggaaagaaacatcatggaccagaatgtggcaggggagggctgggagttgcccagaacactatgtcctgaccagctgccaatcaccttgtgccgggcagtgtgctctgctctaccccttgccccatccagtggtggaggtacaaggagggtactgaggttggcacccatcccaggactttagtggccagaggtccttaccagaaaagacaggagacaactgggctgcgagcaaggttctctggacagcagggtgatgaggagaaaggaaccatggaatttacggggcacaatgtgacagagctgggagggccctagaggtcatctgaaccaattctacgtagggaaactgaggcaggagaggggagggactggcagatagcacgttagatcagtgctggaattaacctcaggcctgcttgatgccttgacagtcttataccaaactgggccttttattttgaaaacgctactccatccccagggcgggttctgtcagcctccacacttggttaagaacctccccacaactttgcccccaccccaccccagaatgcctgtctgcatggagccgctaccattccagcacaagctacaagcgccccactcggcaccttcctccacaggcagcccacagcggggctggaggtagtcagctggggagttagcctaaggctcagtgagtggctctgcccacaggtgtgtcctgggacctgtgtccagctggggctggggaagatggcctgtgtgggggtgctgagcccgagcctgcagcgatggtgaggagctgagtgctagctggaattccacagggtggctcctgggacccacaggggcagctcagagcctggaggatttgctcccaccatggggtggagaaggggcagcaatgtatgcatgtatggctgggtcgggggggcggggggtctcttaaaagttcccgcctcctcaggtttcagagctggctgggtacgcgcttctggtcagcgaggggcaccagcacgcagcgacagggggtgcggcccgcacacgcagcatgccgacagtgggcaggtggccaccaggcgtgcctaagagccccgggaggaggggggcgtgtgcagggccaagggaggtgtgagcctagttttggtagcgacgaaatcaatccgtacacaaaccacgttccaaacctttcttgcgcagcagccgcgcacccctgggactgacacccggaaggatgcgaggactgggtccccgcatccccctggcagccctggcaggaccccatcctcggccccgcgcccactccgctaccttggtccgaacttgctcgggtttccaatgcggccgcagctcctggatgaggcgcagggccccgggaaggatgtcgtccgggtccacggaaatgccgaagtacgcgacggcggcggccctcggggggcccggcggctcccggcagctggcgctggccgccgccttctcctccatgccccatgagcactgcgggcaaggcgtgtgcctcctcaggtgaaaggacgcgcgcggctgaggggccgaagggggcacagccattcccagcagccccaccccctcggagccgcggcagacgctagccccggcgggggggtccggcgagggagtgggagtggtagaggaggggccaggggaagtccatgactcaggcgcgagctgcccgcttcgatcgccggctcgcggcccgccgcccaccgccgaccccggagcgccgcggcccgccgcgattgtgacatcacgggcggtggcccgcgggaacgcccccggcccgcccccgccccggcccgcgggccgctggggagctcagccagccaccgccggcagctgaggccgccgctacctggagcgcggggtgggggcgacgcccccctgggggccggtgacgccgggggtggggcctccgctggctccgccccgcccgggtccccgccggggctggcttcccggcctccgaggccgcgagactccagctctctcccggtagcctggggtggaggcgggggagggctcgtcctgcgcccccacctcatcctggaatagagagatccgctgctcccacgacgtcagcttgggctcgcccctctgtgcccctgctccgtgcccccagtccccggaccccgggaaatggctctgcaggggcggcccctgctgcatctcaaaggtccttccctgcagagagcccccccccacacccaggcaacctcccatccccgacagaaacacactgcatgaagaggggacattgggtgatagcgttggggtgagagtgtgccagtccagcagactgcgctgtcccctggcaggccactgaacagccagggcgttggagtgtttgggcacatcctgggcaggacttggggccagactgagttaaagcctccctcccatcctgagcgtgtgaatggagccaggtagcaggccagcggtgtacccgagcccagtgctttgcttggcattcggggtgtgaagtggacagaccctcgcgcgtcctggggaggacagccaaatgcctggcgcagctaagggccaaagcaaggcatggtgatggctgggggtgggaaggaaggggaaggggtgacaaggtgtcccggggcaggttgctgtggggaggagacatggagagaggccaggccggctcagggggcaagtccctctactagccagattctcctttggtcattctctgccaccttctgagcagggctctgttggctgccagccctatttgttgtagtgaggcctcagggatctcactagtcactatctctcactgccccacccagaaaagcgccttcagagaaggggccctttcctattttcccagttacccctttggcctatcccggaacctctcaaccgcaaggctcctatgcttactgcggtccagaatccagctctgcctagcagaacttctgcagtgattgaaatgttctatatctactgtccaatgcagtgaccactagccacgttgattttattaaaaaaatttttttatttgagacagaatttcgctcatgttgcccaggctgctggagtgcaatggtgtgatctctgctcaccacaacctcggcctcctgggttcaagcgattctcctgcttcagcctcctgagtagctgggattacaggcatgtgccaccacgcccagctaattttgtatttttagtagagacgggggttcctccatgttggtcaggctggtcttgaactcctgacctcaggtgatccaccctcctcggcctctcaaagtgctgggattacaggcgtgagccaccgcgcccggttgattttattcaattttaattaattttaattttagtgtaaatagccacatgtgcctaccatattggatagtgaaggagataatgggggtcgtgcctgccttcctaaggtcctggagctccaggatggagctggaaaagacactggccaccaacacttcctttgcagtgaggaagtacagctatgcaggacaagggaacatggagaatcagtgggagtccagggtcctgaagcccaggctccggctcttggcgctacacagggactcttgcagatggctcccagaggtactgagggcctggttgggccattcagtgcctcacgactttctgtcaaaagagaggtgagcaactatggtgaagagggatggcttcagtggctccaggtggatgctaatttctcattccccaagttacatgtgccctgaagacagcccaaggagtgagagtgggagaagagacttcagcctgacgagtcccaggtggatgggatggaggatagcagtgtgtgtgtgcacctgtgtgcttgtgcacgtggccctgtaccagcgtgcgtgaagcactgtacttatgacggtaccaactgcttatgataaggtggaaacccccaggacccaagtcagacgggctgggttccagtcttgattcttcactatctttcagtattcttcactacttgattcttgaccgagtaatcttgggcaaggccttccattctctgggcctcagtttccccacctgtaaagtggaagtattgcctggatctctggtgttctatgattttaggtggtagtgccttagaatgcctgtgtaaatggctacatggggcagggcgggggcatctgcagtggataaggacagctgaggggagttttgcagggacaagagacagggctgactagctcagcagagcagagtctgaactcagagctggcttctgtgagctgggagaactttctgacccacagtctactgccacagcattagccttggtccctgagggactagagggagcttggttccggctcttttcagacttcccacctgaggttgtgtaaacagctccacctgagtcccgttgatggcagatggatggcatcatccctgcacgcaagaacctgtgcgctaggcgaatgtgtagcttgtctgtgtcacattcctgtccacacatgatcacgcagcccctccctctgttctaaaccctagtgaacccagatgcaacaggctgtgaacatgaagtctttattctctttgtcctcaaagcagggaagggctggtgcaggggtcagggcacgcatccagcaggagctccacatccaatgtctccatctgagggcataagcccaggcagaggggcatctcagagagtgttccakctctgggccagggctgaaggcagggcctgcctgggtggcagagggcctcagcgggccaaggcgaagccaatgcggttgttacgccgatcaaactctgtgtagaactttcrgatgaaggtggcccccagggcccaggtgggtccagtgggtggcgggatatccatggcgtggatggccagtgtgcacagctttttactactgtaggattcctggcaggaagggggagagtttctccatacccagcacatgagcattctcctttcaccttgcctgacccccagcaactgtcttcagcaacattccccctctcgcccccatctctcccctagccacactgggcctccctcacatcatggccattttgccccatcgtggactgcaccactcctatgtttagcccctgtgctagatcccaggcaaacaatgcatcaggcaccgtgcttccttcaggagcttacagtttgccttagcttctgatcctagacaagttattcaacttctctaagcctattgattatgaaaagagggtaagaatataggagcataggattmttgggagtatttgatgagaaaatggagatgagggaacaggcatagtgatgcccaaacatggccacacattggaatcacctggggaaactgaaccccaggtgccacttctagaggttctgatttaataggtatgggatgtggcccaggtaccaggatttttcaaagctctccaggtgacatgcacagccaagtttgagaactacagttctaacatgayctgtgcattgtaatctgtcactctttgagggtctctgtccagcctttctccctgccaccgagggggccgactygaacctcacctgaaatacatagtccgcgctggtgagcgtgtattctttgcctcccaggtggaaagagatgtcggggagtgtagggccctcgttacacttcacgacatactggggtggggggcaaagagagccttcttgagtatggaagacrtctcagcagacaaggagtcctgcgctggtggcctggtctctctgctggagagggctggggacagtgccccgccccatgggtgaccagccacatgtgtggagagtgtgaggtgaacaagcgaaggcctgagatggcctcatttgcctgggggatttgtgagccgataccaggtggcgctccccmcacccacagcaccttccctctttggcttcttacatcaaacagcctcttcttggctcccaaggcctccatgagcttctctatggagctggtagaacctgagatgtaggatgcaccggtgtctaccaatgccaggcagccgtcttcacagagcaaggtggatgaccccacagacaccctgggggaggccacagtcagacagacagacagacagacagacagaaggctgatggggcacctccaggctgcatgtccttcctgagtgtgggtgggtgggtggaggccacgctggtggcctgttgaggcagtgagtagaggagggaaggtactgtcaccctccaccacttctccccaggcccctcccttctctgttccccagcctggacagagcaggcagagagcaaatggtggctgtgcttaagaagtggctgcatttggaaagagggcagsatggtaatgcagtccttccccaccctccccaaccccagtgacggcagcattttttggagccyggggagggttgaggatttctgaccccttcatttgaatctgccagacaccagtcttgatgaggttgatatagtggaaattcccttcgtaatgctgggggtcgctgcctcccagcacaatctgtcctcccagcgattgggaattcctaaaggaaagatcagaagctcttggaaacccataacctccaggacccagcaactcaggcaaytggggaaggttgcacaagggtgcaggggaggacagagggctctagagcagaggaatgtgggacagacagccaggctcggagctgwcgttgggaagcaygcagaacatactgcttctctgcctttctwcccctccccaagaccaaccagaggttgttccagggtagtccagctgttcccccaaaaagcatccccagagaggtcacagaaaaggagcaggtacaaggacagtgagtggatgtgaacaagacacaaatggacacccctcactcttgggttgctgctgattgagcaggtgcatgggaggggaccctggggaggctattgggtatggggtgggcaggtggcatggagagagcaggaaggagagacagagaacttcggcatctagcrgaggctgggcttgctgatgtgagttttgggccggtggcktgtgtaattctaggtcaggtgctcggggagtactggaaggtcacagccatgtgggggttttgtctccttactcggaatctctgcagagaaagagagacagcagaaaggaagcttcatttcatgccagcctcatcagccctgctgtttggcagggtgggtgttatgtactctctttgcccttcaggcaatggagtcaccaagaggcgaagtcacttgcctgaagttacccagtccatgagtgaacaagtgggggactggagccaggctcctggtgccccgtctggagctgattcccctcaccttcctttcctcctcactgcacttggctcagggactactgtaggcctagtctccagggcatgcctgtgtgtgtgatgtgtttttccagaattcatactagaattcacacatgcacatgtgtgcatgggtgtgtaggtgtgcatatgttattttgtgcaactgcaaactacttgtgtttttataaattcggaatgtatgtgtatatgctagcacaaattccctcctgcctgtctctcaacacttcagtatctctctggatgttccctccttcccatcccaagataaaagaagaggccagccctctcctctgcaaaacctggcttcttcctgtctgctggaacctcatctctttcaaggcctccaaactccagtgcccccatttagctcctcttctttccacatttttaatctctttctttccattggcttcttcctccacctacaggcatcactcgagcatcctctagcatttaaaaacacccacccttcctcttctgcttctggatctcaccccccacgccaccccccattcccttccctgttgaatgtcccagggcagcctacatctcatgacctccacttcctgacacccacgtcgtccacctcttaacttcttgccatctggccttgcccccacttcctctaaaacagttcttctaaagaccacccctgaatgcagagccgccaattggccttttctcaaggcctcactttctatcaccaaaccggagactcctctccattttactgtgagatttctctgaactctgatcctctcctctattctttttgccactggcctcatgttcttacccttgtgacttttttttttttttttttttttttgagactggatctcactctgttgccttagctggagtgcagtggcacaatcactgctcactgaagccttaactcctgggctcatgcgatcctctcgccttggcctcccaaagtgctgggattacaggcatgagccactgcacccagccccttttgcctccagctctcttgtctccaactcatgccatctttctaagcccagcagtttggagtagagcccaaccctgctcaagagcttccccaaggctggctgagctgcatataagctcagcctagaattgaaaagcatccatggttttcagcaccacacttgctgcctgcctgtgacactctttatgttggaatatgtcttgtcttccctgttagcctgtaagctctatgtgggtaggggagtacagattctgccttgttcactgtgttcactgctgcacccccagagcctaccacagtgcttggcacatagcatttactgaactgatgagtgagcaaacaaacgaatgaaggatctaatggatgactgaagttggctgtctctgtgtgggaggagccatggccctaacaggcagggctacaggtcacagtaatcccttatttaccatcgcccccaccttgcatctcctcttgctccagagtggcgctgtctattagaatgtcctgtcatgctgggaatattctctatctgcactgtcataagactgtagttactagccaccgtggctgccaggcatttgacgtgtggctagtacaactaagagccaccagttgaatgcttaattgatgcttaactgtatttaattaatttaaatttcaatagtgccttccatattggctagtacagctctagatattgattggctgtcacctaattacaaacactttacaattctggcccagactctccttccactccccatctcttctcccctcctgtccccccacctcagcccttggagtcccagtccccacctgttgtagtagaaagagaagacgtcytcttttagcacccyttgggagatgatgttgtcgaagataggggtgaccctgccaatggcctgttcaatgaagcccatgcccacaaccccatcaaactcggccagcatgaagggtaaggcgggcatctccgtgacctctccaaacatctgtgtcaccgtgattccacccacctgtgggaggaaggaccagaggagaccaagcccactgcccactccttggttggagtctggtctgggcttccacactagggatcccaggggcacacatgctccagggtayagaartcggggtaagagtattkcctcaaccctgcacgcacacactctgtgccaatacacatctctgctgcggagcccagagagagctagagttgaccagggatcggagagcagaggctgagagggtggtcctgccaagcagcaaaagaaaagctgccaagagctcctcccctccccagtggccagactttcgtgcctggcaggactgggtcttggcccccacccttatcatgggcgaagggtttctttagcacagacaagcttgcccttctccctcctttatatctgagttcacagaaaaaggaagggaggcaggaatcaccctgatttcctctcaggtgccacgtgtgcccctcccctaactctgatggagcagggcctgagaaactccaggatgaggaaacggtcagacatgggccacatggaaaagaaaagcaggccttgacctgagtcccagagtcaacctcaactgtgaccttaaaacctatgcctgaccctaaaactcagcctgactctgaccctggatttcagtctagggtgtagcccagtcagagctggtgaacttggacgagttacttgactgcagccacggggctcaggacaagccctacatgcaagttagatgcaaaaacatccacaaaccacccaacggtgagcccgtagcccaggcttgctcccccataggtactgctgctttgcagcaacagccagatgtggcagagyagggtgttcctcagctccccaggctccaagtgggctgcagtgtacctccccgcaggtgtgggccctggagggtcaggagaggcctggggacagaaggggtccggggcagatgacctmgggcggcccaactyacggtgatgatgtcctggctgagaaagccactgactgtccctgttgaatagcggagggtgagttctgttccattgtgcttgtagctggaggaatccgaagcatcgaagagcttgtgatacactggcagggggacagaggctcaggtttgtccaagagtggcccagacagggggactcagaggcagggtgcattgtgggtatggctggttagcttaggtgcagggatgagtggccctagggtcagggggcttggaatatgtgcttcatcaatcaaggactgggtttcttgggctctcctaatgtgcccatacatcgagaattttgtcctaaatgaaggaatttaaagtaatcactaacactgataacaccagagaagatgccaggcacagagtaagtgcctagtaagaggttgttgattaagactagggatggaagagttccgagtgcctgggatgggtttgagaattcagtcctgtctcaatctcaggaagactgggaagtggccttctgggtgctcaggggttcttggacctttttttgtttttaaccttggtggctgtatcagaaaaacgggagacatcttcccctctcccctacatgtcagtgggcacagaggcagagaggaagccactcccttggtggcaagagggatgggagctgggtgttgggcaggattgctcatgcacagtasggcagggggatggaggagaggcactgtgggtcttaggtctcaccacaggcagtgtagagacggctgcacttggaggagggcacccaaacattggacgaaccagtgtcaaagacgactttgaaggtytggggtggggtgccgatgccaatctcgccatagtactgggtctgtgggggtaaaaagagagggctggaggggctcaggggaccttgggtcttggggtcttgcctggcttcactcttggctctcggtgtgagacttggcccaggcgaggtcctatagcctctcggggtttccattttcctgcaggaactggtaggaggcttagcatctccccatggcatcccagaaagtgggagtctcagtaagacaagagggcaaaatcaaaacattgagaatgaagcaggaagcaaacttgactcttgaggatcctctggggcaggaagccatcaggttgtgctgggccaggtcacagaaacccccacctgagtcacacaccccttcccacccacctgtgacacctggcttgaggcctgggctgagttccaaacctaaccctgcccctgaatggcccctggatgccttcctgtcttctgtgctcaggctttccagctggaaaatgggaattttctagggtgctcacgtgctactcagcgccttcgtcaaacacagcttggaaagggtgagtcttgcagcaaagaaagccctaggtccatgagggaaaggagacagggagggagcgaggggctgagccaagcactcacgtccatgtagttggtgaggatcacggaggaggtggtgttgccaagkgtcagcctcttcatgggttggctccactcgggaccaagcctggccatgtccacacctcgttccttcaggctttctcggattgagggcattctcttgaggaagatcctggcccagggtggaggaagcaaaaatagaaaagtgctgtacctccaccacagtggtggagtccctgaggccaaacccctgcttttagtacaaccacctttaacgttagcccagccacctggaaatcacctctgtcgctgagggcctctggagcatttataagagttacttcttgtcaagagtcaatttagaggagtcagctgcccggggattaaataaccctgaagtgacttccttctgttgcctaattttgattagacaaggctatttgtttattggtccgttcattcatttattccgtaatcacctgctgaacaactactttgtgcctcactgtgcyggacactggagctagaaagataatgatcatgactgcctttaaggaactccacctggcgggaggacagacaggaaacaggcacagacattccctctgaagagattaatgccagggagtgcccctgtcaaaactaggggctggcggggagacagtgccatgggaggccgctaggtggcagcagatgcccacagcagctgcaaggtctccaggataccaggggacaggcacccagccagggctgtggtggagtggaccccctgagctgggttgggcctagagagatgccagcatcttcagagcgccatgcacctcgtccttggagagatgtgtcccggtcccttggcttcttgtctagatgttttcccatcacctttgagaggcagaattaaagagacctaggaaactgactctactgagccgctactgaaatcacaccaacaagctagctgtcatccattttatagatgagaaaaatgaaggctcacagggacaaaggtgactcagaaatgttgaagcagggattcagagcatgtgtctggccctatttcccatatagggtcccctgggtcccgacataaaggctgccaaagcccagaggaagatgtctctagctgttcacgggaaggtcccaggatggaagcccaagttgactctgcaatagactttcccatacacacaaagattccctctttcttctactttcttctcagtggctagtcctcctatactcacactaccctttccttcctacatccttcttgcgtcccatgcattctacttacccccattttgcccatgaacatgaatgcaacttttatgcctatcagcatggtattgtaacagaaatgatttgttatcttcctatcacaggttactgttaccaaaatattttcacaatcattattttatttgctctcataaggtggatgattttattactcccacttcacagctgggaacgtggagggtcagaggtttggccccaaagaggttgcatttcccactgtttactcacaacagcctatgctttggacctttacttcttgccatttccttttcagaaaatcctttccttcttcccttccttttccccccagttctttagtcctccaaggcccaacatgtacccccacctccaggaagcttaccccaaggcctccagcccacaccggcctcaccttcccktgggcctcagctctgtttttccttgggtctcacagcccacactgtacagcttgtggaactggtgccgtacggtggtgaagacagtggttgcagggggcatgcctgaatccccttaccacttatgtgattctgagaaagctacctaacctctctgggcctcttctaagtctccattaacccctctctaacaatgggcctaatggtagtacctacctcagagtcactgtgcagatgaaaccatgcgaccactgctcaataaatgtaaattgtaggtgtgtatatgtacatgttcaccttgagaatggagctcattcattcagctgtcccaagtgcctcgcatgatgctctgcacatagcgggtagcaaaattcctataatactgtttcaaaagctggattccccctccaccccttgcccaattccattctttttctcttttggataacagcaggggaagatgtttttactttcctctacctttatcctggagtgcagctgctttgaagcacccatcctcttacccagtgctcacaacccagcaattactctccgagagcctcagagcaagggaaagcagtttcggaagcaaaaggcccagtgtgtgttgaggcttakcctcttacatatcacctccctgagcctcagtgtcctcatctgcaaagtgggaatgctgagttgttgggggcatgacttgagatgagacatgtgaaaagatcctgtgacaccctaagcattttataggcttagcaactattaccattattaaagtgtgcctccctaccttcaggactgctggtcatatctgctgtccccagattgaaaacccctttctctgtgaggccttttctcaaatgctgtctcttccccttcttcagtctttwttttttttttttttttttttacataaggtctggctctatcacccaggctagagcacagtgggtcagtctctgctcactgcagcctccacctcccaggctgaagtgatgctcccacctcagcctcccgagtagctgggactacagatttgcaccaccacacctagctaatttttgtatttgtacagacaaggtttcaccatgttgcctaggctggtcttgaactcgtgagctcaagcgatctgcccacctcagcctctcaaagtgctggaattacaagcatgagccgcgtgcccagcttccttctacagtcttaatgaatcacttgttcccacaaggcctggcacctaggggatgctaaggttttctccttctaattgtgggctacctaaagccttgtttttttctttcttttttttttttagactgarttttgctcttgttgaccaggctggagtgcaatggcgcyatgtcggctcactgcaacctcagcctcccaggttcaagcgattctcctgcctcagcctcccaagtagctgraattacaggcatgtgccaccacgcccrgctaattttgtatttttagtagagacagggtttctccatgttggtcaggctggtcttgaactcctgacctcgggtgatctgcccccctcggcctcccaaagtgttgggattayaggcgtgagccactgctcccggccaaaccttgcttttgatatttgtaagaatctatcctgtagtactaacagtagctgggctcttacaacgtgcccagctttctatgccttatctcctaaaatccccaaagcagccccatcaagtaggtactgttattatcatacctgtttaaaatgataaactgagacttggagaggttaaataacttgcccatgattccagacctagtttgttctgctagtgaagcaaaatttaaatgaaggcaatctaactctataagccttgcatttaaccacgatatcaagctgcttccctggtacagttaactgtacccatgccccgacccccgtcttttttttttttgagatggagtcttgttctgtcactcaggctggagtgcagtggcacgatcttggctcagcaatctccaccttccgggctcaaacrattctcctgcctcagcttcccgagtagctggggattacaagtgcctgccaccatgcccggctaatttttgtatttttagtagagatggggtttccccatgttggccaggctggtctcaaactcctgacctcaagtgatccgtctcagcctcccaaagtgctgggattacaggcaggagccaccgcgcccaaccacccatgcccttcttaatattcaggctgtgagctcctcaagtgcaaggggcatgtcctaatacttstgagttctctacagtgcttagttagcatggtgctctgggcaggaagcaaaagtcacagcttctagacctgactactagtgtcatttattgggcaagtcacttgacctctctgaacaggtccatacttccctgtccagctgatcrtaaggactgaatgacaccgcatgtggaaaagccagggtgttgggaaggtgggaaccctgcacccctcccaccccttctctgcctgagttaccaattaccgtttaaaggtggtggtgtctgtcgggagaccaaaggtacaggagccccagagcagcagcagcagtccccagcgagscatccttctccawccatccatgcttccctcagtctggggctctctctgagatccactgaggttctgtggctcccttagcccttccccttttatacactccatgcatggggtgattgcaattctgctctgccctgatttattaccctggggtagatggcagggcagtcagcaataaatctcactgcgggacagagctaggtgggtgaagggtacccaggtttccggatggggagcagaggggctggaggaaggacagctgtgggaaagcaatcttgtgtccagtgacgctagcagccctctatctggcttggccctgtgacccctggagcaggcagaggctgatgagaaacagcactgctcagggctaacatcaaaactgggacaagcgtaaaacctaggtttccagctccctagcccagacccaacccctataccctggaagctccattctctatattaactttggctttgtccctgactggcctctcccaggctacagcccagttttcccatctagaacatgggtgaatcttcatgactggtttcttggcaggaaaagcaacagctggtttaattataagagtagaggggccaggcatggtggctcacacctgtcccagcactttgggaggccaaggtgggtagatcacctgaggtcaggagttccagaccagcctgaccaacaatggtgaaaccccatctccactaaactacaaaaattagctgggtgtggtgatggacacctgtaatctcagctactcaggaggctgaggcaagagaattgcttgaacccaggaggcggaggttgcagtgagctgagatcatgccactgcactccggcctgggcaataagagtgaaattccatctcaaaaaagaaagagagtggagggagacttagcatgactgactccattttgcctctgacccccaggggtattatcctttaggctaaaagcttctgcttagctctgtacatagaccagctaattataggagtttagcttgcagttcaactttaaaaaaaatggtaacagttcctttccccaaactaacccccaaggagataaggaaatatacagacaaataacaatgttatgttaaagatgtataggaacattgtgacctgacctagaaaaaagaagttttacaacgtcctcagacccttgctggcacccaggtgtctgtggtcatcagtcacctcttgatcccaatccccttcttcttccccttcccttaacataaagaagagcctaacgttcatgctgacttcagatggttctttatgatgctggtccaccatcttcttggttttctggttctctgaataaggtagctttccttgccacaataccttgtctctagacttattggctgttgtgtggcaagtgatacgagcttggactcagctactcatagccttgaacagtctttctgtgtctgattacattcaagtattgttttcatcaggtttgacttacaggttatctaaatgggcttcccataagaagaagcaatcacactacagaaagtttttctttgcgtttttggtagctggcctaagaaacaattattttaggctgggaaacagtggctcatgcctgtaatcctagtgctttgggaggatgaggtaggaggctcacgctcacttgaagctcgttcaagaccagccagggcaatatagcaagaccccatctctgaaaaaaattagctgggtgtggtggtgcgtgcctgtagtcttagctactggggaggctgaggcgggaggatcacttgagtccaggagttcaaggctgtagtgagctatgattgtgccactgcactttagcctggatgacagagtgagaccctgtctcaaaaaataaaaggaaagattttacattttctcaagataattcctcattcttgttatctttatcaggtttttgattacttaggaaaactgagctttagaaaggttaagtctttatattcatgtaactttctgtattgctattaaagtcttttaattatcacttttgtgaaatgaataattattattttacaaagaccggcggttctgttttgatcaaatggtttgaggctttaacattttgacaaatgtcctcaaaatctaatcctaaattaagtttgaaatgttgctaattctttatgttttgttttccagagtcaagaaagccttttttttttttctgagacggagtcttgctctgtcacccaggctggagtgcagcggcgcaatctcggctcactgcaagctccacctcctgggttcacaccattctcctgtctcagcctcccaagtagctgggactacaggcacgtgccaccacgcccagctaattttttgtatttttagtagagacgggattccaccatgttagcaaagatggtcttgatctcctgacctcatgatctgcctgcctcagcctcccaaagtgctgggattacaggcgtgagccactgcgcctggcccgccttttttctttttgagctatttatagcttatagaaattgggtttacctttctctctgtacctaatatctccaggatttaaaaaactattaaatccctctgggcccaaggacgctcatggaagaggtgggcacaaaacaccttttgatgtactaattttacttttaaggagtaaaattagttcagatcctccaaatataggtacacagatgcctaaacagctgatggctcaacacatagaacttatagaaaggtcagttttgtacctttgctatttggcttttggttttggctcttatgttacttaaaaggttttaagggttaatgaatgcttggccacctcccttaccaaatggcctaaaacgtttaattgactacaagtcttttggctttgagttccttagccacagggatcctaccaagggatgtgatggacctggggcacatagccacaacacccccagcaacaatatggaacaaaataaaagtttggccatttatgctgcctttggtatatcttggccaaatgggagaatgtcaactaaaaataaaatattaagccccctgctgactgaatggaccccctcttggctaaggggaccccagaaaaaccttaaaaacttagtcttcaggtataatgtgatgggaagtcagatacgcctcattataccctctcccttttgtggtttagatacaataactaatcaacactaatgttaaaatagaggtcataagactgacataactgaaattttgtggcaataaaataccatattataaacaggacctaaggccatgccaggcaagagttaagtcatgcatccttacacttaaagaataagctatattctcaatgacacaaggtttctctttttctctagcagctaagcaagcactggccttaagacaagcaatattaaaacaatttcaactcatccagttcatagatgctgactaactgaaccccagttccaccagccataactatagctttgattgaacaaaagactgatttcactaattttctcctgataataagactgctggccatgaactggttctagctagttatagagattgtgcatttgcatgcctttgtgttctgaaaagaccttttgatgtacagggcctaattgtagtacatttaaatgttacgctttcacctcaaggtaaacatgggtcatatgtaacatgcatgtttgtacaatacgcatgtgtcaggatcaccttcataaatattcgtagcttcttctgtaacatacatacattgaatatgtatgcttagccaactgctgtcatagtcccacaggagccctgggtaaaattgacagtggggaacaaacttattgactttcttattgatacaggggcaacgtattctgtagttaatacccacctaccttaattcaaagactatctatgatggtgacaggagtgtcaggggagctgtgacttgtctcttcctgaaacctttagattatcatcttagagaccacaatccatgggaaaaactgaaaagatgaaccatactctaaaaagaagcattgccaaaatatatcaagaaactaatttgacttgggataagatgttgctgattgctgttgtggattcgagtggctccctcaagtaggttcaaattgagcccctttgaagtattatctggtagcccattctaggtttttgtcctggtgggagaaccaactgatgttttaagagatttggcaattaccaaatattaagactctaggcactatactaacttctgttcatgagtttgcttctagcaggaccactcatccagcagatgtggtcctacatccttttcaactgggaaattagatcctcctaaatacctggaaagaacaaggacctgaacaccaatttgctgccaagtggacaaggccatttgagctgctggtgaacacacgcttatcagttaaacttgctggagtaaagccatgtgcacattatactcaggtcaaggcagtaccaccagaagacagcccactaatccggaaaccaggaaaacagtgggcttgtgagcacttgaaagaccgaaagctactgtttcacaaaaagataagtacaatgaaaatgtatcccctatgtgtcttgcatgtcctttagagatttttgtttccttggcaagacaactcttgagttaggatttctcaatctattgcctctttcactagcatatcacactgccagatttgtcatcttaaaccttgttcagtacatgaccactctgatcctctagttgttcctgtacacataattttagtcatgtagcctcttgggcattagatctatagaagctggtttctcaaatcatacataggatccaattgataactccatacccagaggccccatgtttctttcttatgcagcacctcattagacactacatgcaaagcaataataaggacccacaagcctgcaagcctactttctttttttttttttttgagacggagtctcgctctgtcgcccaggcaggactgcggactgcagtggcgcaatctcggctcactgcaagctccgcttcccgggttcacgccattctcctgcctcagcctcccgagtagctgggactacaggtgcccgccaccgcgcctggctaattttttgtatttttagtagagacggggtttcaccttgttagccaggatggtctcgatctcctgacctcatgatccacccgcctcggcctcccaaagtgctgggattacaggcgtgagccaccgcgcccagccgcaagcctactttctacttaccaaatggcgtccctaagctagccacctgttgctagcttaattcctcctctacagacccatattgatacaattagacaacaggctacctggctttaacaaaccttagaacaccaaagcaggcttaatctgggggcacttacagagactgctttaaagacctattctcctggattcctagtgtaattccatcaatcttgggaggcattcttaaattcagccttgatgttcttcttttagtcatggtggcctacgttctagtaaaacttattatgtactgtgtaaacaaaggttgtgcaagtctcgctaaaactatcaaagcaaaaagggaaatgccgatgatcattgttcctaaaaatggcactacgaaatatttccttagccaggtcaaatggtttcattccatagtcaccccttgtcaaccctgtttggcaggaagtagccaggtgagtaatgatgtctcattttccccaatcccacaagactgtgggatgaacctttgacaatggggaaattgaaatagtggagggaggcttagcatgactgactccattttgcctctgacccccaggggtaatatcttttaggttaaaagcttctgcttagctctgtacacagaccagctaattatagattagcttgcagttcaacttaaaaaaatgataacagctctttcccccaaactaagccccaaggagataaggaagaatacagagaaataacaatgttatgttaaagatttataggaacattgtgacctgacctagaaaaaagaacttttacatactcctcagacccttgctggcacccaggtg

SEQ ID NO: 96250 - DNA, 13102 bp, Homo sapiens
acaattaccatatgacccagcaactgcactcttgggcacttgtcccagagaaatgaaaacttatgttcacacacacacaaaaaactgtatataaatgtgcatagccattttttttcataatagtcccaaactagaaacagcccagctcacctccaacacgtatatggtaaaacaaactgtggtatatctataccatggaatactaccgttcagcaacaaaaaggaatgaactattgatacacgcaacaacctggatgaatctccagaaaattatgctgattgaaaaagccaatcccagaaggttacatatggtacgattcaatttatataacatttttgtccaggctcatgactgtaatcccagtgctatgagaggtagaggcaggataatcatttgaggccaggagttccagaccagcccgggcaacatagcaagacctcatatctacaaaaaattttaaaaattaatcaggggtggtggcatgcgcctagctacttgggaggttgaggcaggaggatagtttgaggctaggagttcaaggttactgtaaactatgatcacatcactgcactcaagcctgggtgacagagaccctgtttcactttacatatttatataaataacagttttttttttttggagacggagtttcactctgtcgcccaagctgaagtgcagagtacaatggcatgatctcggctcactgcaacctctgcctcccaggttcaagcaattctcctgacttagcctcctgagtagctgggattacaggctcatgccaccatgcccgtctaatttttgtatttttagtggagatagggtttcaccacgttgggcagactggtctcaatctcatgacctcaagtcatccacccaccttggcctcccaaagtgctgggattacaggtgtgagccactgcaccgggcctaaataacagtttttatataacaaaatttttgaaatggagaacaggttagtggttacaagagattagggatggaggtgggaatatactgtgttcacatgtgcagggaaagtgggtatggtataaaaaagttaacacggccaggcgcggtggctcatgcctatgatcccagcactttgggaggccaaggtgggcagatcacctaaggtcaggagttcgaggccagcctggccaacacggtgaaaccccatctttactaaaaatacaaaaagtagccaggcatggtggcgcatgcctacaatcccagctacttgggaggctgaggcaggagaatcgcttgaacccgggaggcggaggttgcagcagtgggcccagatcacaccactgcactccagcctgggcgacagagcgagactctatcttaaaaaaaaaaaataaataatgctgggtgtggtggctcacgcctgtaataccaccactttgggaggccgaggtgggtggatcacctgaggtcgggagttcaagaccagcctgaccaacatggagaaaccccgtctctactaaaaatataaaattagccgggtgtggcagtgcatgcctgtaatcccagctactcgggaggctgagggaggataatcgcttcaacccgggaggcagaggttgcggtgagctgaggttgtgccattgcactccagcctgggcaacaagagtgaaactccatctcaaaaaaaaaaaaaaaggttaataacagtgattgctgtgttgatggaactgttcaaaatcttgacagtggtgtggaaagagaaacctacacgtgatataaaattgtatggaaataacgacacatacgcagacatgaacaagcaaaacaaggcaaatctgagtaagattgatggactgtatcaatgcccattacctggctgttacactagttttggaaaatgctgctattggaggaaattgggtaaaatgtacaagggatctctctgtattattttatgaaactacatgtgattctagttatctcaataaaactgtcaattgaaagcaaacaagaaaaatgggaaacaagaaaatagttgcaataaatagagtagacaaaaaccacactgaaacaataaagaattttaaaagacttaaacccacaaggagggggatgaactagagaggagacaacaatattttggaacgtggaaagcaaatgaaggaatgataactgactaagcaaacctaagaacgctatattgaataataagcatgcaacagaaaaaactttgaactataccaatcaacactacagaatcttcccctaaaagctcagtaactggcagtaccagatgatgtgaaatcaatgatttaggatgaataacactgattgaaaactatataagaagcaattatggctgggcacagtggctcatgcctgtaatcccagtactttgggagggctgagacgggcagatggcttgagcccatgagttcgagaccagcctggacaacatgatggaaccccatctctactaaaaatacaaacattagccaggcgtggtggcaaacacttgtggccccagctactcaggaggctgaggcaggaagatcgcttaaacgtgggaggtagaggttgcagtcagccaagattgcgccactgcactccagccttggtgacagagcagactctgtctcaaaaaaaaaaaagcagcaattatttatttaattccttttctcactcacataccacccccgacccaaaaaaactagagaggctagtttctcaaatagagaaagctcaaatagaggatctctggaccagggtgctccaggaatagtggaggacatgagtaccgtacctaaaataaggagattaaatgtggatttaaacatactgaatgctgaaggctgaagccccagtcctctttttcacctagctcaaagaaatctttactctccaggaggattggaaggggcttgttatttttctaagaaatctggtaagcctataaggaaacacctaacgatcttgacatctggggtttcccaacttaacagtcatctcgctgtgaagctcaccataaagatgtcctgcaaatgcactcacagcttcaaatataactttcagcgctccatcttaaagatgtttaaaacgtgagcagacaaccaagtactaccagatatctgaggaatgcctctaacaaaaaagacagagaacaaaaccagcatttcataaatcagtcaactgaggctcacatcagctaaaaatgagattagtatttaccatactgcacatttcattcatatgtttaataaatatttattgggccaggtactattataggtgcttgagaaacaaagattcacaaagcaaaacaaaagaaaacaaaatctctgccttggtagagtttacattctagcagatagataataaacaataagcataataaagtatacacatagtaaattaaaaagattagtgcttcgagaaaaaataatgggataggataaaaggagggtacagaggtggttgcaaatttcaaataggttgacatttgagtgaagacttgagagagatgagggagttggccatgctacgtacttctctgtgataaaagaattctagtagccagaaccttcgatgtaagagacctaaggcaagaggagctgcatttcaaggaacagcagaatccagtagggctggaggggcatgctagtagggagaaataggagataaggccatagaggtatggcagagagaagcacagatcatgtggatcattgactttttctctgaatgaaattaagagccaatggagggttctgagcaaagaagtgataatgaatggacaagtttcaaagaatcattttggctgctgtgctaagaacagactatatggaagcaagggacataggttagaaagagagagaatggaatttctaagaatgttagagttgacaagggtgttggaagtaattttttttcccaagtctttcattttagagatgaggaaactgaggcccacaacattgcgttttccaaggtcatgtgttaaagtctgaaataaggctgggcacaatggctcaaatttctaatcccagcactttgggaggctgaggtgggaagttcttgagctcaggagttcaagacccgcctgggcaacatagggagaccccgtctccacaaaaaatataaaaaattagctgggcatggtggctcacatttgtagtcccagctacttggtaggctgaggtggaaggatcacttgaacccagaaggcggaagttgcagtgagccatgattgtcgccactgcactgcagcctgggtgacagagcgagactgtcccaaataataataataataatgtctggaataatccactttgcatttgtgtagctttttcagtgtttttaggtttatcatctcatcttgtattcagcaatcctctgggcagttcatagggcagctgataactgacattaatttggccaaaatagctggccaaaattagggaccaggtctagaatatcctctcagtactcaatataaagctattaactacatagggagtgaatctgccatcttgcccataatatcacaaagtgctaaataacctaagtaattcaagtaatggaaatgactcatttctgctgatctaattccatggtcccacaggagagctataggtattaaatgcagtacatgtatgttaagtggaatgatatacattacaaattaggaaaaagagtaattctgaggcaaataggaaaaagtgattttgttacacatgatattgtgagctcaggtctctttcccatcttctttctttcctacccaagtctcatcctgcaaggtctttctcagatttgaaagcagctgataaacaactaatttccttaagatggctgttgataatagctcaaagtattacttctctctaggggtatgtatactttaatagaaaactcaaaaccttcaattccaaaggaactgcagtcaagttagcagggaatattatactgaagacctcttggcagttactcaaatcccattaaataaattcaaactcaacaactgtttattgttatctaccatactgtcagtcacaaagataagacatcgttcttgcccttaagatgctaagaatggaagaagaccacacagaaaatactagcttttgtttattgaatccctactaatattaagcattgagctaactactttccatgggcaataagtatcaagtattatacttagcacagtgattagcaaataatgtatgttcaatatattgtagccgtgatagtataattataacctttgtaattgcatttaatcttcacttctgctctataaagtagttatcagtgttactttacagataaaaggaaactgaggcccagaggctaggtaatatgctcaaagtcacacagctattaggagctaggattcaggcccagcacggtggctcatgcctgtaatcccagcactttgagaggcaagcggatcacttgaggtcaggagtttgagaccagcctggccaacatgatgaaaccccatctctaccaaaaaatacaaaaattagccaggcgtggtggcatgggcctgtagtcccagctagtcgggaggctgagatgggagaatcacttgaccctgggaggcagaggttgcagtgagccgagatcacaccactgcactccagacagggtgacagagtttaaaaaaaaaccaaggccaggtgcagtggctcacgccttgtaatcccagcactttgggaggccgaggtgggtggatcacctgaggtcggcagttcaagaccagcctgaccaacatggaaaaaccccgtctctactaaaaatacaaaattagccaggcgtggtgacgcatgcctgtaatcccagctacgcaggaggctgaggcaggagaatcactcaaacccaggaggcagaggttgtggtgagccgaggttgcaccattgcactccagcctgggtaacaagagtgaaactccgtctcaaaaaagtctctgctcctcctgttcgacagacagccacatattctctcgcattggcagctgcatccctgagacaccatgggtaaggtgaaggtcagagtcaacagatttggtcgtactgggtgcctggtgcaccatgactgcttttaactctggtaaagtggatattgttgccatcaatgaccccttcattgacctcaactacatggtctacatgttcctgtatgattctacacatggcaaattccatggcaccgtcaaggctgagaacgggacgcttgtcatcaatggaaaccccatcacccattttccaggaccaagatccctccaaaatcaaatggggtgatgctggcgctgagtacgtcgtagagttcactggtgtcttcaccaccatggagaaggctggggctcacttgcaggggggagccaaaagggtcaacatctctgtcctctctgttgatgcccccatgtttgtgatgggcgtgaaccatgagaagtatgacaacagcctcaagatcgtcagcaatgcctcctgcatcaccaactgcttagcgccccagccaaggtcatccatgacaactttggtatcatagaaggattcatgaccacagttcacaccatcactgccacccagactataaatggcccctccgggaaactgtcacgtgatggctgcagggctctccaggacatcatccctgtctctactggcgctgccaagcctgtgggtaaggtcatccctgagctgaacgggaagctcactggcatggccttccatgtccccactgccaatgtgtcagtggcggacctgacctgtcgtctggaaaaacctgccaatatgatgacatcaagaaggtggtgaagtaggcatcggagggccccctcaagagcatcctgggctacaatgagcaccagatggtctccttcgacttcaacagcaacacccactcttctaccttcgatgctggggcagccattgtcctcaaggaccactctgtcaagctaatttcctggtatgacaatgaatttggctacagcaacagggtggtgcacctcatggcccacaatgcctccaaggagtaagacccctggaccaccagcccagcgacagcatgagaggaagacagaagctcttactgctggggagtccctgccataatcagtcccccaccaagctgaatctcccctcctcacagtttccatgcagaccccttggagagggaggggcctagggtgccccaccttgtcatgtaccatcaataaagtgccttgtgctcagccaaaaaaacaaaaaacaaacaaacaagaaattaaacaataaaaaaacccacaaaaaattaaaaataataataataataataataataaatttttttaaaacccccaccaataaaaaagagccaggattctggatcaagaggtcaggagttcgagaccagcctggctaatatggtgaaaccccatctctactaaaaaattcaaaaattagctgggcgtggtggcacgcacctgtagtcccacctactcaggaggctgaggcagcagaatcgcttgaacccaggaggtggaggttgcagtgagccgagatcgcgtcactgcactccagcctgggcaacagagcgagactccaactcaaaaaaaaaaaggagccaggattcaaactcaagcctgcataattctataatttgtgctattaacccctatataatattcaatatttctataaaattaataggtgtttaacttcattcggaagtctgagcaactggctaacaagaatatgctgtaaagagaaagtgatatttaagttggatcctgaatgacaagtgggaaagaaagggggtaagagtagagtttggtccaggttaaaaatgatgagggtctgaacaaaggaagtggcaacaagtataaagaggggaagttacaagagataagcaggagatagtctcttaaagaacctttgtgatgtaccagatgtgagcagtgagggaaaggcatcaaagatgactcacaagtttctagtttgggtgactgggcagaagtattcccagtactaacactgagaaagtactggagaaaggaatggagagaggtggactttagggacaaattatgatttttctttgaactttgtgaatttgaagtacatttgggacaactaagcaaggaaatctgttaggcaactggaaatcatggtcaaatttagtaaagatgtcagggcagggaatggatatttgggagtcactgctataactacagtactttgaaataataattgtgtaagagactgacacataggtagcactcatgccatcttatgtgtaaggctggtcttaacactgagaatatactgaactctgaaaataagcagggccgtaacatgtccccacaaatcaaatatgcccatcacctccatctttacagaagaaaaaaaaaaaaaagacgttggaaatggagtgtagctgatatctgacgacaacgactcagatagccgttagtcttttaaccctgcatcctcaaaatacctggcaaactagatgatcaataaatatgtgatgaacagaaagcatgaatgaaggaagcccaaagaattaaacagaatttccaatgttattcagcttaagtaggggaatggacactagaagctaggtgctctcaatcttgtgtgctttacattccagaggtttctccagcctccttcctcacctgttcctcaagaattatcttgttctgaaaaatatcaacataatttaaaatctctaactacagtataaatgttcccttcaaaatctcatattgggctgggtacggtgctttatgcctgtaatcccagcactttgggattgccgaggtgggatgatcatttgagcccaagagtttgagactagactgggcagcctgggcaacatagtgaaaccctgtgtctacaaaaaacaacaacaaaaatagccacatgtggtggcatgtgtctgtagtcccagctacttgcaaggctgaggcaggaggattgcttgagcctgggaggtcaaggatgcagtgggctgtgattatgccattgcagtaagctgtgattgtgccactgcactccagcctgggtgacagggcaagaccccatctctaagaaaaaaaaaaatcccatattcatagaagtcatctataaaaaagtccacagttaattaacatcatatttaataattaagactgaaagttactccctaaaatcagtgaagaagttaaggatgtctgttcttgccacttctattcaacattgtactggaggttatagctagaaaaattagacaagaaataaagaaaaaagacatcgaggttgtaagtaagaagtaaaaggatctcaatttgcagataacatgatctcatatatagaaaatcctaaggaatgcacaaaaatcatatcagagccaacaaacgaattccacaaggtggtgagatacaagatcagtacatataaaacaatagtatttctgtactctagcaatgaataatccaaatatgaaatcaagaaaacaattccatttaaaataacatctaaaagaataaaatcctcaggaataaatttaacaaaagaagtgcaagattttggtgtacaacccctaaatttgactggcttaaaaaaaaaaaaaaaaagaaaagaaaaaacagggctgagcgtggtagctcatgcttgtaatcccggcactttgggaggcctaggcaggcagatcactcgaggccaggagttggaaaccagcctggccaacatggtgaaacccgagctctactaaaaatacaaaaaattagctgggcttagtggcgtgcacctgtagtcccagttatttgggaggctgaaacaggagaatcgcttgaaactggtgggtggaggttgcagtgatccaagccaagactgtgccactgtacccctgcctggtggacagagtgagactctgtctcaaaaaaaaaaaagaaaaagggcaagatttgtacactaaaaccacaaaacatcattgatggaaattaaagaagttataaataaatggaaagacatctcatgttcatggattggaagattttttattgttaagattgcagaactctccaaactgactgacagattcaatacaatctccatcaaaatcctagcctgcttcttgcagaaattgacaagctgatcctaaaatttgtatggaaatgcaaaggactcagaatagccaaaacgatctcaaaaagaagaataaagttgaaagactcacaattctcaacacttactacaaagatgagtaatcaagattgtaatactgccataaggatagatatgttgatcaacggaacaaaactgagagtctagataaaaacccatacatttatggtcaattaattttcaacaagggtgtcaagaaaattcaatgtggggtaagaatagtcttttcaacgattggtgctaggaaaaccgcatatgtacatgtaaaagamtaaagctggatccctacttcacaccatatagaaaaattaactcaaaatggatcaaatacctaaatgtaagagctataaccataaaaatcttagaaaacactagtatccagaatatattcttacaaagaacctaattaaaatattgacaaagaatcagatatcttcaaagaagatatacaagcacataagcacatgaaaagatgttctgaatcattagtcattaaagaaatccaagtcaaaaccacaagataccactttacacccaccaggatggctattattaaacaaatgaacaataacaagtattgttgaaagtgtggggaaattggaatccttgtacactgctagcgggaatgtaaaatggcacagccatttacattctggcaaacagtttgccagctccaaacaaagttaaacaaagagttaccacataatccagcaattctatccctaggtatataataaaaaaaactgaagacatatgtccatacaaaaacttgtatatgaatgttcatagcagcattatccattaacagtcaaaataaggaaaaaacccaaatatccctcacctgatgaaatggataaacaaatgtggtatatttatataatggaatattattcaaccataaaaaggaatggagtactgatacatgctacaatagattatgctaagtgaaaggagtcagacacaaaaggcccccccctttttttttttttttgagatggagtcttgctctgtctcccagactggagtgcaatgacgcaatcttgcctcattgcaacctccacctcccgggttcaagcaattctcctgcctcagcctcccaagtagctgggactacaggcatgtgccaccacgcccagctaatttttgtatttttagtagagacagggtttcaccatgttggtcaggctggtatcgaactcctgaccttgtgatctgcctgccttggcctcccaaagtgctgggattacaggcgtgagccactgcgcccggccaaaggccacagattgtatgattccatttacatgaaatttctagagagacagaagtagactgcccggggctaagtaaaatgaagaattagggtgactgctgatgggtacagggtttctttttgaggagatgaaaatattctggaattagtgatgtgatgggtacacagtttgtgaatatagtataaaccactgaattgtatactgaaaaaaaaaaagaaaacatgaattatttctcaatttttaaaaaaactgtatgaggaaaaaaaaaaaacccgtataacctgtctagctaacctcttccaaaaaattttccagttatcagttgttaaatggtttctggaaacattacttttttttaaataataaccaggaaaaggcaggaacattaaagccatttgataaacatgcaaaaagttgaaattctacccagagcttaggccatcagccatcatttctcaatcttccattcacatgaaatttaagtttataacatagaagattttcttttcttttttttttttgagatggagtcttgctctgttgcccaggctggagtgcagtggcgtgatctctgctcacttcaatctctgcctcccaggttcaagcgatcctcccacctcagcttcccaagtagctgggattacaagtgtgcatcaccacatctggctaatttttgtatttttagagacagggtttcacgatgttggccaggctggtgtcgaactcctgatcctcccgcctcagcctcccgaagtgctgggattacagatttgagccactgtgcccggcctataatatagcagattttcaaagattttcctagatttcctgaaattcttatgtcaggctcttggtaaaagcctactattaggcagtcaatcctggtctgatttcttcaaaccaaagtgctgacaacagttccaaagagtagtctcagagctgctagcataattactttaattggaagctgtttctctccagttatgcaagggagtccatattacatgaaaataaaatctataataattcatcatagtataggatgtatacttttggagaatataaattaaaatataccctgctaacatctctccccatttctgtcctgtcaaaagatcattaagggtatggtatgttaaggaagatctcttttggaaatgcttatacctgatattataaatgtcaaagagtactcttagacaataggctgcaagtactgtattcctgcctcattttaacatttaaaaggaacaataaataaatccaaaatacttttctctattgcaccaaaatttcctttttttttttttttaaccacaatgtattaaaagttaaatctaaacatctatgtaaacatcgaatagacaaaaggtctagactggtcaacatagaaatccatatagaaaattacacagaaaaaagatgggtttctttttgtgcaacttccttaactaaaatgctactccagcaaggaaaagaaaacatgaaagacagcccttttctttttatacaactagaaatctcataagcttatgtcttgagcaagctcatcaacgaaagcaaattatgttaactgacatcacagacacctctttccaaagagaagaaagcaggtcaacattaagtctttaaaaattgcaaaactactctctccctacatactcaccaccatcagtttaaaaaaaacaaacacccagacttctgaa

SEQ ID NO: 96251 - DNA, 49821 bp, Homo sapiens
gaatcgattccaggaaataggagaagcagggcaagtgagatggaaagagggaaagctaatatgagggtgcaccattgaggtaggtgctgtaggaaagggaggttagatctcagagaagcatacagaatgccttccaggatcacccagctgaaagttgggagactagaacattgatttaccagtactcatcccccattggatgagatttgtccttggtagtgttgactcctttgcacttctacctgccttagggcagaatgtggaaggagaggcatgtaatagaacactggccccctaaagtaagtctgaggtgctacagaattgcctaccacacctgtggctggaattagaatgggccagcaccagaggtatctgctgcaaaatgaattgtgtatgttgtctaatactagtctgtgagcagtgttttgaaagattgatttatgaattatgtgatcatgccatttgtgtaaaatgtagtatttaaatataattctctgtggattgtgtgatactatttttttcacttctacatggtatgtaaaaattgtgtgatgctatttttatttccagtaccaagtagctttaataccctacctagaatcatttagtttttgtcttccatacagaatctttaaatagaaaaaataaacttctacagtatagttactgactttataggttatagattttcttaagtattagaatatgtgatttcctcttgcttttcatatcatgtttagccttagtaaattcaacacagtgtttaaagtggctgctcagggagggcttctcagtacaggtatcttcatgggtattgggtatgctgtgagtcagtatctgcatcagatatgcaggtcagatacttctgttcacgtctagaaatgctgtcaatgcaaattagggtaaatcatgctcacagagcgttatcaataaactaaactatttagaggtaaactgtcatatagcttgaacaagttagagtaatttatgacattctctttccaaaatgtaaaccagaccaaattattatcagaagattgctttggttagattgtaatccaaatgcaagctgtgcagtgaacctaaaggctgttgctatcaaaatatacgctttttttccttacatattcttacaaatttacctttagttattgcaaatgagctataacttctgtgtggattaaaattgtagttcttttttaactaggtgggacattcacatctggaaacatactgaaatttttatcttctttttagacttgaaggcttttttgttaacatttttcgtaagttaaaatacacttgattcaactacagttgcccttcctgttcaggtcctgacattatctcttttggattataatacatctctattttattttttcttttgagacggagtctcactctggcccaggctggagtgcagtggcatgatcactgctccctgtagcccagacctgatcatttctcctttatctcccagtagctgggactataggcgtgcgccaccacacccagctaatttttgtattttttgtagagacgggtttcaccatgttgtccaggctggtctcaaattcctgggcccaagtaatccacccacctgggcctcccaaaatgctgggattacaggcacaagctaccaggcctggccaggcatctcttgtgcagatttacttattcactaaagtgatttggaaaatagccatgtgtgcaaggtttacaaaaataacttacctagtttcactgtagctttctaaacaagttttgaaactttgttattttttaaaaatcagtcatttccattcacccggtttctaggacaacatagattgtttccttatgtagaaatctagaaaggaagtaatccttgaaatcttctatattaactccctcattttatgtaagtgaaaattcaatacaggcagatcctcagtggaaattttagaattcatttaattagtagatagcaataaacttacctgctttagtttatcatgagttaggattatctcaaaatctgggacccatatccataacacaactaatgtttaaaaaactgcatacaaggaaacttttacccctttgtcaaatactgtttgagaaggtacttgtcaaaaagttgaaggaaaaaattgagttgtgatactcaaatatgaatcaaataaaaataccaatttgtacataaattaggtaaattttaacacatgaataatgactccgagttttgctaaaacccgctgttggctttctatatgattccctattctcaacgtttttgattattaacaaagaatggctatcaaacttactcaagattttttttcccccataaatgtgtgccttccagcaaattgcttcctgtcaagttaagttacgcttaaaatgtgtatgtgttggtagttttgattgcttcggttttttatgcttgtttttattaagagctacaatcagatacagggaccatttaagcctgattttattttattttatttttttgagacagagcctcactctgtcacccagactggagtgcagtggtgcgatcttggctcactgcaacctctgcctcccgggttcaagcgattctcctgcctcagcctcccaagtagctggggttacagatgcccactactacgcccagctaatttttgtgtttttagtagaaacggggttttaccatgttggctaggctggtctcgaactcccgaccccaggtaatccgtccaccttggcctcccaaagtgttgggattacaggtgtgagccaccgtgcccagccttgaaccggatgttaaatattcatataatggtcatacctgtttttgttttagaacataatcacaacaccgctatggattttttttttttttttttttttgagatggggtctcgctctgttgccaggctggagtgcagtgccactatctcagctcactgcaacctccgcctcctgggttcaagccattctcctgccttagcctcccgagtagctgggactacaggcgcgcgccaccatgcccagctaatttttttttttttttgtatttttagtagagatggggtttcaccgtgttggccaggatggtcttaatctcttgacattgcaatctgcccatcttggcctcctaaagtgttgggattacaggcgtgagccaccgcacccggcctgtggattttaattgaaaaaagatagtggtttttagcaaattacaactactggctcagaagtaataaatctaagcttcacatttattccatagaattatattgtttttcttataatgaacatataattcatatgtgatatatagcagtcatgttgttttattctctacaggtatgttcgcaattcgtgctgatcatgattttgtagtacaggaagacttcatgaaagcagtcagaaaagtggctgattctaagaagctggagtctaaattggactacaaacctgtgtaatttactgtaagatttttgatggctgcatgacagatgttggcttattgtaaaaataaagttaaagaaaataatgtatgtattggyaatgatgtcattaaaagtatatgaataaaaatatgagtaacatcataaaaattagtaattcaacttttaagatacagaagaaatttgtatgtttgttaaagttgcatttattgcagcaagttacaaagggaaagtgttgaagcttttcatatttgctgcgtgagcattttgtaaaatattgaaagtggtttgagatagtggtataagaaagcatttcttatgacttattttgtatcatttgttttcctcatctaaaaagttgaataaaatctgtttgattcagttctcctacatatatattcttgtcttttctgagtatatttactgtggtcctttaggttctttagcaagtaaactatttgataacccagatggattgtggatttttgaatattattttaaaatagtacacatacttaatgttcataagatcatcttcttaaataaaacatggatgtgtgggtatgtctgtactcctcctttcagaaagtgtttacatattcttcatctactgtgattaagctcattgttggttaattgaaaatatacatgcacatccataactttttaaagagtatgattcaacgtaatatttgctaatatgtgactgggttttcttggtttatgtaagacgataggtccctgttgaggatgtgaaggtctggaccctcttccaggaaaaattctaacatacaattttgcgtatactataatttcaggaaatttattgtttcccaagctcatccaaggactctttaggtatgtatggatacctggctaagagtgtatgatgtaggggatgtaggagtgtcagaaatgttcaaaacatgatttctgttacctatacatgattcttatatcatctggcaataaaagctataacaaagtacacaaaggaatcatcattgggcatcaataattattaaagatgctggtgaaaagaaaagacaacttcagtttcataaacactaaagaaccaaaaatacatgacctagctaattatacaataattcttcaaattaaaaacttcctagcaggatattatgtgcctttttataattttagaagatgaacagttaaaatagaaaatggagtggtcaagttagccatctcatactcaaattattgtacagttctatttctatgtgttggcagtgcattttatgtgacaaaaagtagaatgtagggggaggtttaagtcaaatatctatgtgatcttttcacttataatttgcatttagttaaggagtgactatcttgccttttacctttgtgctggcggtggttttttaaagaatcaatttggtgtacaaatcctttctttctttttttatttttgattttttttgagatggagtttcgctcttgttgcccaggctgtagtgccattgcactatctcagctcattgcaacctccgcctcccggatttaagcggttctcctgcctcagccttctaagtagctgcgattactggcatgcgccaccacacccagctaatttttgtatttttagtagagacggggtttctccatgttggtcaggctggtctcaaactcccgacctcaggtgatccacacgcctcagccgcccaaagtgctgggattacaggcgtgagcctccgcgcccggcccaaatcttttcaccatgggtttacaggcataacgccaccacacccagggaattttaaaattgttttttagagaggggggtcttactattttgctcaggctggcaaactccttttaaaagatattgaaagccatctggtttattatttttatttcaaaatataataatggaagaaattttacagtattatatacaatttactgagtcagctatcagttcctttttctgatttttttctagttgccattcttgatattttctaggtaatctaaactgagttgtattttcaagtactcttcaaatactttaaaaaattttaaattgagccgtttaattctttgcttaaaggtgatgggtattttattttctgtatggcaccacgtgattttaaattgaactcttcatttattagtcatttggttataaactcagcatagattgcgcagaattttgagaggggagaaactatagctttcctttcggatgccactggtgggtagcctgttttgcctgtttgttcttatgttaaagaagggctctacgtcctgtctggaaagggcggagctggctcggaccgccccactgcctttcccaggaccttcactcgtcctgtcccaccgcagccccgcctcctccacgccgggtgagctgtggcctagcagcatccgaggctccgccccccccacccccmagcgtctgcgctctagcgaaggggcggagcagggcggtggcgcgctgacacctggcggcggcggagggcgggcagaaggcgagcgtgggctgggattggctgaggcgacgcgggtggagggggcgggaaggaggcggggagacggttgtcgggctggttcctgtgctggatcctgggcggcctgaggggtacggagactctgggggagggagacggcagcggcatggcggccgggtgtaagacgcccgaccctcctcttccctgtcttcgccgccgccgctgctggagtcactgggaccctctagtctgcgtgtgttagttgtaatcccgccgccctcctgtcagccctccgctccgccggccctccttccttccgccgccgcagccagcccgagggtcggccggctgtgtaacactctcccaccccacccaccagcccgcgggccagcaccatggaggacgtgaagctggagttcccttcccttccacagtgcaaggaagacgccgaggtgagtcgctcccgtggctgccacgcacaggcctctccctgtggctccggccgaggggcgaccccagtccccaaccgtcttagccgccacctgtacgggcgccctgcctcctaagggcgtcccgggacctctgaagccgagcggtcggctccaatccccactgagttgctcgtcctctccagaccccgcggaggggcagcgtctggtgtacttacatttgagaagaggaaaagcaatcccttagtccctaggcttggcatccaggactgacctggagtaaggttcctcttttattgtcaaagtaacaagagagcgaagttggtttagtctccttttgaggaatatctgtggtgtaaacgattcacttgtgggacacatggccccacatgtgaaatagactcggcgcctgaagtttggaagcgcgccttcgaaaagtttcccaaagttttttgtttgtttttggacaaagctatgacccgcacaacaaagtgtctcaaagctagctcatcttaatctgagaactcttaatcagaaatcttgacctttggaggaaaattaatattgaaagtaaaatactatataccttttctcctggtttctaatttgtggctatttttactccaccttagatccctgcctgctgtttctactcggattttttttcatctgttgctagtttaacattttacggcattgcagactactaaattagaattttctggaggctaaattaacaagacgaagatactcagctatactttagtaggattaagaaagaaaatctaacatcgctagttaaaaatacctttaaagtagttgggaaaaataaagccctatttttaggagaccattcaatttattccgaatatttattctattgaatatcttcattggaggttcactttttttttttttttttttttgagacggagtcttgctctgtcgccaggctggagtgcaatgtggcgcgatctcggctcactgcaacctccgccttccgggttcaagcgattctcctgcctcagcctcctgagtagctggaactacaggcgcgcaccaccacgcccagctaatttttgtgtttttaggggagacgggtttcaccattttggccagggtggtctcgatctcctgaccttgtgatccgcccgactcggcctcccaaagtgctgaaattgcaggtatgagccaccgcgcccggcctaggttcacatttttgtttggagggctctcttgtggtattgatgcttgacaattacatttgttttaagagtagagactttgtttgtgactatcactgttgcaaaatgtagtgcagtggtgtgatctcggttcactgcagtctcgaactcccatgctcaagccatcctttcacctcagcctctggagtagctgggaccatgccgggctaatttttctttttttttttttttgtagcgatgggttttttctccaggctggtctcgaactcttggcctcaagatcctcccgccttgtcctccgaaagtgttgggattacaggtgtgagccactgcacctggcccaagaatatactcatggtttttttgtttttttttttttttgacacagagtttcactcttgttgccccaggctggagtgcagtggcgctgtctcagcccaccgcagcctctgcctcgggtcccggttcaaacagttctcctgcctaagcctcctgagtagctggggattacaggcgcgcaccgccaggcccagcttttttttttttttttttgagacagagtctcactctgtcgcccaggctggaatgatcttgcagtggtgcgatctgggctcactgcaagctctgcctcccgtgttcacgccattctcccgcctcagcctcccgagtagctgggactgcaggcacccgctaccacaccgggctaatttttttgtatttttagtagagacggggtttcaccatattggccaggatggtctcaaactcctgaccttgtgatccgcctggcttggcctcccaaagtgcagggattacaggcgtgagctaccgcgcccggccaatatactcttagaaaacaggaggtcatatttaggctagttataaaaatgaatttatacttaacatacaataatgtgaatgaagagtatgcttttatttatttatttatttttttgagacggagtttcactcttgttgcccaggctggaatgcagtggcgtgatctccgctcactgcaacctccgcctcccacgttcaaaagattctcctgcctcagccgcctgagtagctgggattacaggcgcccgccaccactcccgtctaatttttgtacttttagtagagacggggtttcaccatgttggccctgctggtctggaacgccagacctcaagtgatccgcctgcctcggcctcccaaagtgctgggattacaggcttgagccaccgcgaaggagtatgctttcatatcctcaaaatgattcagtaatttcagcacttaactgcaagcaaccttacaaataatgtagaggagtcccacattccaggtgaagaaattgtaccttactgaaaataagtgatgtgccaaattaacaacacagtagcacaagacacagaaggacctcggcctcctaattcattgttctttttaatacacttcaattcttccctgccctaatcttaaaaattctagtttaaaattttcccggactttgcatttaatctgttactgtgtatatcattatgtatgccttattcctgcaaaactgataaattcttgctgggaatatatacctgtcttttctgtgtgggacttgaaaacacactcttttttttatgctaccagatgtgtgggggtttttccataccaagcagttttccagcaggcatgaactgaatgtcccataattcaattctgacacatatgtacctgaagttagtcagatcccacaggttaatggctcagtcccgcaaggctgcccccaacctcagatggtaatcacaagtagtaggttgtcacctatacactcctgactgactgtaaatcagggttcccgttactccctccttggttcagttaacttgctagagtgacttacaggactcagggaagtacatttacgggtttattataaaggatactacaaaagatcagtgaacagccagtaggaagagatgaatagggcaaggtatgggggaaggggcacaccaccatcccagtgtcaccagtagagtcatgattgcaagctgtccaggttcttggcgttttgaacaaagaattggacaaaactccaagcaaagaaagaatgaagcaacaaaagaacaaaagcagggatttattgaaaacaaaagtacactccacagtgtgggagctgccctagcagcactcccccccgacccccgctgctttaccgaatcttcttgggtccaaataccccctagaagtttcccattggccattccatgctcacctcatgtaaatgaagaggtggcttgcaattggtctgattggttgccagacccacccccacatcagtccgcttggttgtggacagcgaccattcagtggctagagtgaagttacaaagttgcaaacgaagattccacccgcagtcagtctgatttgttgaggacagccaatttcccgtctactgtgcagaaaaggtaggtggtttgcaacgggagtagcctctggtccttttgttacttaggcgtggaaagttagggttttcccttcaagttagttctgggaagtcggggtgaaacagccttagattccctgcctccagaccctattcacctgcctcactagcacctccagtgttttcatccagaagctcaacaaatcttattcaacggtttttatagaacttcatctccatcccctcccatagaggtgtgtgtgtgtgtgaggctgagagttcaaccctcttgtcacatggtctttctggtgactggccccaccctaaatcacttcattagcataatcaggtttgatcaaaaatagtggctcataaataaccaaagacactcctattagaaaattccaagagttttaggaggactgtgacaggaactggagagaaagaccatgtatttcatattatatcacagggacagaggtaatggttaaagctagtggataatgatgcaagtattgtctgctgaaagccaattcgttccgtatttcttaatattgcatgtttggtatcttttggttgcaagcaacaaaaacgaatttaagaaaaagaagaagtaattaaatccggccgggcgyggtggctcacgcctgtaatcccagcactktgggaggccgaggcggacggatcacgaggtcaggagatcaagaccatcctggctaacacggtaaaaccccgtctctacttaaaaaaaaattagcyaggtatggtggcgggcgcctgtagtcccagctacttgggaggctgaggcaggagaatggcatgaacccgggaggcggagcttgcagtgagccgagatctagccactgcactccagcctgggagacagagcgagactccatctcaaaaaaaaaaaaagtaattaaatccagaagggtagtggtgcagctagtttcaaggatttgaccaaacccaggtattataaagcatcagaactgcctttgtctctcatgagttcttatctctactttctctcagagtctctgctttctctctggcttctccaagatgtgaagcttggccatctggggtcacacctttatgagcttggttattgaggaataaaactgaacacttccagcttctgtgtttgaaatctagaggaattgcccaatttaattcatgttcccacactttggatcagtcactgtagccaggaaagggcagatacaatgaggggccccatctaggtcatatccctaattccttggctagaggagtgaagtttattgttggtagccctcccaccaaaaccataggaacatttccacaggtagagggtactttctgggctgataaaactatacataggggccacataaataaactattaaataggagcatatagttattcataataaactgactaataagcactgttaattttctaatctccagtgagataatgtaaagtgtcaaatggtcttaagtagttagagtgatcagccagcattgtttctttgacacagggagcactacctggaaatccaaattacagaccaaatttaataaaaacggaattcaagcagagagttcagggaatgcttttaatgttaatgtgatcaagctatgataggttgatgattctgtcacctctacaagaatattactttcacgtttcttgaaatattggtattctttgtataggacagtgctaacaaaaatttagatcagtcagtttgtgaaaagattgttactttttttgtttaaaactttttcatgaatttccattgttttgaagatgaaatttaaacccttgacattatttccagggtcctgtatggtctgacatctgcatacctctctaacctcattatgagctactcttcttgctcctttctctgtaagccctagccatatttatcttctctcagttcctggaatgctttaatttccaccccccgccttcagagcctttatgtttgctattttcccctgccttggctgccagcaccttccttaccctcacctaattaactgcttacccttgggttagatcccactttaggcaacatttcttcagagaagcttttcctgtttgccagtttctctaactcctttcctcatcctctagactggttcaattccccagctactatggcacttggtactttaatacttacctttgtaacatttaacaatttttggtcattgtctattttccatttagactgaacctttcataagagagcttagatattaggaagaaggagtagctgatagtaccaatttttaagcaaattggttgtagctggggctattggttttataatttaaaagttaatgttttatcttctcttctgacagaaagtgaaatatttatttccattgcagtttagcaactttccatgtttccctttccatttttcttgtgaatcccgtagtacaggatcaaagataggaattatttaacatacatggctgaggattccttttctagctcctttatttagaatggtgctttttaacccttactctagagtaaggaattttttaaaaatactgatgcctggaccctaccagcacctattgtagtttaatttatctgaatgaagctagatgattctaatgttcagtcaggtttaaaaattgctggtttagaaaatatcttgagtactcttctgcccctccagtccctgcccaccttctctttttatttgagtgaaacattttcttttctcctttgatttaagcaaagctcaagcttggtgtgggaatgaaaggaaaaggactttggagggatttacctattttttctaggagagaaagtgcaatactaacttttctgttttgtggaatgtcccagtgcaagtctagtattctgatgttttttttcttccccaaactgttgccccccacctccagcctatgtacaatttgtgttttattttagtattgtgtatataggattcagcactatcctcaaatgtatgaacatatcccctgtggataaggggggactactgtatttgtaaaagttcatatttcatatttcaatgcatataagaattattttatctaatggttacagtctatatccttcattgatgtgtttatttgagggtctttgaacatttttgtaacttttctctatccaaatgcagttttatagatcatttttatggaaaggaaggagataattcggaaggatgttttaacatgtggtactttctacctcatgttgatcgaaagattttcacttgtgaattaatttgtctcagaatcatggtgtttcacaatagagggttattttggtttatctggcttgccttggtttggttaatgtggttgaactgcttggctactcataaagtttgggaaattgatttctactaattaattacaatagtaacttaaaatagatcattgctggtgatatggagatgcctccattaataccacggtttctaaaatgatagatttcaggagtagtgtgagcaggctgagattaagaattaagtgtgatagtggcaagacttggttattagacgtgtgttcagacggatgtgtggtagaagaagactatgagcattcagacttaaaatcttggttagtaagatccatagacaggcagggtttttttgtttgtttgtttgttttaacaggttggagtgcagtggcaggatctcaactcactgcaagctccgcctcccgggttcacgccattctcctgcctcagcctcccgagtagctgggactacaggcgcccgccaccatgcccggctaattttttgtatttttggtagagacggggtgtcaaccatgttagccaggatggtctcgatctcctgaccctgtgatccaccctccttggcctcccaaagtgctgggattacaggcgtgagccactgtgcccggccaacaggcaggtttaaggtttgttctgtaggtggtaatctgggttagggcagcaaagaaggtggattctgagatcagcatctgatgataacaccaggaatagttccaaatgaacttttctgtgagagaaagctttctaggtttcaaaggatccatacctattgcagtaattactaatgttctctgaagaaggcttcttatctgtcctgtgactaggaataatttttcattccctcctactatacaacttgcttttccctcttataatatcttccatatatatatatatctcaagagagtctttcatgttgtattacatataaccttatggaaagctcaaaagttctttgaagcctcttgttttgctaaaaggttcaggtaaattttgcattctatcccatatgtgcctgtttgttttaatataaaaattgtttaaattagtaaccagtgaaaatactgtttctccctaaagaatttttttgataaaattgatacttcagtggctttgagtgtcttttggcatattgccaaatgaaggtgttgaggaaatgccactccaaaatatgacaccttgatatattgattactttaagttggaaacacttgcaaagtagcaaatgcaaagaaacactttctctgaactcctgttacctacctaaggacagatcctccaaaagaagctcaatttgctcctagggagtttgatcaaccagggaagattgtctcttatcactggagaggagagtaaaagtcagcaccacacccagacaaactgacacaaagtatcatctattattattctaagggcccatttatctttctccagaattgttcttctaaattgcctgtatacctctacccccatgctatataaagggtatataaactcctaaatatcactttttttttttttgtatacacgtttctttcctgtgatacccccatgcacataatgaatctgtataccttttctccgtttagtttatttcatagactggtttgaaatatcacggattttgtttgtttttggtatacactttttaaaaatatcacttttttttttttggtatacacttttctttcctgtgatactcccatacacataataaatttgtatacattttctccatttagtttatttcatagactgttatcgaatcctgatggtagagggaaagtcttccttgccttacacaagtatttcccagaatatatttacaccattccttgatatgtgttgccctgtttttttttctttaattacacaaaatttagtgatttcactttagataaattcaaaagtacgcatttctttaattgattttcttctttatcacagctctgacaagttgcttcaggaagataaggctggctgttagactacttgagaatcttttaaaaagaaaaaagtcaataacatttagtgcagtagatctctgaaatgcatctattttgtgcttattctgtgtcaggcactgtgcttatcattaggggtaccatgactaaaaagagtatttggcctaaagtctttaaaaactgttttctttttcctttctttcttttttttttttttttttttttcgttgagatagggtctgtctctgttgcccaggctggagtgcaatggcaccatgatgactcactgcagcctcgacctcccaagcccgagtgatcttcctgcctcagcctcccaagtagctaggacctcagtcatgcaccaccaccgcacctggctaattttttaatttttgtagagatgaggtctccctatattgcccaggctggtcttgaactcgggctcaagctatcctcctgccccagccttccaaagggctgggattgcaggtgtgagctaccatacctggctaaaaaactcatatataaaaagattaccataacacattggtaagttaaagaatctaggctgggcgcggtggctcatgcctgtaatcccagcactttgagaggccgaggcaggtggatcatgaggtcaggagttcaagaccaacctggccaagatggtgaaaccccatctctactaaaaatacaaaaattagccaggtttggtggtgggcgcttgtaatcccagctactcaggaggctgaggcagataattgcttgaacctgggaagcggaggttgcagtgagctgagatcgtgccactgcattgcactccagcctaggcgacagagcgagactccgtctcaaaaagaaaaaaaaagtatctagtaaacaattacatttccctcattgctggcttagaaattacatgctttatttctattctgttaatatccataaattagtcattattttatgcagccaatatttgtttaattgtaactgtatgtttgccgtaaagttcattcttacattgaaagactgtatagtatattgattcagagaatgaactctgggttcagactatctggatccaaaatcaagttacttaggttctctatgactaaaatagacagtgatagtatcccttcttcaaagaacattttaactttttttctttaaagatatttttccgagcatatattcttaattaacagttgtttttgtcctgccactatgaatgaattatttgtgtcctctggcttctgttcatgcaattgagaagtcagtgtccatctgattgtccttcctttgtgtgtaatctgtcttttgtctagttgatcttttttaataaaggtaaaatttatatagtgtaatgtacaaatagtaagtgtgcagttcattgagttttgatgaacatacactaatccaccccatcaagatacaagaacattctattagcatagaaggttacatctatttccaggcatttcctctcccattccacaataggaaaccagatttctatcaacatagattagttttccttgctcttgaacttgatacaaatggaatcatgcaaatggactcttttgtgtgtggctttcttcactgagcataatgtcaatgaaattcatccatgttgttgtgtttatgagtacttcgtagacttttatccctgagtactactattcctttgtatgaagagaccatagacatttgagttctttgagactacaataaataaagctgctataaatattcatgtataagtctttgtgtggatatatgtttttatatatatatatatatattttttttttttggtaaagcctaggagtggaatggctagatattataatagggtaggtgtatgtttaccatttcattttacattcccaccagcaatgtgtgagagtcccagttgctccacatcatcaccagcatttggtgttgtcaatttttttaactttaaccattctaatggtaggtaatgatatcttttgattttacttttgagtttcgtgtgtgtgtgtatgagagatggagtctcactctgtcacccaggctggagtgcagtggtgcaatctcggctcactgcagcttccacctcccagattcaagcaactctcctgcctcagcctcccgggtagctgggactacaggcgtgccacctccatgcctggctaatttttatatttttagtagagacagggtttcaccatgttgcccaagctggtaaacttctgagctcaagtgatccgcctacctcagtctcccaaagtacttggtaatttacaggtgtaagccaccgcacctggcctattcactgatttttaatttcaattatacttcttatttctacatattctgtgtttttaaaaatcaatttcttagtctggtcatattttgatactctaatttctttaaattttttatatttttcgttattgcttataatatctgcagttttgtaagtgtaactcagttgtttctgcttcctgtggtggctcatttcctgtttttaaattagtttttgattgtgagcttgttgggactttatctgtgtgaattatttctgatctaggtttaaggtgtgtttttctagagaatatgcatttgcttcttccaggaatccagggatgcaatctacccaggaccacttacattaaattctcacttggcctcacaaaagtaactgaattctaaccccaaacttgagtggatgccagattgtggttaggaagaccccactccaccactaccaatacctacccagagccaaagctaggaaggacaagagtactcacttctgtgggatgagttgagtttttgtttttctttctttccctagtttatctttcactgaggatgttgcctttgggagttctagctttttggtcttgatctgagttcgactttgagcagatcatagactttgtcttatgtttacaagtacgtttccacttaaaataaggccgtagtgaagatgtagaacaactagaagtcccatacattgctggtgggagtgtacagtggttttacaaaacttttggcagtatctagtaaagccaaacataggcctaccctgtgtcaaaagacaaaattacaacaaatttagcttaaaaatctaactcacttttattagtggttcatgaatcaggcagtgtgtcatcaaaagatttagaaaaggcatttcagtgtgctgagcagaggaagttgaatttataggcaaaatctagctaaataaagcagaaatgaaacaaaaagtggattggtcatttcaaagttagtttctttatagtattaaaacacaggggacttccttatgctggctcaggataactggcctccttctgattgattgctatgaatcttttgattttttttttttttttgagatggagtttcactgatgttgcctaggctggagtgcaatgccacgatctcagctcactgcaacctccgcttccaggttcaagygattctcctgcctcagcctcccaagtagctgggattacaggctcccgccaccatgcctggctaatttttgtatttttagtagagatggagtttcaccatgttggccaggctggtctcaaattcctaacctcaggtgatccacccgcctcagcctcccaaagtgctgggattacaggtgtgagccaccgcgcccggctttttgatttttttaaactgtcattactcggggtttatagtctactactatattgctgagaacagttttcaagattaaaaataaaaatgttttctgtttctcttagttaaaaaaaaaaacctgtctctcattgtaggattattattctctcttttcattatagatgtatactatttctaccttctgtgttaaaaatacttttctgggccgggggcagtagctcactcccgaaatcccagcactttgggaggccgaggcgggcagatcacgaggtcaggagatcaagaccatcttggctaacacggtgaaaccccgtctctactaaaagcacacaaaaaaattatggcgtggtggtgggtgcctgtagtcccagctactcgggaggctgaggcaggagaatggtgtgaacccgggagacggagcttgcattgagccgagatcgcgccactgcactccaacctggatgacagtgtaagactcggtctcaaaaaataaaaaaataaaaaaaatacttttctgacttagagaatctgggtgaagggtaaatggaattccttgtactatttttgcaacttttctataatcctaaaattgtttcaaaataaaaggttaaaaaaatattttccagactacttcagaaacctaattactaataataattctgagttttaagcaaccaacttagaaacttttggaatgcagtcaacccactgacaaatgaggactatctgtactatagtatttttttagacggggtctcagtctgtcaccctagctggagtggtggggtgatctcagctcattgcaacctctgcctcccaggctcaagcgatcttcccacctcagcctcctgtgtagatgggattacaggcaggctccaccatgcccaacgaatttttttgtatttttagtagagaaggggtttcaccctgtttcccaggctggtctcaaactcctgagctcaagcaatctgcctgcctcggcatcccaaagtgctgggattacagacatgagccacagagcctggccttttagtctatttcgattcttcatttcaattcactatactttttttctaagttttaaaatattttttatcttttaccattgacattttgtgttgttttacagcttctttatattggtctgcattccaaagacaaaatgaagtctcttatgttttgtgatatgtgttaaaataattgaactagacaagaatgttaggcccaagtgagatgaaggaaaggctctttgataagcatttggcattttagatcagagatggcaagtacgtatgacatagcattcttcttttatmcatttcagatattatttgttgatcagacactcttcttcctgtcttggaccacacagtgttttaggtatctgctgtcagttgatyagagttggcatgagaaacaaaaaaaatctattggcatctctgacttagaagatcagttttgggagaatcttctggaatatctattctattcttaagtttaatgagtaatttcatccattttatgaagtaacataacaattctggaagcctagttatttaaagaatgctttaagctttgtttcttgtcacttcaattttcagatgtttgtgaaaccaagtctgctattttaataaaatgttcttaaagtataatgtaactttaaaaaatctacatacttgtgtgtcacatctttagcctttaattgggtgactttttaaatgttatctacttttattcttatgttttccttcccaggagtggacctaccctatgagacgagagatgcaggtatggcaaccttttctttgttcaaaccaacccatgttattatcataataagaaccttagtttataggatttgagacctgctgatttcatgatctgtaggttcatcattatgtattttaaataattattttaaatatttaaggttaatcttggatcttaaaacgatgggaaattagaaagaggaacgtagtaataggtgtatgtgcttaatgagtcactttctcttggttttttttttgtttttttttttttgaaacagagtttcgctcttgttgcccaggctagagtgcaatggcacgatctcggctcaccgcaacgtccacctcccgggttcaagtgattctcctgcctcagcctcccgagtagctgggattacaggcatgcgccaccacacccagctaattttgtatttttagtagagacagggtttctccttgttcaggctggtctcacactcctgacctcaggtgatccagtgacctcaggtgatccacccaccttggcctcccaaagtgctgggattacaggcatgagccaccgtgcctggccaatgagtcactttctttttcctcacgtgaaaaattggatactttctttgtattccttttgaaagcagtttgctttctctgtttgtctagataagttagggagagttgtctgtacarcaaataagcattgttcattttgtgtccgatttttaatcaacttccacaattaagtcttctagaagatcaaattgaatactttcagtttggaatgaattaaacgatagctaaccctcatagcagttcattttcttttgcatttcataccatttaccgtcaagtctgtttgccccaggattaagcagtatcttgttcctgggaatcccatgacttctaaaaatctgttacttttctctcttaatgaaagttcactttgaaaaaataggtgagtacctatgaggcattttacttggtgttaggaggaatgcaaagatgactaaatgtaatttctgcccacaaaagcctggtggaagaaatcagttttatatacaaataattatgacttatagaactgaactataaagttactgttagtatctagggtatgatatatccagactgaaagctttctgtattgaatttacataaaataaatttgaattcaacatctggaaggtacatacttgttgaaattttgtcaactggcaaatatttgaatttggaatttttatgttacagtaataatttgcttctattaactatagataatagttttaggtcaggcacaggagttcatgtctgtaattccagccgtttgggaggctgaggcagaaggatcactagagcccaggagttccttatcagcctgggcaacatagtgagacttcgtctctattttttaaagaaaaaaaaaaagattaaaaaaatagataatagttccaatcttgttgtatcttgtgctgcttttgatttggccaaataaggtttgtcttatttatatagccttatagatttaaattgctgatggtaaatacctcaaatttttttttttctaggaaattttacctggattgttcttaggcccatattcatctgctatgaaaagcaaggtatgaactttgttagattcatcaagagagacttttattaaccaacttttcttgggtaagttttttagtaataaagagttttattttagggagcatccacaaatactgtctgttaacagtaattgtcactctggagtaccttcctctttccctattttactagaccagtagttctcaagtgtttcaccacaaatcagagtttttgttttttcctcatgaaatttgtatgtttgaaagatttaccaaataactgacctttaataacttatttactctctaaaacactagacatctgtaattgctaatcatagcttcagaacaatatgagatgtagttaaagcccaaaataaggaatttcaatgtttagttaaaccttccttatcaagggtaagactgtgtgtgttaattgaaagtcattcaccttagttctgttttgccagccagactttagagagctagttggtatccccgctctgaaatttgaaactttttgagcaccagtatgtcactcgaaggaaatcctcactggagtatttcggatttcggatttttggattagggatgctcaattataagtataatgcaaataggcaaaacaaacaaatccaaactctgaaatatttctggtccctggcattttaaataagggatattcaatccgtatagatattctacatagtcaaactttaatggacttactcagttgcagttaaaataggtagatctcattttaataaatatagcaatgttcttgccacttctaaaagattcaatgctactaattctctttgagttacaacgtggaacatatcayagatgtctttccccaatactttgcctattcagaagtcagtatacttaaattgtgtttgatatatccataatttaatttgatgttcttaggaatttaaccggttttaaaaggtcattgattttgaaactggaagatttttttgacagttgagacatggctaagagtaaacctggtcatcttgatgatttttgcttagttggaaagatagggagttagtaaaaataagtactagggaaaggatagggcaggtaactatagacatagccgtaatttattttgtaaaagacagatgtaaacaaggttattgtccatataatttgctattcaccaagtactagtcttccagatggttttagataatttacatttttgaaattcccactgtactttataaatatacatacagtatttatcacattaaattaaagtatttgtttaaaggtctatctcctcaatgggaggctgaggcaggcggattacatgaggccaggagttcgagaccagcctggccaacatggcaaaaccccgtctctactaaaaatacaaaaattagctggttatggtggtacacacctgtaatcccagctactcrcgaggctgaggcgcgagaattgcttgaatctgggaggtagaagttgcagtgagccaacatggcaccactgtactccagcctggttgacrgagtgagactttgtctcaaaatgaaacaaaaacacgcacaaaaaaaggtctagttcttcaaaacttcttttcttgaaatgtcaccatggtcttattagacaggaaaagcctctgtggcagtttatttcccaccctaggtaaccataatatagcccatatttcttttcataccattatctaaaaacaacaacaaaaaataataatggagataaacctaaatggataaactcctttttaaacactcatttactgttattattttgtgggagaggagtggggtcttgctctgttacccaggctggagtacagtggcgcgctctcatagctcactgtaacctcaaactcctgggctcaagctgtcttcccaccttagtctcccaagtagccaggactacgggcacacaccaccatgcctggcttaattctcaaagtttttgtagagatggagtctggctatgctggccacatttacttaagtatatctttttattaaattcaaatacagtttaaataaaagggacaaatttagggcctttgtaattagtaaacggtttgtttttgtaaagtttttctactgtttttaaatgtgaggtaaggtcataatttgcttcatattaggttggtgcaaaagtaattgcagatctgcctctgaaaagtacaaaatctattcgctgttacgttagggctctattttgatagtttatttttatttagtagtagtctattgggccttcaaaacttgtttaagcatatttatacataattatgtgcatcgtcttgtgctttctcacattcataaagtagataggaaaactccataggcatcaagtgtaaacgaaggacttaatgttgaatttgttgtggaaattggcacaaatctcaatatagaacattggttaattattaatcttaccaaatgcttatctcactttccctaactcaagttatactcaagaaatacaaagataattgaattctaatctatgctgacataaaacttgctgcagaaattaacacttaaaacttgcaaattatattgtcttagcccaggctgctcaaacaaaataccatagacagggtggcttaaacaacagacgattatttgagttctggaggctggcaagtccacagtcatggtccggctctggtgaggaccctcttgctggctcgcagatccctcccttcttgctgtatcctcacacggccaagagaacgagttcttgcctcttcttacaagggtacaatcctgtcatggaggtttctaccctcatgacctcaatctaaaactgattatcttccagagactccaccatcacatcttgggggtaaggatttcaacataagaatttgaggtgatgcaaacatttagttcataacacatataaattatttttttttactttgctcatgaattattagtgctactgttttgtactatttaaaatgcagaaaatgggaattaaatatataggatttaaaacaatgtgtcaagaaattcaaggttatctgattctcatgccatcgtgacttgttagttcatttattgaacaggtaattattgaacaacttaactagttatacatacttgatacttaagtgaattgtattatacattttacacatactatgtatcagtgaacaaataaaaatcttttctgtcatggaacttaatgctctaggtaataaaataacatctataaactcacttaaacttatcactagcaaatgaaaacttattatctggtaatttctagaattgtcatgttaaattgctttaagtatggagccaaaagcactacaggttgagtatccctaatctgaaaaatctgaaatgctccaaagtgaaactttttgagtgtcagcatgacagcacaagtgaattccacacctgaccccatgtaatgggtcactgtcaaaattttgtttcatgcaccaaatgactgtatgaaattacgttcagagtatatatggtgtgtgtgaaacataaatgaattttgtgtttaaacttggataccatccccaagacatctgagtatgtatatgcaaatatttcaaaatctgaaatctgaaacacttctggtcctaccttgggaccagcattttagataagggatactcaacctgtattgaatataataagatgtcattgaagttgccatttttaacttcaggaaaatttttaaatggtaaaaggttaattagattctgtgaagtatgtaaattaattctgactcttaaagtatactgggagaggcaaggagttgtctagagatttgggttccagtactgctgttaactaggtcggtgatgtccaagtatttggtaatgtaactgttttatgtcttagtggttctctctaaacaataaagattgcagtcaatatatattaactaccatttattaaacacttgctgtgtgtcccaggtgctatgccaaacatcttacataaaggttccatcaagctctaaaattgtaggtatgaaatatccctgttaaccttttgaggacattaatgtattaatcttgaatcattgaaatatcttgctgcccacttcaggtatattataaaattagctttaattccctggacttaagcagagatgtgggttctgtgtattttcaaacatctgtgttatatagtaagatgatgtttgatattttaaaatatttatcttccctgtcctccccctgcttttttttttatacagctacctgtactacagaaacatggaataacccatataatatgcatacgacaaaatattgaagcaaactttattaaaccaaactttcagcagttatttaggtaagaattattgctatgatttgtaaaacacttaatgaagtttcatttcaggttttgtaccatcagttgtttctgtacatatctagtttgtaaaaatgggtcatatagtacatagttttttaaaataaattttacttaaaatacttaaataaattatgcccataatgcagaattctaaaggttcaaaagagtgtatattgtcaagaagtttctgggaaagtaaaaataaaaaagaatttaaaaataatgtatactgaaaaataggttttagtgtacattattttatctcttgagggataaaggaattgagtatctaggggataggtttagggaaacagcatctactgttacctctttattgggtagtttttgagtgttaggttaaatttatgagcatagtcttatagataaatttttttttacattggctttcttttttactttatattttttggagattggtttatatcggtatgtatatcaaactgcttattctttttaagttgcattgtaatccattgtatggctatactaaaatttattcaattagtctgttagatatttagattgtttctggccttgtactaatatgtatagcatatagtgactatcattgtacatattactcaatttatatgtgagcatattgatagggcttatttgcagaattgctggatataagagtatgaacattttaaattttgatagatgttgcagattgttttccagtgcgttgtatcagtgtacattcccattatcaagtatgtgagagtgactcttcccttagtatctctccaagacggaattgtgaaacatttttaatttctcaaagtctaatggagtaaaaatggtatctcatttgatgttcttatttatcttgtaagttcagttgagcatgtaatggtttttaatgttctttattttaacttcatttttaaaatagagtatattacgcatggtacaaaagtgaaaggatatgtaaacatatataatgaaagtaactctactttttctcttaacccaagccaccttgctcctatcctgggaggcagcttcttccttcaatatctatgtaaaagtatatatgttaaaaatattttaggccagcacggtggctcacgcctgtaatcccagcattttgggaggccgaggtgggcagatcacctgaggtcaggagttcgagaccagcctggccaacatggcaaaaccccatctctactaaaacaaaaattacctgagcgtggtggcacatgcctgtaatcccagcagctcaggagactgaggcaggagaattgcttgaacccagaaggcagaggttacagtgagccgagatcacaccactgcactccagcctgggcaacagagcaagacaccgtctcaaaaacaaaacaaaacaaaacaaaaaaaaaacagcgctgtggcttacacctataatcccagtactttgggaggctgaggagggtggatcacgaggtcgagattgagactgtcctggccaacacagtgagaccccgtctctactaaaaatacaaaaattatctgggcgtggtggcacatgcctgtagtcccagctactcaggaggctgaggcaggagaatcacttgaacctgggaggcagaggtttcagtgagccaagattgccccactgcactccagcctggcgacagagcaagactctgtctcaaaaataaaaaaaaaaatttaatgctctgctttatttttacaatgaaaccaatctataaatatctgtaaatacaagatacatactctaaaatacattgtgtgaacatataatagaatactatgtaaccatgaaaaagaatgaaatatatgtatgtgtttggatttgggatgatctccaagataatgcattacatgaataaagcagggtgtggaacaatgtatatatttgcaatgtgttgagtaaatatatatatactacattccatatatttattcttaatatatgcatagaaaatttctggaccaagaggctagaaacttcatagtgattgcttctaagaaggaaaattcagggcctgtgatggtagagggacgtatttttctttcgtttttaattttgtttttttttgttgttgttgttttttttttttttttgagatggagtctcactctgtcacccaggctggagtgcagtggtgtgatcttggctcactgcaacctctgcctcctgggttcaagcgattctcctgcctcagcctcctgagtagctgggattacaggcatgtgccaccacacccagctaattttttttttttttttttttttggacagagtttcgctctgttgcccaggctggagtgcagtggcatgatctcggctcactgcatcctccgcctcccaggtttaagcaattctctgcgtcagccttctaagtagctgagattacaggtgcccaccaccactcccagataattttttttgtatttttagtagagacggggtttcagcatcttggccaggctgatcttgaactcctgacctcttgatccacctgcctcagcctcccaaagcactgggattacaggtgtgagccaccgcacctggcctaatttttgtatttttagtacagacggggtttcaccatgttggccaggctggtctcgaactcctgacctcgtgatctgcccacctcggcctcccaaagcactgggatttacaggcgtaagccactacgctcagccgagggacatatttttcatggtacccttgatatccatgggggattgcctccaggaacccccatgaataacaaaatcctcagatgctcaagtcccttatataaactggtgtaatatttgcatataacctgtgcacattctctcatatacattaaatcatctctagattacttctaatacttagtacagtgtaagtgctgtgtgaatagtattggattttatttttattatttttagtgttgtattttaccttattttttgttaatgttttttattgttgtcggttgaatccacaggtatgaaattcttggatatggagggctgactctttacttttgtagtgttttttttttacaccatatttagtttattaaaactagttattaaaaaggaatatcccaaaacactgatttttttttttttttttttttttttttgagacagagtctcgctctgtcatccaggctagaatgcagggctcactgcaacctctgcctcccaagttcaggcaattcttctgcctcagcctcctgagtagcagagattacaggcatgtgccaccacgcctggctaatttttgtatttttagtagagacggggtttcaccatgttggtcaggctggtctcaaactcctgacctcgtgatccgcctgccttggcctcccacagtgctgggattacaggcgtgagccactgcgcccggcctgaattttttataattatgaaagaaatacttttttttttttcaaagataggatctttctctgctgcccagcctggattgcattggcatgatttctgttcattgtagccttgacctcccaggctcaagcaatcttcctgcctcagccttccaagtagctgggactacaggtgcaccaccggatcgggctaattttttttttttttttctagagatggggttttgctgtgttgcccaggctgttcttgaactcctgagcttaagcgatctacccacctcagcctcccaaagtgctggggttacaggcatgagccaccacacctggccatgaaacacttattctttataagtacttcggaaggtatagaatgacaccaagaaaaatatttaaatcatctacagttccacaattcagagaaaacacttttgttaacatttggaatatttccttttaaatcgttctctgttgtgtatgtgtatttacgtatatatgcatagaattattaaagaaaatgagaatgttgtattttaaaatatcaaactatataaggtgaaactaatcttaagaaaaaacaaaaaagccaaaaaatcatactattcatttctaatgtgtacagactttttgttttaaattataatgttgtttgtgcaggttctttatcctaatggaagaaccatttctccttaaacttttacaatactagcttcttagagattgatagttctactagcagtgcttgacactgaaaatgttatgcgttaaaatatttaatttcattctgagttaacatttttcccctgaagcattattttatgtaactggaatacccagtcacttcaggatacagtcattgtcgaaatccttgtaggttaaatattggattttcctcagatcctgaggttcagcttctgtgtttttttttgtttgtttttttgtttttttttttttgtttttgaaacagagtcttgctgtttcacccaggctggagtgcagtggcacaattttggcccactgcaacctctgcctcccgggtttaagtgattctcctgcctcagcctcctgagtagctgggattacaggtgtgcaccaccatgcctggctaatttttatatttttagtagagatggggtttcaccatgttggccaggatggtcttgaactcctgacctcaggcaatccacctgcctcggcttccccaagtgctgggattacaagcatgagccaccatgctcagcctcagcttctctgtattaaagtcctgaattctttgaagttgttaccacctaaatgatcattgaaaaactgtattttttagtgcaaaattgttcttaaaactaatttaataacttagctaattgcctatagttgtgttaataaacagtggtcttagaaacgcttagaaatggaagttttttacaaaaataagctaacatatttaaaatgccttttaagtattttgtaaagtgtaaaattcagtacaggtgctctctcagctagtttttttttttttttttttttcccctttactaaagatgagttcaaacagtgaatgtttgactcctggttccatagaccataccttccgtttttatttgttcgttctcttagactttggacttcctctgaaatgtcctctgtaggttcatgagcaggagtcacaggaccacttagagaacaatcttctggtcttagagaaattggtagaaataaaagaataacataacgattacaggtacttttgtctttatttctaggtccactctaatctagaggaatgtatcttcctgcttgtgatttttctattttaaccagatggttcattatatgcaaataaaatatgtatttatttttgagataagaatcttgctctgttacccaggctggagtgcagtggcccaatcacagcttactatatccttgacttccaggctcacacagttctacctcagcccccttagtagctgggactataagtgcacaccacgacacccagctaattttttaatattctgtagagatggagtctccctctgttgctcaggctggtctcgaatccctgggctcaagtgatcctcccaccttggcctcccaaaagagtttctttttgctgggattataggcatgagccattgtgcccagcctgatggattttttaaatacttaaatatcagagatgttaacatggtgtttcaggttttaatgccttcaagcaatgtaaaatctaccacacagttcttgggaatatgatactttgaaagttgttttgcattcttgccatggttaacaagaaataatgagttatttttttaaagtaccttaagtgttttacttaaagtgtgcttatcacaaaatactctattttcagatatttagtcctggatattgcagataatccagttgaaaatataatacgttttttccctatggtaggtaccagtattttttaaatatcatttaaaatttatttatgatttgacttcttagttgtgcttttttttttttttttttttttttttttgagacaagagttttactcttgttgcccaggctggagtgcaatggcgcaatcttggctcaccacaacctctgcttcccgggttcaagtgatttttctgcctcagcctcccaagtggctgggattacaggcatgagccgccatgcccagctaattttgtatttttagtagagacggggtttctccatgttgatcaggctggtctcaaattctcgacctcaggtgatctgcctgcctcagcctcccaaagtgctggcattacaggcgtgagccaccgtgcccagcccctttaattgtgcttgtaaagcttgctacttttactttgctatgactgaaaattatgtgattgtgtttttaaaagaattatttgtagaaaattttttatgatctccagaaatttgaggaatcatattgtgaatgtattggacttaaattaaattttggcttctttaatttttttggacttgtaatagttctatttatagcattttggaaattggtgaatcaaaataatttttatacatataaattaggaaattgttttcaataggtttcattttgtttcattatatgcatttattttatgcttacattaatccacatgtcttttgcctccagactaaggaatttattgatgggagcttacaaatgggaggtaaataacatttcctttccttaactaatgtttatattttgattatttgttaattttttagttggtatttgtcttaaatgcaggatatggaagttacaattatatgtagtagcttactcccaaatttgtattttcccaattacttgtttcatttggataggctttctggagtatccctgtagactgttttcaaattctctgtgagctttcagtttctttaataagagtctgctatattctctacacagttgataataacaaattgtaaagatttgaagatatccaagtgattatagtatataaggagttactttactgtggtttcaatgtagttcagctactgactcaggtgtttttctattagaataatgaattcatgtttttcaggaaaagttcttgtgcatggaaatgcagggatctccagaaggtatgaagttagaaataatctttctttctataacatttaattaatgggctgtattttctggttgtttttaaaattattttcccctcttcagtgcagcctttgttattgcatacattatggaaacatttggaatgaagtacaggtaagaaaataccctaaaacctagccacagtttaaattctcattaaaatgaaacttaatgggaatagtttggaagtttgaagttcttattcccctgattatttttcatgtagtcatgtttgattaggcaggcccttattccatgattagtcttaacctaatttatctacttgtatagatatgcataggctaatatggaaatcctatggaaaactacttacctaccacaagggaattggttggtatgagtataaaaactcgtgaccacaaatgttagtgcttgccttatttaaagggctaatttatcatgttctcctttaacaatagttggatgaaaaattacctaggaattgtttgcagcatctatttacaattcagagtagtctttcttatcaaaaatcatcttttccaagcattctgtatagattttttaaaagatagggggtggtaatgagcttcttgccccaagacaaagcaaaagcctggccagtgtacagtatttcctttctcagcttttcttgttctacaaattagaaatcttatagtaatcattgacacatctttctatttcagtccccttttatatctaaattagaatggataactttgcttaaaaatatctattcttaaaggaatattatttgaatacaaatatttatttatttatttttgagacggcgtcttgctctattggcaggctggagtgcagtggtgcgatctcagctcactgcaacccccgcctcccagattcaagcaattctcctgcctcagcctccctagtagctgagactacaggtgcacaccaccacgcctggctaatttttgtatttttattagagatggggtttcaccatgttggccaggatggtctcgatttcttgaccttgtgatccacctgcctcggcctcccaaggtgctggtattacaggggtgagccactgcacccagccagaatacaaatatttaattgaaaaaagattaaacatgtattgatggactttatgttttatatattgtttttattatttcgaattttgtcagaccattaatgttggaaataacttgtatttattgggtctctgctatgagctcagtactattataggcactttaagcctcataacaaaagtaaataaacctctttaaccagtgatagtattttgagcttgaacttgtactatatgcacaaaatgcttacattttatatatttattttagagacagggtcttcctttgtttctcaggctggagtgtagtggcacaatcatagctcactgtagtctcagacttgaggactcaagtaatcctcccacctcagcctctcaagaagctgggactataccacatcactgtgcctggctaatttttaagttttttgtagagatggggtcttactacattgcccaggctggtctcaaagtcctggcttcaagcagtcctcctgtgttggcctctcaaaggattggggttacaggcaagagccactgcacctggccactttacacttacctcctattcatagtagttccccaaggtaggtgttattagactcttcattttaccaatggacaaaatagagcttagagaagttgagcaagctgccgtaagcatatagctggtgagaaaaggaattgtgatatttaatctcatcatgctttttccattacaactcattacccctctctattgctaagttgtatgattatgattaattcattaaataatgctatcacattaacactctttttctgttttcagagatgcttttgcttatgttcaagaaagaagattttgtattaatcctaatgctggatttgtccatcaacttcaggtaacttttcttcctctttaaggcaatcagaagtaagatataaaatcttttatacatgtaatttaggtgtacaatttactttgtgaatacttaaaattgccataatctgactactttgatgctttattcaagtttatatctctatttagaagtattttcttggctgggtgtggtggcttatacctataatcacagcactttgggagaacaaggcatttggattgcttgaggccagaagtatgagatcagcctgagcaacaaagtgagacccaatctctaaaaaataaaaaattaaaaaaaaattagccagtcatggtggtgcatggctgtggtcccagctactcaggaggctgagatgggaggattgcttgagcccaggagtttgaggctacagtgaacagtgtgtctttgcactccagcctggcccacagagtgagaccccatccctaaaaaattaaaaaaacttttttttcttaaaggctggcattaccaagaaaaaagggttaaagacacattatcaaatctaaagtaaaataattgctgttagaaatgtctgatttttttttgttgttcattttgatcacacagagcataagacagttttgattctaagtatactaactataacagctttttctattctatgtttatcttttccatgttgtttcatattttgttgatgcctggcagatgcactgacaaagatgataagtctatgaattaacctaattagaccacgttgctcagtttattccaagaggcaaaatcataggctgcagaatgtgctctggctaattacatccaattatgtaggaataaagctcatgtttcaacatcaagaatatttattacaaaatatattgttatagttaccaaggtttaaattttattttaatatttaatttacttttaatttttactacattcaaaagagaaacagtgtcatctgtgttcagcctgttcatgtaaaatgtttgtcttctaactttgtaagtttctttgccttttaccatgttgtagaaaacattgttttttttcattttttttaaactattttttaagcttttcttttttttgtggatacatagtaggttaggtatttcgatacaggcatgcaatgtgtaataatcacatcatggaaaaatagagtatccatcccctcaatcatttatcctttgtgttacaaacaatccaataatgctcttacttgttttcaaatgtgtaaaaacattcttttttaaaattaatttttgtatttgaaagaatagtatatacatatgtttaagaagattggcctggctcagtggctcacacctgtaatcccagcacttagggaggccgaggtgagtggaacacctgaggtcaggagttcgagaccagcctggccaacatggggaaaccccatctctactaaaactacaaaattagctggatgtggtgatgcatgcctgtaatcccagctactcaggaggctgaggcaggagaatcgcttgaacctgggaggcggaggttgtggtgagctgagatcatgccattgcactccagcctgggcaacaagaacaaaactccgtgtcaaaaaaaaaaaaaaaagaatattggaaatatcctgataggtacatctgtgtgaatatacctgtaaggtaactgaagtggaattggtggattccagtgcctttgaaatttgatagatgtttccagattgcctccaaaaaagatgaagtaataataaacttatatcaccaggaaacaaaaagtgcctattcctccgagtgcctatttcctcctaccctaattaacaccagtagccaaaagttttttttttttttttttttgagatggagtcttgctctgtcacccaggctggagtgcaatggcgccatctcggttcactgcaacctccacctcccaggttcaaacaattctcctgcctcagcctcccaagtagctgggattacaggcacgtgccaccacgcccaggtaatttttgtatttttaatagagatgggatggccgggtgtggtggctcacgcctgtaatcccaacactttgggaggctgaggtgggtggatcacctgagatcaggagtttgagaccagcctggccaacatcgtgaaaccctgtctctactaaaattacaaaaattagccaggcgtggtggcaggtgcctgtaatcccagctacttgggaggctgaggcaggagaattgcttgaactcgggaggcggaggttgcagtgagccgagatggcatcattgcactccagcctgcggaacaagagcaagacttcgtcacaaaagaaaaaaaaaaatagagatagggttttgccatgttgcccaggatggtcttgaactcctgacctcaggtgatccacccaccttggcctctcaaagtgctggaattacaggcgtgagccaccactcctggcccaaaaatgttttatcagatttttgtgatcatttgttggtgttcctctcaccggtttgtaagagctctttttatattatggaaatctatttatagcctaccgatttgaaatatcatttttattttataccaaattctgatatgtcctttagaagtttgaagttttcttttttaaggtgcttatggaatggctagttctagtttttgaaccgttaatatggtgacttgagttactggatcacattagattggatttcctaatattgaatcatccttttggtccagcaatggatcccacttggttatgatagactgttctgttaatgtattgctggattgtatttgctaatctttttgttcaggattttggaatcagttaaatagtaaattggtttgtctttcttttttttttctgtactatccttttctggttttactatctctgtcacagtgttctcattttttagtggaagctttccatttctctttgtgccatggatcaatttaaattagattggagttacttgtctcttaatgcattagtatatggcacctgtgaaatatctgaccataatgttttatctaattcagttattcattatttcattcattcatatattttgacaatagaccagttctcagacaacattcttcatttggtgtatcggtttgattttttcttttctttctttctttctttctttttttttttttttttttttttttttttgaggcagagtcttctgctctgttgcccaggctggactgcagtggtgcaatctcaactcactgcaacctctgccacctgggttcaagtgattctgctgcctcagcctccagaatagctgggatttacaggtgcctgccaccacaactggctaattttgtattttcagtagagacgaggtttcaccacattggccaggctggtctcaaactcctaacctctggtgatccgcccgcctcggcccccagagtgctggggttacagatgtgagccactgctcctggcctggtttgattttctgatacccctcaggtcactttggatgtatttatgatcttctgtgtaatcattgatttcataagagttctacatagaattaaggaaaataatatcttgtactttaatatcttttggttctattattttttttcttcatctggttagtccatgttgtttttctgtattctaatttctgcttccttggtactttgctttagtgttgtttgctgctgctgttgtgaatttcctgagttgaaaacttggtttctttttattctttcaaaaattcaaggctattaattatcctctttgcattgtgttagtcgcatgctgcagattctcatctgcattatttttatgttatagcttgatattctgtgatttcagttttggtttcattttttatctaatatgtgttgagattttttttattgtataggtgactgggttttaaattttttatttttgttcatatttagttttattacattgtaatcacagaatgttttgtagtacttgtattttttgatgttttctttgtggtttaatatgtagttgttttcatgaattttatgggcatttgaaaagaagatgcattctgttttcaggggataaagttaaatgtatttgtccacttgatctgtcttgggctgaaatcagtgaattgaaatcttttactatattgtgtttattttttctttatttccccttttttggttctgcaagtttttttctgtacttaactatttggtacataaaaattcaagttaggtttttattttagttgtaccctgtttaaatttcagggttttttgttgttgttgttgagacagagtcttgctctgtggcccaggctggagtgcagtggtgcgatctcggctcactgcaacctctgcctcctgggttcaagtgattctcctgcctcagcctcccaagtagctgggattacaggcatgcatcaccacgcccggctaatttttgtatttttagtagagacggggtttcaccatgttggccaggctggtctcgaactcctgacctcatgatcctcccacctcggcctcccaaagtgctgggattacaggtgtgagccactgtgcctggacaaatttcggttattttaccttgcagttaacctcgtttaatattgtgaatcctactctttctgttcgcttgctaccttttgagttttcccattccttttccttcaagctttctaaatcacttgattttagatgcttttcctcagtgtagtctaggattgagttttgctattagatttggtatcattgtttcctaataggtgaatttaacccactttcatttactgaaaatgacagatacaatcttatctattattatttcatattatgctttctgttttaaatgaatcctttttttaaccttctgctatagtttaaaattttttggtgtgtttatgtttgttacataatttttaaggttttatttatttacttttccttttttttttttttttttttgagttagagtctcacactcttgcccaggctggagtacagtggtgtgatctcggctcactgcaacctttgcctcctgggttcaagcgattcacacacctcagcctcccgagtagctgggattacagacatatgtcaccacatccagctaatttttgtatttttggtagagacggggttttgccatgttggccaggatggtctcgaattcctgagatcatgtgatccacccgcctcagcatcccgaagtgctgggattacgggcgtgagccacggcgcccagcccttaatcctacatttaaataggattcagccaatcctattacctgttccagtgtctttattaaactcttggactttattaagaatagttcatggaaactatattcccatggaaactatccctttgcatattggaaaatatttttcttttgcccttatatttgaatgacagtggctagatataaaataggtatttaatactttttccctagtgattttgtacacagacctgatattaaatattttttgtttgttttttattttttggagatggagtctcactctgtcgcccaggctggaatgagtgcagtggtacaatctaggctcactgcaatctccacctcccgagttcaagtgattctccgcttcagcctcctgattagctgggattacaggcacatgccaccacacccagctaattttatatttttagaagagatggaatttcaccatgttagctaggctggtctcaaacttccgacctcaggtgatctgccctcctcggcctcccaaagtgttgggattacaggtgtgagccaccgtgcctggcctaaatattgttttagagaagtttgaaggcagaccaattttaagattccccccttaggtgaattgatttgtatcaggagaaggttgtctagatcagcagtctccaacctttttcacaccaaggaccagtttcatgaaagacaatttttccacggatggggtggcgggggagatggtttcaggacaaaactgttctatatcagatcatcaggcattagttaaggagtgtgcaacctagatccctcgcataccatagggagggataggtttaccatagggtttgcgctcctgtgagactctaatgctgctgttgatctgagaggaggtggtgctcagatggtaatgctccctggagtgccactcacctcctgctgtgtggcctggttcctgacaggcgatggaccgattctggggtctgcagtccaggggtggggaccctcatctagatgaccataagatgctttatcaaggtgtatcctggttttttatgtttttgttttttgagggggtctcgcactgtcacccaggctacagtgcagtggcgcgatcatggttcactgtagccttgacctcctgggctcaagtgatcttcccaccctagcttcctaagtagctgggaccatgggtgcacactatcacacctggctaagttttttgtttgttgttgtttgagacaaagtctcactctgttgcccaagttagagtgcaatggggcaatcttggctcactgcaacctctgcctcctgggttaaagcgattcttctgcctcagtctcccaagttgccaggattacaggcatgtgccaccaaactcagctaatttttgtattttttgtagagagacagggtttcaccatgtaagccaggctggtctggaactgctgacctcaggtgatctgcctgcctcggcctcccaaagtgctgggattacgacgtgagaccacacacctggcttagttttttaaattatttttggtagagatggggttttgccatattttccaggttggtctcaaactcctgggctcaagcgatcctcccaccttggcctcacaaggtgctgggattacaggcatgagccactatatccggccaagatgtatcttgttgattgctctacatcagtttttttctgagtcacagtgtgcccttaccacttgcaaattcaagccttccctgatttcaggaaagttgtcttctattgtgtatttacccttttggttgttctgtttctttttctttttagtataccccttaccccggtatagtttatgttcccttttttctttgttatttgctattttctctgtaattatttgcagctttgttcttttttttttttccacttgatttttctcacgtttgttttccatgtcccatgctgcattgtttcattaaatatttatttggcattgttttagttaggcactgacagtaaagcagagaacaaaacagacaataatccttgacctcacgaaacttatttagtgggagaatcagacaacaaacaaaatgtagtaggccagaagtaatgaatccaagaaaaataaggccatgtaaggaaggtgggacgagaattgtatttttagaagggtggtcagaaatgggcttactgaaaagtgatatttgagcaaagacctaaagagatgcacgtatttggggaaaagcatttgaggtagaggaataagtgtaagtggtttgaggtgggagcatagttcttagaaggatactcatttcatcatagggccagtcctctcatgacctcatcccaacttaatcacctgccaaagtccccacattaagtgtttggacttcaacatatgaattatgaggggaatgcaaacattcaatcccataactgccatattttctttgattaatttgttcatagttttcatctgcttcatggtataagttttatggcattttctttatgacatttggttatactcttgcttttctgtttttgttttgttttgttttgttttttcttgcaaaatctttgagtaagacctaactggttccttcttgattattggtcatctttgaactggaggtattcgtcttagatcagctatttacccaagaataaaattgtgggaaaggggccagaggagtggttggggaaggctgacagcttgaattttcccaggttcctttggtggcatgaatcagtgagtaagaagcagagctccttatatcacaggtttattttgtttaaattgataaacactgattcatattagaatcacctggggaatccttacccatgccaatgaaatcaaaatctgtgagagtggggcctaggtatataggttttaaagtgcctcaggtgattctcatgtatatccaggctagaattgctgatttagcctttacttttagctatccaagatcaactgatgcttggctacatgcaaccaaatttcacttccgccttaccatacttaaacagcctgctgcttgcaaaaaatggcaggtgtaggtgttcacattttccttaatatgtcccaccttctcccataggccactcatatttcctgactttgtcataccatgcaagggcttgttggttttattttaggtcaccttttttagcgagctatgaactgtacctactctggcccacagaggagttatctgctatgcctagcttaggatggttctattttttttgaaaattttattgtgaaattataatatagaaaatgcataaaatgtaaataaacatccatgtaactattgccgaagtatggaaacagaatgtttaccaggacaccaaaagcctttttcatgccgcttctcaggcacaaatctgtttctccctctgtaaagtaaccactatcctgacgtagctggtaatcaattccttttcccctcattcttctcattttcagggtaatggatgtttcctagtttcatcaaatgttttccttgttttcagaaaagagagaaacaaaaatgcctttattcttctatctataactggaagcagaggactattgagattgccaatttaagtttttggtgttttttggggtttttttaaacagatgaagtcagagatcattatagctaatgccatactgactggcagttcagcatgcagtaccctagcacaaactattagccgggcttgatttatagttatcagtagttctgaatttatgagacaggaattttaaacttccatttctcttcaaacaatatggcactagatttttcaatacagatgaagaataccaacagtgtatacattaatcactattttgggtatccaagaatgtaaatatataattaagttaattaacttattttttttttaggaatatgaagccatctacctagcaaaattaacaatacagatgatgtcaccactccagatagaaaggtcattatctgttcattctggtaccacaggtaaggatttttttctttttggagaaatttgggaagaaagataatgaaaggtggagaacttgctacaagttacactgaacaatttaaattgtttagaaaacttgttaaactattgagctaattccagaaggattcattttataatgaataaatgtgtactataataagcttaagtctttcaagtagtagtacatccgtgttgtaaagattaaaataatacgaatctggagaaggggccctaaacacgcttaggtgatcttattaaaagtagagggcggttaatacagcgtgtagcatggctaatgtgagcttctttctcttgccatcaatatttccatcctttcctccctctgttgctatttcagaagtaccctaagccccttattttcaaagttaatccaagcatgctcttaaaatcttcctttcccaagaccttgctacctgtgtttatcacctttgtttctctcccaacaaagcacacaaggcatttttactttatttccagtttttcctaccctgcagttcacttcaatctttgaaccaacagttatataaggtagtaagaacagcttatatacttagcactgacctggaaattgaggacaggtgatctgatccacaagtatagaactctttgcactctactgcactgcccatagtgagtaatatgactgtatattcatccccaaggctcaacttcctaattgtcattgactttttcatttcctttgccacatctgtctaataattgctctccacatcctatagggtccgttttgtcagtattgttaacattccttcctttttttaatagtgaccttaatctagttcaggtccggatttgcctcctttccaaactcttgttatttggtctgttctgtacattgtggccagacttattcccatgaaagatatttctaatattgatatttttcctttgccaaagcctcctttggcttcattcctacaaaagtttatagaatgccatatgcccttctgattttttggtttctttctctcattgttcttctttatgtctgcatttcagaaaacaactgctgatggtttcctgtgtgtgtcttcttttccccacctaaaatgcatcacatttagtctccctattcttggttcatatgtcatctcctcaggaagacatgatgattaatgcactcttcctctaacccctagtcatttggagttcccatagaagcacagcacttcatctgaaacttaatcacagtatctgggtttagcctgagggctaggatattttatctcattcaattgtattgatactatatttttatctttatgaattttatagtgaaacattcttcaattagaatatgccctctgaattaacattattattaccatgatataacagtcctgtagggcataagtttaaggtcatgccattgttaggcaaaaaacacagcagaccctctgctggtttaactgttccctaaagttttcctccattgagagtctaatttcttgattataacttttggggatacagagatagctttgattctatgtgggagatttctgtactagcagatgctggtatgaagaatagataaaagaaaatctctttatatgctacatgccttcctttctcccaacctagacttcgatagcttgagtggaaaaatattttcagctgctcttcataacagcctctgtgaaagcaaaaagattatctacaaaaaattatacaaatacaagattaatttcctaaattttatgccctaagtcacatgtttatggtgcctaaaaaacaattaacttgataactaaacatttatgtattatctcttgaaaaggtctattttcacactatttcaaaaattatttattttatatgcaatacctaagacataatacttgagaaggaaaatatatcctgtcatgaagattaaaaagttataatatttaggtaatttatcacaaaggaatttactaaattttgctatatcagttgtggaattttcatagtgtatacatgatcacttaataacaaaattttacttgctgtaaccttttaacatgaatttattttagtgcccttttaatcttcatgcaataacttttaggcagtttgaagagaacacatgaagaagaggatgattttggaaccatgcaagtggcgactgcacagaatggctgacttgaagagcaacatcatagagtgtgaatttctatttgggaaggagaaaatacaagagaaaattataatgtaaaatggtaaaaacataagtagtttttttttcaattacatgttgcttccagacatacttctctgcaacttgttgagcaacattttaagatgttggacttctgcaatagatgacactgatggttttactcctttttttaaaaacacatgcgcgcgcacacacacatgctttacaagttttattataaaccaagaattttggacttgcaaagaggtattattgcaataatgcacttttcatacttgaaatttatttgtatgatataaagttattactttaaacaaaatgcaagtatggggggattgtttataaagtttgggtaatttataacaaaatttgctaaggtttgctaaaaattcatttttctgttctatatattacatttttaacataattttacagttcaattttatgatggagcctcttacagaaacattaacaaaatgcaggaatctgccacatttcttttttagtataacttaatagcttaattaccattttattttttatacttcttccattattaatctttaaatcatgatcctaattagctgtccttactttaacttgatctaattattgcttcctttcttattactttcctaatttttctatattttaaaaactacagtttccatgataaaaggaaaacgttttgatttatagtaccaagtgcttaaacacaaggatagtgttagattttcgagtgactttcctttttgcattttttggcagtaaaagccaaacgttgtatttgttcttttcagagttgtccagcccttttttcctttgtccaaaatgattctaaatagaatctaataaaccaatgtagcattatttttttctaaatgaagccccaaaaaagaaaagtgccttgcatcatttaaaaaaaataattaaatcctcatggcctctaaattagtatgtagaacactgaaaagttcttaacatttttgtgtaatttcctttctttttaaaccataaattagtttaaactgaaagtacgaggctggaagaaatattagtaaattatttggaatatagaatgtttactctttctttttatgttgtcttaatgattctgtgagattgttccggctcaaacagaagcttttctttggggaaggtgatttgtgggagactctagtgtattttaaattagcattttaatccattcttgacattcagttagtccagatctgccccataatttgctttagtaaagtcactttatggatttttggctatgttttagtttgtgtgtataaaagttctaagaaaacatttttgctattttaagtatgtaagggaagagaggagtgtttttaactttttatagttgatgactttagggtagcacaaacaaaactcctttgtatctaacttttctcaatcctctcttgaggtgctttactaatgggaatgatttctgtatgttcccttggtaccaagaggtactatgcaaagtaacctattacaccaagttacttgctttgctttcctctctatgatgtgataatacagtaaaagctttcttacccagcatagtgggagagtggagattaattaaaattgttaattaagagttaattcctattgacccaggtgatatttctcttctgatttccctccccttcccttctcttatcttaccactgtgaaaacagcatattgttaatctcgttgtcgtccagtattctgctttgtgattaggtcttttgatgtacagtggtctagtggagtcaagattcgcattgggttttctaaaattccagttgataaaagttccagataacacagctttcctgtatatagatcactattgggcaggtcagcaaagatctcttacagtgtaataataatctatgatgcttcatttagcagaaactctgcttaaaagaatcttcataatagtaagtttaggttttaaaaacttgtttcataaatatacatatatcctctctagtagtctggccaaaagaacagattttgttattgataatttgtagctggtaattttccacattttctatccactgtaatttttatgttgtcactgaagtgcctgcccagtactgtatattacagtctctcacaaacactgggaaaagggactgtcatcatcttgagtactctgtgtgtatatatatatatatagatagatagattttttttttttttttgagacagagtctctaatgtcacccaggctggagtacagtggcacaatcttggctcactgcaacctccacctcctgggttcaagtgattttcctgcctcagcctcccaagtagctggggttagaggcacatgccaccatgcctggctaatttttgtagttttagtagagatggggtttcaccatgttggccaggctggtctcaaactcctgacctcaagtgatccacccacctcggcctcccaaagtgctgggattacaggcgtgagccactgcgcctggctgagtacaatattaatgtagacaaaccatgaagtttattatttcatataagaacattacaggtttgttttttcttgcatgtctgtccacctaatgtttaagtagttctggtagctcttcctattctttattctatttgattccatttctgtgattcttttattaccactgatgttttgtgatagttaactatgataaatttaactgatcatgatttatcttctagagtatttaaataatgtatgagtgaccacccaattccaacattaaaagtgtaatctgggcccataatttatagtgaaattgtatcaaaacatagggaaactgtattactgtccattttgaaa

SEQ ID NO: 96252 - DNA, 12960 bp, Homo sapiens
ttttagtagagacggtttcaccattttggccaggatagtcttgatctcttgacctcatgatctgcctgcctcatctggggagtacaatcccaaagtgctgagattataggcgtgagccaccatgcctggcccacttctgaattttaaattgtgcttgtttcctatttgacttattttatagcaaagtaaggtaatgggagagggaggaatttatacttgattacagctataagccttttcagaagcatgagggatcttgttatcttcagccagtgtatttactgattgtcttttttttttttttttgagatggagtttcactcttgtaacccaggttggagtgcaatggtgcgatctcagctcactgcaacctccgcctcccaggttcaagtgattctcctgcctcagcctcctgagtagctgggattacatgcatgtgccaccacgctcgcctaatttttggagctttagtagagacggggtttcaccatgttggccaggctggtgttgaactcctgacctcaggtgatccaccttcctcagcctcccaaagtgctgggattacaggcatgggccagcgtgcctgtaatcccagcactttgggaggctgaggcaggcggatcacgaggtcaggagatcaagaccatcctggctaacatggtgaaaccccgtctctactaaatacacaaaattagctgggcgtggtggtgggcgcctgtagtcccagctactcgggaggctgaggcaggagaatggtgtgaacccaggaggcggagcttgcagtgagccgagatcatgccactgcactccagcctgggcgacagagcgagactccacctaaaaaaaattttttttttttttttttttttttttgcgacagggtatcgctttgtcacccaggctggagtgcagtggcacagtcttggctcactgcaacctccaccttgccagttcaggtgattctcatgcctcagcttccttagtagttgggactgcaggctcgtgccatgcccagctagttgttgtatttttagtagagacagggttttgccctgttgcctagtctggcctctgttagaaataaattttcgaagctgcaaatgaatatcactcaaacataaatttaattttctcagcaaggcaattttacttctatggaagggtgcatctcacggatggagcaatggtgagagcacacctgaacaagggaggggaaggggttcttatccctgacgcaggtagcccctacttctgtgttgttcccgtattggctagggttggaccgcacagtctaagctaatactgatgggctattttaaagagagcaggggtatgagctggagtggctgggcgagtagtatggcgggaagaacagttacagaacaggtgactcaggatgactcaggtcaagggaggtgaccaggagtgactcaggatggagcaggtgatagaagctaggagggggttgtttactgaaacgaggggcaaggagatgaagagaatgaggaagttaaacttttaaagttttaaatgaagaacaaagaacaggggagctgaacatacagatacattggttttttggagagcatctcagaactcattgtacttaacaatttacaggctaaaacctttgaagaggaatttattaaatcctacatctcaaactcctgacctcaggtgatctgcccatcttagtctcccaaactgttaggattacaggcgtgagccactgcacctggcctattctagtcgccatttaccctttccctgatgtggcttgttagtcatcagttttaataattgttgccttttgttagaaaaaggcataaatgaaggttaacttaagtttatttaaaaatctattttccggctgggcatggtggctcacgcctgtaatcccagcactttgggaggctgaggtgggcggatcacgaggtcaggaatttgagaccagcctgaccaacagggtgaaaccccgtctctactaaaaatacaataatgagctgggcgtggtggcgtgtgcctgtaatcccagctactcaggaggctgaggcaggagaatcgcttgaacctgggaagcagaggttacagtgagccgagattgcgccattgcgcttcagcctgggggacagcgagactgtgtctcaaaataaataaataaataaacaatctatcttccttctctgtagcttttgtttttttaaggataaaaggtaggtgaaagattttcattgaactttactctgtatttcacttcatgctacatcttttctttgatggtatatgtccatctcggtttaacccattttgtaggtttgtaattgctgtgtttttttctggggttggtacatttacaagctgttttaactggtacttaaaatgttgactcttagttaactttctatggtcctttgtcaagacatgttccaacatgttgtagaggttttcctagaagtcctgttggaatcttaaaacctgtgacttaccttggtaaatccccagtcttgcatctagagagtgctctacctgataaccattggggagataatgatttgactttcagctaaaacagtttactgattaacatcagttggaggttggagcgtgcctgaaactgttactgtttcagccttcacctgagagaagcttggacgattcttactcttaattaaatcagaactagaaagtagtcagaagatatgcagaacctcagcaagggtatacagcatttgtgtacggtgctccattatatgtgtcatatgtgtcttttacttctgctggttgcctttgtgtgaatgctaaatagggaattttctgcattagaatagatgttataaatttttttttctatttagttttaccaacagactgcagtttcttcactaccaaaatgacatcattttccacctctgctcagtgttcaacatctgacagtgcttgcaggatctctcctggacaaatcaatcaggtaaatcattttcggtatttctagttttttggttttttttttttttaatttttaaaaagtttagctgtctcatgactgtaatcccagcactttgagaagtcaaggcaggaagcttacttgaagccaggtgtttgagaccagccttggcaacatagtgagacctgtatctctacaaaacatttctaaaagaaaaaattagctagatgcagtggggtgtgcctttagttctagctacttgggagcctgaggcgggatatcacttgagcccaggagttcaaagctgcagtgaattatgatcacaaccagtgcaccccaggctgggcaagagagtgagaccttgtctcttttttaaaaaaagtaggggaggtgggggttgtgctgggcgaggtgggtcatgcctataatcccagcacttcgggaggcggaggtaggcaggtctcttgagcccaggggtttgagaacagccagggaaacatggtgaaaccccctctctacaaaaaaatacaaaaattacctggatatggtggcgtgcacctgtagtcccagctactctggaggctgaagtgggaggatcagttgagtctgggaggttgaggctgcagtgacctgtgatcacaccactgcactccagccaaggcgacagagcaagaccttgcctcaaaaaacaaaagcggggggagctgtttaaagaggttctcttgttccatagtttcagaaacctacttgaaatgtaaatagcacatttattttatgtttatatcaggtacgaccaaaactgccgcttttgaagattttgcatgcagcaggtgcgcaaggtgaaatgttcactgttaaagaggtaagccatcaaataaaattctcattttttttgttttttttttttttgagatggagtctccctcttttgcccaggctggagtgcagtggtgcgatctcagatcactgcaagctccgcctcctgggttcacgccattctcctgcctcagcctcccgagtagctgggattacaggtgcctgctgccacgcccggctaattttttgtatttttagtagagatggggtttcaccgtgttagccaggatggtctcagtctcctgacctcatgatccatccgccttggcctcccaaagtgctgggattacaggcatgagccaccgcgcctggccaaattctcagttttaagaacagttgagaagtagaagccagtgaatatgtagttttgaaatcaggcctaagaaaggaagttctactcctgaggtatcagaggggcaacttatactctgttttaaagactgttaggttgaacatcatatttcctttcttttgaagtgtgttataagataaacataagatgaaccatgaattcattgatcgtagagttaaaatgcagagcaagtaaagattaaaaagacactgggcctggcaccatagctcacgcctgcaatcccagtattttgggaggctgaggtggagggattgcatgaacccaggattttgagaccagcctgggcaacatgatgaaaccctgtctctaaaaaaaaaaaaaaaaatacaaaaattgggcgggcatggtggtctgctcgtttagtcccagcagctacatgggaggctgaagtgggaggatcgcttgaacccagaaggtgaaggttgcaatgaggtgcactccagcttggttgatagaatgagagaccctgtctcagaaaaaaaagacactgtctgatttacaggctgtattttgaggcaggaattaaatgcagtagtttttattataaatgtgtcagatatggtggctcacgcctgtaatcccagcactttgcgaggctgaggtgggcagatcacctgaggtcaggagttcgagaccagcctgaccaacatggagaaaccccatctctactaaaaatacaaaactagcttggcatggttgtaatcccagctacttgggaggctgaggcaggagaatttcttgaacctgggaggcggaggttgcggtgagccaagattgtgccattgaactccatcctgggcaacaagagtgaaactccatctcaaaaaaaaaaaaaaaagtgtcagacactcttctgagcactgtgagttattttaaacacatgcatttaaataacttatttagcttctgaagttttttaaaaaacaatttgtattctttaagtggaaaagactcagtattaaaatgttaatgttgggaactgctttcatttggtggggtagatatctaacccttcctaaagagaagaaacaaaattatcaggcttttttttttttcgaacttaaaaccttcacacctatcaacactgccacactccagaaccattacacttctcaaggagacaaatctggaggcatttctgattttttagaatacctatattacttttacgattttaaattaagcacatcgttttggagtataaaatttgacacgtaagacctttttttccccaaacttattaaagtctggaattttttttttttttttttagttttatccttttattgaagcttacaatttcactgaacttttggccccaaatgaaaaaaatgcaaattaaaaaaagtattggcaaggagaggtgaccactgtcccctggagatggaagccgagcagagcgtggcaggcaagtgagggatcccagctgcggaggcagtagcctggccaaagatgcccagggaacagatttgtctgagcagggccagccccaggcagctagaagttaatacccaaggatttatgggtgtgatggaatccaagccactggtcccaggggcaaatctctctcatgcttggtcagattccactttggagaaaatgggctcatgtgacaggatggcctggtgagggaacacaggtgctaatggtaacaggccagtgaacactcgccactggcatcagggtggagctcagctgactggacactaactccattacaaggaccagaatctcctgcgtctggtgccaggctgtgccactcaactgctcatggccgtcgggacattcagctttcatcctctccttcatcaggcccctacctgtgtggcctcagccctggtcctcactatttggtggctgtgatgcaggactctcaaccctcttttggaacagtgttgcatcaagcaagggagaatgttcttctagagggacaggaaaagaagagagaggtccacgtacttctstcactctaggaagccaggaaaggtccctggtgcactccactctccacagatgggttgggtcatagcatccgagctgtcatggtgacgacgtccttgaagctgagccgaatgttgccttgtacagctgtgtccttctcccggaaggcctctgtcggcatctgcagctgggtgcacacctggatgaagcaatcaagctgtctggcaggattgacagagcgtgggcagtagctggagaccagtagctgggtgaactgggggctcaggttgtagcccatttgggacagagcttgctgcagctctgtgtagctaatggagcctgagttgtcccagtcataactgctggaagagctgcttccactgctggatgaatttccacagggctgagaagccgtagacatttatgtggcctgattaggtcttgtcaaacatgtttatcatcatgaggcaggtytcatcattgaacaaggaccagttgcagttgaccagagcctgcttcacctccttcatggagataaagccactgtgatcagagtcaccgactggaaccaggagtaggcctcatccatattgggaggggagccaccctgtccatgaggcctgggctgctgggcaccgtaggaatttggaggtggctgaccataggggccccctggagctgtaccatcatttggtcctcctggagttccagaggggaacatcccaggattgaggtgtccatagggccctctaccagctggtggtccataaggccctccaggggcaggacccccatagccaccaccagggggtagcacgctgccatactgccctccactactggggggggtccaaggtagtagctacccggaggggttcctggcgcttgccctgcatctccagggcagccccgcccatacagatagctggctgtggcaattctgacgtcacacacaggcaaggggtaaagtctggatttttatatcattatagtggttatgatgaattatgccatctccttcatttagcatggcagagtttgcctgagtttacacgatgagctttctgttatgaaccttgactctatctattgcataaagggaatttcctgatttttattatttatttatttagagccagggtcttactctgtcacccatgctggaatgcagtggtggtatctcagctcactgcaacctccgcttcccaggttcaagtgatcctcccgcctcagccttcctagtagctgggactacaagcgtgcctcaccacacctggctaagttttgtatgttatgtagagacaggttttgccatgttgcccaggctggtatcaaactcctgggttcaagcaatttgcctgccttggcctcccaaagtgctgggattacaggtgtgaaccacttcagccgactaaatttttatttgataaacacttggattttatgttttgtccacttacaatgctgatggctcttattaaacattgtacttcatttgccaaaaagaattattatgtgaacacatatcaaaagcctaaagtcgtttatgtgccctggactgggaaaatatttttataatccaggcaaattacttctagtaatagaatagacttctttatttggacgtctgagaaaatttttaagaggatactaggtaaattcactgctttttctcattgtcagatcagttcatttctgtgctgaaaagtctgggtctgttaattgtcagaaagacaatgagtagatggacctagtagttgggagcggctttcctgttgtaggaccccttacacaaactttgacagtcttgtaaatatgttatttctttctttagcaaactaacttaccttacctcctctaatgaatttgtgtttttggtagcagctggacagatcacaacatggtattttattccatgcaggtcatgcactatttaggtcagtacataatggtgaagcaactttatgatcagcaggagcagcatatggtatattgtggtggagatcttttgggagaactactgggacgtcagagcttctccgtgaaagacccaaggtaaaaacagtgagggcttgcgtatctttttgggtgcttatacctagccacttaatttctatgggttattaatatttattacttcactcaacaaatatgtaagagcctacatatgttaggtagcctatgaggcactgagaatatggtaatgagcgacacacagtctgattttatggagtatacagagtagtgagtcagtagatgctcttgcccatcttagtcaaataatcacactaattcatggtaaacctacactatggcaagtgctacagaaaagagatacatgaagcagggagtgggtgggatttagagtgttagaggtcaagaaaatgttcttttgaggaagtgaaatttcagccaaaagctgaaagatagataattaagtagtcaatcagagagtttgaggttgattgaacaccatgtgtaaaggcctgggtaggaggaagcttgatgtgactaggttagaattttgtgaaataattgttggagagggaggaagagtgagcagatgagagaaatgtagaattgctgggcagttagaggttgatgatgagcctggtaagaatcacagtagggctaacctgacctgttacttttctccagctgcatggggtgtaagttattagcttatatagtcaaaagctaattagtaatttagaagctctctttctctatagctttgatgactgctgcttctgagctcattctgtcttacactaagacttcccttagctgggtgtggtggctcaagcctgtaattccagcactttgggaggctgaggtgggtggatcacctgacttcaggagttcaagaccagcctggccaacataagtgaaacgccgtctctactaaaaatacaaaaaattagctgggcgtggtggcgggcgcctataatcctagctagtagggaggctgaggcaggagaattgcctgagtccgggaggcagagattgcagtgagctgagattgtgccatggcactccagcctgggcaataatagcaaaactccgtctccaaaaaaaaaagactcccctccacccccactttccaattacaatgtgaaacttcagtcctggaaggaaggaatagtttccaaaagagatttccccacttggattactgttcgctaatgaaataaaatgtaaattaatcagttttttaatgggggcagagtaacacaggggcctgggcattaacatcttaatatttaaataattaaaaactgttctgggaaaaagattctgcctttgtatgccttacagagagacttgggagataacatcagaaatacatttaatatttaacggcaaaccactgatatcttcatagtggcatttggggttgttaattttttatcttctctctttaacagccctctctatgatatgctaagaaagaatcttgtcactttagccactgctactacaggtatgtcacatcatatttcttcagtctgtatcacagctttgagttcaagggggcaaatgatgggaaaacaaagaagatgaaggtggaaatggaatgctatctttggcatgactgggagaaatacatactacctgtcacacagaatgttatgttattaactttttactgaaaaatcaaacatagagtagaaggatttccactttctagacgtactgttaacgttttgtcatattgcttcatctagacacacttttaaaaatctctagcagataaggacttttttctccaaacattcaatatcattattacacataacaaatttaacatgtaattccataatcctatttcatagccagtttatgtatcatttcccccagttatctcaaaaataccttgtatttttgtcttacttgaattaggatccaaagtccacacattgcctttggttgatatgtctcataagtgtctttaatctataaaacttaactttccttttgttttcatgtcatttacgtgttgaagaaatgggtcatttgttctgtagaatttcccacgctctagagttggcagattgtatccttgtgattttgtttaatgtgtttctttaccctctctatttttggtaaactggtagtgcttgaataaattcaagtttaaattttttgccaagaaagctttataggtaatgctttgtacttctgtttaatcacatcagagtcatgtaaggtctgcctgtctattttagtcagtcatgttaataatctgtgggctcaggtggtatcagtctgatccatctgttacacaggtcactcaagaaccttttacctaatggctttagccatctcttatctgaatgccaatttgtctaaccctttgcttgattctagaccttctaaatactgctctttaactattaggtatgtataggaaactggctgtactggagtctggagtctccaaaatggtggtctgtaagagataggtaaataaactggacagactgaacatagccatttccaaataatgaaactttttccctctccactactacataaagcccttttgtgagcttcatattaacattgccctttgaagaaagcccaagttagtaatctttttagattgaccatctttttttcttctcaggttgcccaggctggagtgcagtggcactatctcagctcactgcagcctggacctctcgggctcaggtgattctcccacctcagcctcccgagtagctgggattataggcacatgccaccatgcctggctaattttttgtatttttagtagagacagggttttgctgtgttgctcaggctgatcttgagctcctggactcaagcagtccacccactttggcctcccagagtcctgggattatgcgtgtgaaccactgcacttggccactgccactgtcttttgatagtttactgaactgtcttttgcactgtcttttgatagtttactgaaataagtaggttgagaagaatccattcctttttatctttttctttctttcttttctttttctttttttttttttttaaatgtagagcgtcttgctctgtcactcaggctggaatgcagtggtgcaatcatagttcactgcagcctttacctcctgggcttaactcatcttcctgtctcagcctcccaaatagctaggactataggtgcatggcactgcactgcacctggctaattttgtttttttgtagaaatggggtcttgctttgttgctcaggttggtcttgaactcctggcctcaagtgattcttccacttcagcctcccgaggtgttgggattacaggcatgagccaccgcccccagacctaaatcaattactaataaagatttattctttaaaggcagagaaagagacattgctgtcataccgaaacatgattttgaacttactgaattttgaagcctgttagtctcattgagtcatatgcccacttcacatagctgtaaatttgagagtgaagatcctgcaaatgatacggcagctttattgaaattcaatcacttgtaaaatagcatggctttcctgcgatagtcactaaaggtttgagatacatggaggattttataattgctgatctactttttcattaaaatttgtttttggattgatctgttttctgaatatctataattctccttttttctctcattttctttcttgtactttctctgcagaatttaacatgccatataaagaatattttgttggttttgttttgttttgtttgagacaggatctctctgttgctcaggctagagtgcagtggcaagatctcggctcactgcaacctccgcctccgtggcacaagcagtcctcccacctcagcctcctcagtagctgggactacaggagtatgccaccacacctggctagttttttgtatatttttttgtaggtacaggttttctgcttgttgcttaggctggtcttgaactccaggactcaagcgatcccccttcttcggcctcccaaagtgttgggatgacaggcgtgagccaccatgcgtggcccatttttattttttaacttgtcgttttgaaaaaatttcagacttaataaagttgcaaaagtattgcatagagtttctctataccctttatccagagtccccaaatggtaacatcttacataataatagtatgatgatcaaaaccagaaaattgccccaagtaattctgattggttatctgttctgacttgcaattgcattggtgcttgtggatggccatctctgttgatttttgtgatttgggttgcttgtgttttatttgaaaggacaaatgagagaagtgcttttcatataattttatacctttgcaaatgggttaaacttttcattttggtcaagaagatgccattgtttaaaatggtagttcttttttttttttttttttgagatggagtctcgctctgtcgcctaggctggagtgcagtggcatgattttggctcactgcagcctccacctcccgggttcacgcagttctcctgcctcagcctcctgagtagctgggactacaggcgcccgccatcatgcctggctaattttttatatttttagtagagacggggtttcaccgtgttagccaggatggtctcgatctcctgacctcgtgatctgcccgccttggcctcctaaagtactgggattacaggcgtgagccactgcacccagcctaaaatggtagttctttctaaattgtctctccaaattttcccatgtatacaaatgaaataaatatgactaactttgtgtgtgtttattaatttttgagactgagtctcgctttgtcgactaggctggagtgc

SEQ ID NO: 96253 - DNA, 24429 bp, Homo sapiens
atttcaaaattaaagcagtcatttaaaaattgtcttgcatgattacatttgaataaagtaggccttctcccaaccaatctacgtgtgttcacctgtcctcactgcagtatgtatactgcgcacaaatatttgggttttcactgcgcagtaccaaatatttgaagttttcactgtgcattgtgggtctgtgatgttacctattcctcctacctcacaggcctagtatgttatcaagctcccaccagcatttcccgcccacaccctccctcccccagacactacataagtataaattgctaatgattactgataaacaggacactgatcacaatcacaaactctcacacatttgcacacccgaacatcccctgaggcccacagtaaacatgaaaggagggatgaaatgagattccaaggagacaggcatggtgtttgtgcacagtgaggggagaacaaagagaacagggagcctgggaggtggcaggcagggagagctggcgagacagactatgagatgagtcagagagagtgaatgagggcactgggtcgcatcaactaccacttagctgcccccagagggtggcatgaactggaagaagggaatgggagctggtcagggaagaagcggagttgatgccataactcagaaaggggggacaggagtgagctgcagatggggagcctgccttctgaaatctcctagacctctcctgcctggctctactcccagcaagctgcagggttatggcaaggcagctgggatggcagggtaaagaagaagtcaagctaacaacaaagatgtctgtcctggagatcactggaccccagcttggtggacagaagccaccccatagctgctaatgccttccatgtatttggtgctttcaacttattttaaatgccctcgtgctaatgatctcatttaatcctcaaccctgggaaataggcaggactggggttggtatctctaacatgctcctcccctctttaccctgtagattcctcaagagccctcaaattgtttccaccagcctagaaacatccgacactgaaccaggcggtgccttggggctatggggaacttgggtcctctgtctaggttccattttgggttgctggctgctgattgtcctaggctgagtgtgatgagaagtcacagggtatggaatcattcctgttgtggaatttcccaggcactcctccccctttgcttccatctgaacacctggtacatagtgactgtttcacccactccccagggagcaaggtcaggcttctcctcctcattaggtgaatggaagcctgagggctggagagggaaaggcggtttccctgagtcacacagtgagcaaacatggaggaatctgagatgccttggaaagagcacagggctgggggcatcagaagacctgggttccagtcctggctctgctgcctatcacccagggtcacgagctgataagacactcactccacctccccagccttagttttcataactgttgaatggaaataatagtacccaccccttggggttgttgggaggatcgaatgagattaagatgtcaacgccttatataaaaatgaattactctgattatcaagtagcacaggtaacattaggactcaagcagtggaaagaggctgggctcttccatatataaaggggctaggctctcctcaactcacctgtgtggccctgggcaagtccaggtctcagttttccaaagctcctgccaactctaagactgtgatattttgtgggctatgcctctggtgcaagaattctggtgctggccgccctgatctcttggccgttctatcatctgtgccccatactgccttagatccaaggatctcactgagggaaactggtcagttcccaacaacggaaaccttcaccccatccctcaggcagccgaagtgtgttattgcattttcctcccttcttagcctttgttgccttccagctttcagggaggtggggggtcttcttagcaaaatcaatggcagattgaccaggtaagcaaacactggattccctccctcctagggagggcttcaatctaacggccctgcctctaatatcttgcttctctcaggatgtccctaaaggttccaggcccctgatcctttccttgaggaaacagctcagcataactcttcctgggctcaaagaagtgaattaaatattaaatatgtaaggccagagcccctgctgcagcagcacattcccaaaacagacaatggcatacagctcatctgtcactctcccagtggctgtaggctgggcccccctgctccccagcccacattcctgagaaggaataagaaatggcaatattttgctcttcccagcaagctcatggcttcctgtgtccttccttccacccctagtgttgaaggctccaggggcctggaaatgcctggaacattgagttgtggcatcctcagcaatgcaacttaataggtctatgactggacagggaggggcctctgtagttagccccattagagcctggaaggtcccgggggtgaggaaacagctcaggaaggatgctgaggtcctgacatctctcagggttatggggaattggatattaactgtgatgaggcctcggggcaggggtcggttggcttgctgctcagattaatataggccatagaattatcagataggtagagcctcagagatcacccaggccaaccctctattttacagaaaggtaaactgaggcctgagaaaagagagaagcaacttacacaaggccactcaatgagctgtagaatggctaggccagtctcttggtctctggtatagagtttggtgctttttccaccctacctcctgcataacccccaaatctctttcctaatgatagcaagcaatggctcctgcactgtaaggcccaggggaccattttcccagggagcagaatctgttcatggtcccactttgcccagctaagaactgaaacagcatgaggtccatgggttccagctcagctctgccacttcataggatggaaccttggtcacgtcacttctccaagctttaattcctcacctctgaaatggggatttcagaactgtgaccctggatggccaaaggatccaatgagatcatgtatggatcatatatatggggcattttttgaactgaagcactaaccaaatgatattattaaaacgacgtgaggtttgaagatgctgcagagggaggaagcctcaggggaggaggctgtgaaggaacaagaacccacattcacaagaggctgcctggccatcccacagacctgactgatcctgaggccaccagcaggaaatgcccacagcaggtcagaccaccccaagctcactggcttgagagaccgcctgtccacgttgcttcgtgtgtgtgtgcctgtgcatgtacctggcagcccggtatcacagcaatttgcctggctgctctgggggcacatttggcaggagggcagtgtgcggtgctgagggagaacctccacttcaggccaggtcacagactctcaaagaagagcctccttgccgggatcccctgcggggacatctcgagtgcccagctcctctggggcccttaccttgtacttggccgcaagcagctctgtggcctgctgttcccgccgcaggtcctccagcatcttctccttctcctccagcagcttctgcttctcctcgctcaccaggctgcggtcatcctggatggctgccttmtcctcctccagccgctccttctgttcctgcaggtaattctccatgttcttctccaaggctgactccaggatgggctggggcgggcggtggttgttgttgttgtcatcctcctcttctgccacccaggcctcaatcactgggccctcagggtacccaggcggggcggacacggccttcttcctgcggctgctcttcctccggggccgcttccccagcatccccctcttctccagctgggccttcaggcgggcaatctcctcttggaattcccgcagcagtgtgtccttggggtcctcgttcaccyggggcttgttcttgatgttcttggctcggttggcaaagcgcaaggtggagaggctctcatcgtagctgtgagaagctggccccagtgtggctaccatgatggtcttggcattcccccccagggagtcctggagcagccgggtcagcttggagtcccggtagggaatgtgggtgctcctgttgcccgccagggcagcaatcacgttgcccagggcagataatgagaggttgattttggaggcttccttaggcctctctccaccagcaccaccaccactgcctccaccgccaccaccgccacccgaggatggtgtggctgcccctcccgctgtgttggggcctgccttgttctgcctctcgctgccagccaggtccacgaggttgagcttgcccactcggatgtggtcctggccatcagagccacgttcgctgcactccacagtgatgatgaagatggcatgggagcgggagctgacctcattcatgtgggtgctgcccacagcccgggtctggttccccaggttcatcacatgctcaatctccttgacattcttggtgacgaaggaggagaggtccttgatgtagacgccagtctcggggttctctttcagctctagcctcttgcccggctccttggagagcaggtctcgaatctcttcctggtagatctccaaataggaggcccggaccaggtactgttggttctgggagcgggagatgtgggtgaagatgtgctcaaaggcattcgggatgaccccgcgcagctcgggctccacccaggtcccctgcatggtataggtcttgccagtgcccgtctggccataggcaaacaccgtgccattgaaaccctggagcacggagtctatcaggggcctcacggtttcgtcatacaggtcggcctgcttggagctggcatcatacacggcgtcaaaggtgaaggtcttgggcagctcccccggggcrgcgcgggggttccgcagggtcacctggcccagtttcacgtccatggtcaggatctgctcgtgaccagcagcctcctccttcctgctgagggggcggcaccgggccaccaccttgagggcctcgctggccttggtcttactggccatcttgctgctctgaccttcctgcccccgagcccctccgcagcctgggcggtcctgctatcctgctcgctaggtcgggatcagcggggccggcccagcccccaggcgcagctcttcaatccgcatgcagcctcctagggtggggacgctgggaggtggccccarcgctgctgcagtccgggcctccaccgctctccggtcctctctgcrccggctgggaggtgaattaggcagaatcccccagtcgccgcgggagcagcgcctgccgagcagccgtgcccggagcccgccccatgcwggagcagagggagcgctgccgtaaacagcttcggcaacaatgagataaaggaagaggaaaatgggatgggggtgggcggcgagctgtcttctcctccttcctctagggatccatagcgtgggctgccggtcgtgggcggccgggggtcccgggcctcccgagggcagaggctcacctggagtcctccccccaagctgggggatcattcattssagccagcgcggctgctgctgcctctgcctccgccttccccgccgccgccactggagaatgagagagaaaaacagaaggggatggggcggagcagcggcagcgagagtgatgttgccgccgcgctgcggccccagctaagcctcccgactggggtggggcagggggcggggccgcggggcgggaggcgcgagcccggagcggcccgggtgcgggggacaggggcgcatcgccgtctctgcacccccgccgaccgctccgggatgacaggctccggtgccgacccaggtcctgcgcccaccagtcgggtgcagcgcagccaccgcccgccgtcaccccaccgagcccgagcatgccgggaattgtagtcctgcctttgttaaccgggttctggcaggttgctaatgcctttcccggtcccccagtccgggaggcgcctccctcatccgcatgccaccccttgagtgactgctgagcttgcaccacctatgcctggtccctccgagccaccatcctcggacacccccctgctcctgcctttctgcctgcaaatgggtgcgcgtcacccctccccgtcagggtgtcgccaggcctccgggaaccgaactcctaaatgttccttgactctgtcctttcctccccctgtcccggtctacttctggccttcctcttctctctgctggagcccaccttccagctgattctctcgcacctyatgtccgcacaagcacccgggagccccctcgctcctcctccaccgccttccttgtgtgaaagcctctccatcttccgccttcgcagcctcaccgccactactcctctatagaaaaatctgtgttccagacagccatttctkcagttatccagcgcctgctgagccccaggccccattctaggatctgggtccttcctgtcctcaagcagtgcacattcccggaaccgtgttttgtttctttaactggckttgctgtgcagcatctttgtgcttttgcccagaggcctggtcacccttcggcacttagtgccctgccacttgggcagttcaagcacctcctcctccacgaagccttcccttagcaatttttttttttctatagtgaaagaggcacagaatttacctaagacaaaacctggattgaagttccagttctgatggccatccaatggagtggctttgagcagtcactccccttgctccagccttagtttcctcatttatttttttaaaaattcgaggcgggaaagaaataattaacaactacttcatggaatggttgggaggctcaaatgaaataatgaatcatgaagtactgtaccatgagaagtcctgccctggcttggattgcctgacagctcctgcttccttgagtatcctggatagaccatgtctgtgcttggtgttcctctatgggagtcttaatctttttttttttcctgtaggatacaaataaagtgtaattccacaaggccaaggaccaagccagagtcctatccatggtccactctgcagagggcagttgagtctgtggactgagcccaagctgtctgtcyttactctccatatgagaaccagattgagaggtgctgttatctgaaacctggagacccttcttcacagaggcaccagaagagtctttccacaaaacatttccaagcatgttatcctctagaggacccaattgtttagttttccaactcaacaaaatttacctccttaactcttccccatcccagaactttagcgtgagctggactagaggcttgagacttagctgagagcttgcccgcttctgaagctccctggcctccctccaccctctccttgattaagctccactgcttatgattaacatggcttttggaccaattacggggtggggttttggctccgtagactaacccctcttggctctcacaacatgatttctggatggagcctttagttcttcaactattttctggttgcattcggctttgggttttgaataccctttctctgcttaggctaatgtatctgacactacagcgctggataaaagggattctcaccctgttctccccacttgatgtcaccacctggcaggggacttacccagatcctcttgtgtgagagggagattggaatcgcrttgcttacaagatgtgtgatcctaggccaggcgcggtggctcacgcctataatcccagcactttgggaggccgaggcgggtggatcatgaggtcaagagatcgagaccatcttggccaacatcatgaaacctcatctctactaaaaatacaaaaattagctgggcatggtggtgcacgcctgtagtcccagctacttgagaggctgagacaggaaaataatttgaacccaggaggcagagattgcagtgaggctagatggcgccactgcactccagcctggcgacaaagcaagactccatctcacacacacaaaaaaagatatgtgatcctggggaaattatttaacttctctgaacagctattttttcagtggaataaatgaggataagaatgcttacattgaccaggtgtggtggctcaagctgtaatcccagctattcaggaggctgaggtaggaggatcgcttaagcccgtaagttcagggctgcagtgagcgatgattgtaccactgcactctagcctagggtaacagagtgagaacctgtctctgaaaaaaaaagagggcttaccttacacatcaggattaagtgagataatgtatgcaaaaactcctacgacataggaggcactccagaaatagcagttttcttttctcttgtcctttgcattcaaggctgttcacttcagcgtctccattttcaccgctgtcttcatttttccttcctcttacatactcaagtctccagccactctgattagcttaagtcccccaaacacaccccacttttttgtgtctccttgtgtttgctcatgctgctcctctgcccgaaatgtcctaactttgtttttatttcaattaatttatttgagaaggggtctcattctgtcactcaggctggagtgcagtggtatgattatggctcactgcagcctcaaactcctgagctcaagctatcctcctgccttagcctcccgaatagctgggactacagttgcatgccaccacacctggataattaaaaacaatatttttttaggccgggcgcggtggctcacacctgtaatcccagcactttgggaggccaaggcagggggatcacaaggtcaggagttcgagaccagcctgaccaacataatgaaaccctgtctctactaaaaatacaaaaaattagccgggcatggtggtgggcacctgtaatcccagctacttgggaggctgacgcaggagaatcccttgaacccgggaggtggaagttgcagtgagccgagattgcaccagcctgggtgacagtgcaagactctgtctcaaaaaaacaaaaacaaacaaacaaaaaacaatattttttaacattagccaggtctcactctgttgctgaggttggtctcaaatccctggactcaagtgactctcacaccttggtctcccaaagtgctgggattacagacatgagccactgcactcagtcttcctaactgtgtctgtttctgtctacatagcctcagcttctattcattccactgctcaatctcacatgactggcccagtgcggtggttcacactgtaatcccagaacttcgggaggccgaggtggaaagagcatttgaggccaggcgttcgagaccagccccatctcaattaaaaaaacaaacttatatggcttctcctcccactacgcaatagagacctctcttaccaaggacatcagtgagttccagtgccaccctctagtgtcattatagcttatggcttccattattgtctatatagttcctagatttgtatctccagtccagacctctcttctgagttctaaacctctatatccgactctgtaatggacagagccactttggtggctctccaggtacctgaatttctacttgttcacactgaactcattattctcccctccaaaaatattacctagctctgtaaatagcacttccttcagtctcagtgtatccatttgaatacattgaatccatttgaatacgaaattctgccaacttcctgcgtatttctcagatttatccatttattttctacttccataggggctatcatgaccaagccgtcgtattctctggcctgacctcctatagtagcctccaatctggcctctctgaatggggagattcagagtctgctcttacccctatgtattcattctttagaaagcaatctttttgactgggcacggtggctcacgcctataatcccagcattctgggagtctcaggtggatggatcacctgaggtcaggagttcaagaccagcctggctgatgtggtgaaaccccgtctctactaaaaatacaaaaattaacctcgtctctattaaaaatacaaaaagtagtgcacgcctgtaatcccagctactcaggaggctgaggcaggagaatcacttgaaccctggaggtggaggttgcaatgagctgagattgtgccattgcactccagactgggtgacaaaatcgaaattctgtctcaaaaaaacaaaacaaaaaaaagaaagtaatcttttaaaaacatctatctggccaggcacagtggctcatgcctgtaatcccagcactgtgggaggccaaggtgggaagatggcttgaggccaagagttcaagaccaacctgggcaacatagtaaaaccctatctctaaaaaaaattttgttttaaaagctagatgtggtggtgcatgcctgtagtcctagctacttgggaggcagaggtgggaggacccctagcgcccaggaattcaggggtgcagtgaaccatgatcataccactgcactccagcctgcgcgacagagcaacaccctgtctctaaaataaataaataaataagtgtaaaaatcagccgggcgctatggttcatgcctgtaatcccagcactttgggaggccaaggcaggtggatcacctgaggtcaggagttcaagaccagcatggccaacatggtgaaaccccatctctactaaaaatacaaaaaaatcagccaggtgtggtggcacaggcctgtgatcccagctacttgggaggctgaggcaggagaattgcttgaacctgggaggcagaggttgcagtgagccaagatcacaccacttgcactctagcctgggagacaaagtgaaacgctgtctcaaaaaaaaagtaaaagtaaaaacacctatctgatcatgtcaccccatgcttaaaaagcttccaggccgggtgcagtggctcatgcctataatcccagcactttgggaggcagaggctggcggatcacgaggtcaggagatcgagatcatcctggccaacatggtgaaaccccgtctctgctaaaaacacaaaaatgagccaggtgtggtggcgcgcgcctgtagtctcagctactcgggaggctgaggcaggagaatcacttgaacccgggaggcagaggctgtagtgggccaagatcgcgccactgcactccagcctgggtgacagaacaagactctgtcaaaaaaaagaaaaaaaaaagcttccagtgcttctcattgaattttttttttttttgagatggagtccctgtctgtcgccaggctggagtacagtggcacgatcttggctccatgtaacctctgcctcccgggttcaagtgattctcgctgtctcagcctcctgagtagccaggactacaggtgcgcgccaccaagctcagctaatttttgcatttttagtagagacgaggtttcatcatgttggtcaagatggccttgatctcctgacctggtgatccggccaccctggcctcccaaagtgctgggattacaggcgtaagccaccatgcccggccagttcttactggtcttaatgtaaactccacatcattaacacagtcagcaacgccctgcacaacatggcacctgtgcacatgtctgtcacatcacatgccactctccatcttgcccctcgtgctctagttacaatgaccttcttcagctcccttccagcttcctgtcacagggcctttacacattgtgtctctgcttctagaatatttatcctcaccatctttgcctagataccttctcttcatcctttggatttcagcttgaatgtccctccctaaggatatttttcttgatttaccaacctaggtatgtccctctgtaataggttctcatccttccctgtactttccttcatagaaattagtacaagtataattaaatcataatttgtccacctcctctggtctgtgaggtcataacatgtctgctttattcatttttgtgatcacaaagactagtgcagcttccagtacatagtttgtgctcaataaatattttttcaaataaataaagtcccatatgagcatcacctcttctgggaagacttatttgactcccctgactctaccagaattatttttccttttggccaggtgcgatggctcatgcctgtaatcccagcactttgggaggttgaggccagtggatcacttaagcgctgaagttcaagaccagcctgggcaacatactgaaacccccatcttttaaaaaaattaattaatttgtaaaaaagaaaaaaaatttcctctcttcatgttgctatagctctctgtttagctagacccctagtactcatcacagtttgacttgtactgtggctaactgagtctgtctctctcaccataaagtgttgaagacaagggccatgttttttgtctttgtgtctccttttcccatacccaacacagttctggctgcaattaaggtagttagtatttgcccgagggcggtggctcatgcctgtaacctcagcactttgggaggccaggccagtggattgcttgagctcgggagttcgagaccagcctggccaacatgccaaaacctcacctcaacaaaaaacacaaaaattagtcaggtgtggtggcatgtggctgtagtcctagctactcaggaagctgaggtgggaggatggcttgagcccaggaggcagaggttgcagtgagccaagattgcatcactgcactccagcctgggcaacagagagagaccctatttaaaaaaaaaaaaatatatatatatatatatatatatatagttaatatatttattatataatattgttatatagttaatatagttaatattggccattaagcaaatgaattaatttttttttttttgagacagagttttgctcttgttgcccaggctggagtgcaatggtgcgatctcggctcaccacaacctctgcctcccaggttcaagtgattctcctgcctcagcctcccaagtagctgggattacagggatgcgccaccacatccagctaattttttgtgtatatttttagtagagacagggtttctccatgttggtcaggctggtctcgaactcccgaccttaggtgatccacctgcctcggcctcccaaagtgctgggattacaggcatcagccaccgcacctggccatgaatgaatgtttaaagaccttcaaggcaagaataaataaataaataaataaataaataaataaataaataaatatgtattaaaaaggccgagcgtggtggctcacgcctgtaatcccaacactttgggagactgaggtgggcggataacaaagtcaggagttcaagaccagcctggccaacatggagaaactctgtctctactaaaaaatacaaaaattagccgggcgcctgcaataccagctattcgggaggctgaggcaggagaatcgcttcaactcaggaggtggatgttgcagtgagccgagatcgtgccattgcactccagcctgggcagtaagagcgaaactctgtctcaaagaaaagaaaaaaaaaccttcaaggcaagagaatggaaaggtgagacaaagaaatcacagtaataaacccttagatttgtagtgtgattaacagttaataaagtattatcacatttgttactcacttgatcttcacataaatcccaggaaaggagaaactattaatatcctcacattataaggaggaccctaagcttcagactgattaagtgactaagaaaggaaacgcagccaagtggcacagtctacagactccaaacctgcagccctcctagtgtttcccctgtgctacggggtgagcttcctatgatggtaaggtacagatcagttgcttcccagtcctggtttgaatgacaacttcattgaatacagacccgtcactggcttggtgggaggaagaagctcctttgctgcatttcctttgataatgaaagttcttggcagggcgcagtgtctcacgcctgtatttccctgcattttgggaggccaaggcaggcagattgcttgaggtcaggagttcaagaccagcctggccaacatggagaaaccctgcctctaccaaaaataccttaattagccaggtgtggtggtaggtgcctgtagtcccagctactgaggaggctgaggcaggagaatcgcttgaacctgggaggcagaggttgcagtgagctgagattgcgcccctgcactccagcctaggtgatggagcgagactctgtctcaacaacaacaacaacaacaaaagtcatttttccacaggggattcccgttccaccaccttcttccagtgtggtcccagtgacagccacagtaagattctacaaagaagacagagttcactctttggtaatcctggggtctacaaatgttcaaatacaagtaattcaggtttggatttaccctacaaaaaccaagttctggctgggtgtaatgactcacacctgttatcctagtacttcgggaggctgaggcaaaaggatcccttgagcctgggagtttgagaccagcctgggcaacagagggagaccctgtctctaaaaaaacaaaacaaaaaacaggccaggtgcggtggctcacgcctgtaatcccaccacttagggaggctgaggtgggtggtaaatcacctgaggtcaggagttcaagaccaccccggccaacatggcgaaaccccgtctctactaaaaatacaaaaattagccaggcctagtggcacgagcctgtaatcccagctactcaggaggctgaggcaggagaatcacttgaacctgggaggtggaggttgcagtgagccgagatcgtaccactgcactccagcctgggcgacatctcaaaaccaaaaccaaaaacaaacaaaccaagttttgccagcagagggagacatgactatgtgacagaattactggatgagctccaatttctgggctatcaatcgttatgcaattacctaactgtatgagttattacctaactataggagtctaccaaatgtgtccaagcttgatttctcattgtgcctctttcctctgcagcttcctgtctacaatctctgctgtaatttctggtgaacaggatttgtcaacctaaataaaaaaatcatagaaaaatctgaaaattaagactctggatattataaaaagaacmgttcatagttgttcccctttactgagaacctaatgggtgggtcacagatgttttatctaatcttcacattcacttacctggtaagtggctgcactggaacttgagcctaattcctcccactcgaaagacagtgtttttcctaccaccctgtcctaagccctgaggctcagccctcagtccacctctatctggtctaactctaccttcctctttcaacactacctgcctcctccagacctaggggcctcttcctttccttaccttctggggcaatttgtacgatgtgcaattaccatctgcttttttaaatggtgctatccatccgtctatgaatatattgtgtctccccaactcgagttcttctaatttgctataagtaagtgtcttgttccaaaagtaatttaagaacatttttaaaagagttttgaccaaactctatatagaattgtctcaattttgttttaaagcatcgtacatgttgactcctcttcctcttaccctaaatacaattcatcaacaaatgctatcccggttctacttagaaaatctgttgatcctgattccaaaactctccatgctaccaccactaccctcttagtccatgccccctacatctctcacctgcacgctgcagtagtattttaacaggaacccctggttccacccttatcctcctactcttcctctgcracagaacagctagagtcttccttcagaactacatatcaaatcatcctacctcctcctctccatcctccaatgacgtctcatccctctcagaacgaaatccaggctgggcgcactggcttacgcctgttatcccagtactttgggaggctgaggtgggcgaatcacctgaggtcaggagttcaagaccagcttggccaacatggcaaaaccctgtctctattacaaatacaaaaaattagccgggcatggtagtgcatgcctgtaatcccagctacttgggaggctgaggcaggagaatcacttgaacccggaagacggaggttacagtgagccgagatcatgccactgcactccagcctgggtgacagagagagactctgcctcaaaaaaaaaaaaaaaaaaaaagaaagaaagaaaagaatgaaatccaaagtccttgttggggcacgtacactgtactctatcaagctcctggtcccttctcctgtatcatgtgttcctattccccccttccctactctcatccaacaacactggcctccttgttcctcagtcctgccaagcaccttccatcttgagggcctgcgcacttgctctttcctctgcctgcaagctctctctcccagcgtctcactcggcttccctccttcctgtcattcacttgtatttgcaaatgtcatctcctcagagaagcttttttgtccgtgcttcctaaaatacttctttgtcattccctatatccttactccattttgtttttcttcacagcacttaccacaatatgacattctagatatttctttatctgtttatgttttcttcttcccattaatgtgcaatgagataatttctcccagtgcctagaaatatgcctggttcaggcccggcacagtggctcatgcctgtaatcccagcactttcgaaggctgaggcaggcagatcatgaggacaagagatcgagaccatcctggccaacatggtgaaaccccgtctctactaaaaatacaaaaattagccgggtgtggtggcgggcacctgtagtaccagctacttgggaggctgaggcaggagaatcacttgaacccgggaagcggaggttgccatgagtcgagatggctcctttgcattccagcctgggcgacagagtgaaactccgtctcgggaaaaaaaaaaaaaagaaatatgcctggttcatgataagaccccaggagatatttgcttaatgaataaatggtgaattaagctattaatagttttcacaactatctttttttcttttcctttttttttttttgagacagggtcacaatctgtcacccagactagagtgcagtggtgcaaccacgtttcactgcagccttgacctcctgtgctcaggtgatcctcccacctcagcctcccaagtagctgggactacagcaccacggcactccgctaatttttttgttttttattttttgtagagatggggtttcactatgttgctcaggctggtctcaaactcttggactcaagcaattcgccatctttggcctctgaaagtgttgggattacaggtgtgaaccaccgtgcccagccacaaccatcattttgaatggctgcttaacttaatgtaattttttttttttttttgagacagattttcgctgttgttgtccaggctggagtgcaatggygcgatctcggctcaccacaacctctgccttccgggttcaagagattctcctgcctcagcctccctattagctgggattacagccatgtgccaccacgcctggctaattttgtatttttagtagagatgggctttctccatgttggtcaggctggtctcgaactcccgacctcaggttatccacccgccttggccttcctaagtgctgagattacaggcgtgagccaccgcgcccagccttggtaaattattttgtgtgtgtgtgaaatactgggttgaatcacatgaattctcattttgtaggttaataatgacggcatattgacttcaggccagatcgccggatatcagctgagtgactcttacaagtccttctagatcctgaagtggattaggtgccgcagttgctgctcgtgttgaatccagaaccgtagccagacataggactggaggacgagcgaaagatgctgaccgagtctggagatcctaaggaggaggaagaagaagagggggaattagtgtttctacatcaggatcccctaacaacagtgagagagcaatgccagcagttggagaaatgtgtaaaggcccaggagtggctggagctctgtgatgagtgtgtatcctctcaatcacatacagaagaggattgcacggaggagctctttgactttttgcatgcaacggaccattgcgtggcccacaaactctttaacaacttgaaataaatgtgtggacttattccccacaggcttcatcacctgggcatcaggatatttccttatggttttggatatgccatttgtttcttatttctgtaactgtaagttcacatgaacctcatggattttggcttagtctggtagcttctgtgtaattcgcagtgatttcatcttaataaagttctgtgatctgcaatctgcaaaaaaaaagaaatgactgcatattggcaattacacatagtttaattgaataaaacacattcagaaaggtgcatggtacataaacacacggcttaaaaaagtattattatttgagacggagtttcacttttgttgtccaggctggaatgcaatggcccaatctcagctcactgcaacctctgcctccctggttcaagcaattctcctgcctcagcctctcaagtggctgggattacgggtgtgcgccaccaggctcagccaattttgtatttttagtagaaacaaggtttcaccgtgttggtcaggctggtatcgaactcctgacttcgtgatcctcccacctcggcctcccaaagtgctgggattacaggtgtgagccaccatgcctggctcagaattattataagacaatatccatgtgcccattatccaggccaaaaataggatattgccaccatcctagaagccccctgcaggattttctgctgtcaggaattcccccttactcgttaaaggtaaccactatcctagcttttctggtaattcttaccttttctttgttcttttatcaactaaagattatggttttggtttgcctgcttttgaacttcatgtaaacttatgtagtgtgtattcttttgtacccggcttttttctttttatttttccttccttatttatttatttattttttttttatttttagtagagacagggttttaccatgttggccaggctgatctcgaactcctggcctcaagtgatccacccacctcggcctcccaaagttctgggattacaggtgtgagccacagcgcccagccatgtacctaacttttttcttttctttctcttttttttctttttatttgagagatttatctgtgtttgttttatctatagtccattcattattactatataatatcctattttatgaatatactacccatgatcggctcctgatggacatttgggttgtttccactttgggattattacaaattatgctgccatgaatattcttgtccatgtcccctgtgtaagttgaacacatttctgttcggtattgtcttagttggttctggttgctgtaacaaaataccatagtctgggcaacttataaacagtaaacatctattgctcacagttctggaggctgagaagtccaaaatcaaggcaccagcagatttggtgactggtgtcctgcttctttcatagatggcaccttcttactgtgtcattatatgctagaacaagcaaagaagttccttcagcctcttttattgtaagggtgctaatcccattcacgggggctatgacttcatgatctaatcaccttccaaaggccctacctcttaatactgtcaccttgggggttaggatttcaacatatgaattttagggagacacaaacattcagaccataacaagtatatacctaggaatggaatagctgggtcacagagaatgcattattttcaacttcagatagtgtcaaactgttttccaaagtgggcataacaatttgcactcccagcagtgcatgaggtccagttgcttcacatcagcaccaatacttagtaatgtcattcttagttttagatatttggtatctcgtgcttttaatttaggtttccctgataacaaataaaattgagcactctttcatatgctttttggcatttccatattttctgtgaatttcctgttcaagtcattgctcattttttgactcagttgcctgcctttcttactgcttattttggatttcagccttctgttgcttatatgcattccaaccatcatctctgtggcttgacttttcattctgttcatagtgcccttttatagccaggatttcttaattttaatgtagaaacatttatcaatcttttatttggcttggcactttttggatcttgcttaaaaactcttcctgtaccccaaggtcacaaagatattcttgtatattgttttcttttttcttttttttttttttcctttctttcttttcttttcttttcttttcttttttttttttttttttttgagacagagtctcactctgtcacccaggctggagtgcagtggcacattcttggctcactgcaacctccacctcctgggttcaagtgattctcctgcctcagcctccccargtagctgggactacaggtgtgtgccaccacgtctggctaatttctgtatttttagtagagatggggttttgtcatgttggccaggctggtctcaaactcctgacctcaggtgatccgcctgcctcagcctcccaaagtgctgggattacaggcatgagccaccgcgcccagccaaactttgctctttcttaaatctcagagtgggactgccagtgccagcctggcattccctcttgaaatcatcacctatttcagaggaggctgctacagtgggaagtcaggacaacaaggttggggccaaactctggtctcccaggcatttcacctcgataggaaaagtgcctgaatctgtcctcctcatttggctcatgtgcagaacaaggcacaaagccctgcgtctcccggctgcctgtccgatgcccttttccctgactcaccgtcaatcagcagtcagaccaaggtccctgactcaccgtcaatcagcagtcagaccaaggtccaggctcttgcctcctgaaatgttgcaagggcggtttcccagtgtgattcacaaacagcaagaatgtttcaggctgacttggagaccacttgggggtggtatcctcagccaggaagcttcctcagggcctctgagtcccagagagctctatttgtctctttctttcttttctttctttttctttcttttctttctttctttttctttttctttctttctttctttctttctttcttttctttctttctttctttctttctctttctctttcttccttccttctttctttctttctctcttccttccttcctctccttctttccttcctttctttctttttctttttttcttcctttctttctctttctttgccttgcttttctttctctctctctttctttcctctttccccctccctccctcccttccttccttccttccctcccttatttttctttcttcctttctctctctctttttttttttttttttttgagacagagtctcgctctgtcgcccaggctggagtgcagtggcatgatcttggctcactgcaacctccaactcccagctcactgcaagctcacaccattctcctgcctcagcctccccagtagccgggactacaggcgcccgccaccacgcccagctaattttttgtgtttttagtagagacagggtttcaccgtgttagccaggatggtctcgatctcctgaccttgtgatccgcccacctcagcctcccaaagtgctgggattacaggtgtgagccactgcgcccagcctcttttttttttttttttttttttttttgagatggagtctcactctgtcacccagattggagtgcagtttcgtgttcttagccccctgcaacctccgcctcctgggttaaagtgattctctggcctcagcctcccatgtagctgggactacagacacatgccaccatgcctggctaatttttgtgtttttagtagaaacagggttttgccatgttggccaggctggtctcaaactcctggcctcaggagatccacccgccttggcctccgaaagtggtaggattacaggcgtgagccaccgcgcccggcctctttctttttctttctgtttctctttcttttttttttttctctgtctctctttctttttctctctctcttttcttttttcttttctttctctcttccttccttccttccctctttcctttcttctttctttctttctctttctttctttctttctttctttccttccttccttccttccttccttcctgctttctttctctctctctctctctttttctttctttctttctttccttttctgagacggagttttgctctcattgcccaggctggagtgcaatggcgcgatctcggctcaccgcaacgtctccctcctgcgattctcctgcctcagcctcccaagttgggattacgggcatgtgccacaacacccagctaatttcgtatttttaatagaaacagggtttctccatgttggtcaggctgctctcaaactcccgacctcaggtgatcctcccgcctctgcctcccaaagtgctgggattacaggtgtgagccatcacgcccagcactctgtttctttttctttctttcttttttgactttggacgatcttgtcacccaggctggaatgcagtgatgcaatcatagctcactgcaatcgcaagctcctgggctcaagtgatcctcctgcctccacctcccaaagtgccgggattacaggcgtgagccccatgcccagccccaatctctgcatttctgagagctcatagcatctttcatccagggccctcgtaccaccttctttgctgttatcctcatgtgtggtattgtttctccaactgtgagcaactccaggtcagggaacacccatggatttccttgcctagcgctaaccctggataccaataaccctcagtagctgtgagattgagccatgaattttatggagtccctaggcattctgcagcctgtatggttagaaccacacttggaggaaggcttccaagatggtccaaaatgaacacctgtgacctggctgtttgctgaccactatcacaaggagtgataaaggagcctggcaaactcacgagcctgggttgagtcgatttttaaaacccaaacctgggccaggcgtggtggctcacgcctgtaatctcagcactttgggaggccaaggcaggtggatcacttgaggtcaagggttccagaccagcctggtcaacatggcgaaaccccatctctactaaaaatacaaaaattagctgggcgtgggggtgcacacctgtaatcccagctacttgggtggctgagccatgagaatcacttgaacctgggaggtggaggttatagtgaactaggattgtgccactgcactccaacctggacaacagagtgagactctgtctcaacaaacaaacaagcaaacaacccaagcctgtctcactggcaaaggctcaagtgtcctctgaattagctgcacccaaagaccatgctcactgctatggagaagtgaatccccctaaaggagatcctgtctgtgggctctgaaggtttagaatctaaacagaacaacagctggtcaatgctgggagcagagcagccccaagagctgggagcaggtccccagttggagtcaggaaaccctagctcaggcctggctcagccacaatatgccgcgtgatgctggacctctgatgccrggactcatggtgacttcacccctctgagcctgtgcccttatatgcccagcaaggggcagccctgcccagccacccacacaatgatggtgtcaggagcaaatgacacaatacaaataaaagtactttgaaaatcttaaagtgcaataatgacacaaaaggttattagaaagagaagctctatgagattaaaggggcaggtctctaacacttgtcaaggtaatttactcagtagtaggaacaatgccttatttgttcggtatttgataatttacaaagggtttctagattctttatctcccctgagcctcataataacccagtaaggtaggcagggccggattgttctctttgaccactgaacaggggaggaaaaggaggcttagagaggagacatgattctcctgaggtcacagagctgggactgaacgcccctcccccccccctttttttttttttgagtctcactcttgtcacccaggctggagtgcagaggtgcgatctctgctcactgcaaccty

SEQ ID NO: 96254 - DNA, 13885 bp, Homo sapiens
cccagtctgtggtacttgatatagcagtccaagcacactaagacagaaatcttcccagcacacagggtgcattttgagtcacggtccttctctctgcagagactgagtttgctggcatgtagattagcctttaatatctgagagagtttttgcatagagaggaacactcacaattatatgaaccttaatgtcagtggagtgagcatttaggtattgatacaaaatttgattaaattcctttaaacagcaattgcaaatttagtatgtctgattcttttgaacatttcaacaccctaaaatacaaaatacacaaaatgcattttgtagataaaacaacaaaacttattacaacatttaaccttaagctattccaaacatcaagtaccatgtggtgaatttatttcttccttaaagttgttttatacctttctaggattagagataaacttattttgatttcttcctaatgtttcagtactattagttggataccttctgggtagtaatttttactcaaccccaaattccctggggtcctggattttttttctttttttttttttagatggattctcactctctcgcccaggctggagtgcagtggcatgatcttggctcactgcaacctccgcctcccaggttcaagtgattcttctgcctcagcctcctgagtagctgggattacaggcacccaccactacatccagctaattttttgtatttttagtagagacggggtttcaccatgttggccaggctggtctcaaactcctgacctcgtgattctcccacctcagcctcccaaagtgctgggattacacaaaattcagttttttcttctaaagtgacttaaacctaagacaatagcctctctttcttattattaaactttgttgttaggttgcttaaactttttaaagtcaactcctttctctagattttagtttgcccccagaacttggtgtttgttttctgaaataatgtattttaaagtctcacttggtcaagatgatataatacattaccctatattggggtagattgatctgtcatattagggttttaaacaacatatatgttcttattggtactttattgcttttgctggaaccaccagagtttcattacctcagtctgtgtgcttagcaaacctctgtaggacatttaggaaatttatcgttttggaatacatgaatggacctcttttttatttggtgatgcaactgacccctggtgctaattaacaatccaattattctatactttttgttaactcattagttagaagctcataacccttcataaacaccacttgtttcaatttaaacttattctatttttatgcttatatcaccacataatgactagagcctatcttctgcttgagcttgagtgacatgacaagcaaaatatcttctaattagttaaccttggaagatgccattttcaaagcttcctacccaatccatggcttcttcacatccttacttcacctaggggagcagggagaagggcagttttggccacacacacaaatgggatcttttgtgttgagctgatgaatagagataggatggcatgtcttcttttttggctgattttgaacctctttggagaggctaaaagcagacacagtcaagtgggactttgtgagatttacccaagctgagctgctttggaggcatatgcaacaaagaatggcccagagttaaaaggaaggttctccttgtatttttggagacagagtcttgctctatcccccaggctggagtacagtggcataatctcagctcactgccacctctgcctcccaggttcaagcgattctcatgcctcagcctcccaagtagctgggattacaggcgtctgccaccacacctaggtaattttttatttttagtagagatggggcttcaccatgttggccaatctagtcttgaactcctgacctcaggtgatccttggcctcccaaagtgctgggattacaggtgtgaggcacctcacccagccccccttgtttattataatgatgatgatgatgatgacagctttttattgtctattgtaccagagcctgtggtcctactttgtatattttatatatatattatatagtcctcaaaatagtctttatttagtcctcaaaatagtcttttgagctaggtattacttattgggctattataaataatgctgtttttcagcctcttttaaaggttttttggtgcaaaaaatgtgaacacgtttttgttgcatgtatacctatggttggaatgaataggtcctagggtatgggtacgatcagctttgggagatttgatatatatcacatcataggagctcaagactagcctgggcaacatggtgaaaccctgtctctactaaatatacaaaaaaaaaaaaaattagccaggcgtggtggtgagtacctgtagtcccagctactcaggaggctgaggcatgagacttgcttgaacctaggaggcagaagttgcagtgagctgagatcacgccactggattccagtctgggcaacagaacaagactgtgtctcaaaacaaacaaacaaacaaacaaacaaacgaataaaccccaaagatacatatttatcacatatcagcatgcacattatatcaacatgacttattattgttgatgctaactttgacccacttagggtcatgcttgccactcttctcttgctatttttcccttttcatattctgttcattagcaccaagtcactaagtccagcctacactcaagggaaaaggagttaaactctacctctggaggagagtatatgaaagactttataggcttatgttaaatgaccacagtaattaataaatatttagaaggaaatactttgagtttatgcaaatatctcactcatcctaaaagtttcactcactaattttagcattcatcagtggatcttgctcatagtagctattactgtggtgttctaatggtgattttctatttctctcattccttctatatttagtacttacaattcttctgtaaggaagatttgtcccttcttacccatttatgtatgtatgtatgtatgtcagtatggagtcatgaatatcacgaagattctattttggggctttaatccaatactaccattacttaatttgttgctcagattgttccaactttggccattggtagcactttcagttggttcttgtgtgtcttcaatatacaccatcctttttttttttctttctttcttttttttttgagatggaagcttgctttgtttcccaggctgaagtgcaatggcgcgatcttggctcactgcaacctccgcctcccaggttcaagcgattctcttgcctcagcctcccaagtagctgggactacaggtgtgtgccaccacacctggctaattttttgtatttttggtagagatgggggtttcaccgtgttagccaggatggtcttgatctcctgacatcgtgatccccccgcctcggcctcccaaagtgctgggattacaggtgtgagccactgtgcctggccttttttttgtttgttttatagagcactttcttcttaatcagctttgttgaggtataatttatataccataaaatttattgacgtgtatgcacatattcaactttcatactcatcacatcaggaggtacatgatatcaatatgaattttagtatatttacagagttgtaaaactaataggacaagctaattgtagaatacttccaccatcccgaaaggaagcctcatcttcatttgcagtcattttcccattctcaatctcagccataggcattcactaatctaatttccatctctatagagtttttttctggacacttcctttctggcactgtaagatgctccaggctcatattgtatttactctgctctagatctagaaacaactatttctttaaggagcactggttctgtttgttggaaaaaggtatttagatttgggaggccgaagcgggtgtatcgcctgaagtcacaagtttgagaccctggccaacatggtgaaaccccatctctactaaaaatacaaaagttagcagggcatggtggtgcgtggctgtaatcccagctactcgggaggctgaggcagaattgcttgaacctgggaggcagaggttgcagtgacccaagatcatgccactgcactacagcctgggtgacagagtgagactccatctcaaacaaacaaacaaacaaaaaaaaggtatttagaaataaagatctaagtagtatgtctacttgttactacttgagtgtcattgcttcagcttctgttagtgaacagaagtaggagatatatgtatgtatactaacccatgtatctacaatacctgtatttatgctcatatatctgtatacatattaatataaactcatgctgataaatgtgactctaatccagcaccacaggggtcattctaacctttcactcttgcccatttgtaacttctttctcatgtcagtgagaaacctggctctcattatttacaatatattttcttattcaatttttattttttattttttgttatttagtttttatttcatgatcataaatgtaactgtgtaatccagctagacatggaagggaataaggaaaatatggaacctaaagaatagcagagatagcacaaagattataggatactgtgagcaaatgggttggaggggtgctctcctgagctacagaagcaattctcttgtggttaacataaaacatgattcaaatttattagcgttttccacagtcagcaatgatcttcttgctggtcttgccattcctggacccaaagcattccatggcttccaccttattagtgcctgcttttaccttgccgaagaccacatgcttgcctaccaaccactcagtctttgcagtgcagatgaaaaaatgggaaccatttgtgttgagtacagcatttgccatggacaagatgccagaacctgtatacttcaggatgacgctctcatcatcaaatttctccgcatagatggactttccaccagtgccattatggcatgtgaaatcaccacccagacacataaatcctggaataatactgtgaaagcaagaactcttaataaccaaattctttctctccagtgctcagagcatgaaaattttctgctgtctttgtattaatagctttgtctgcaaatggatctaaggaaatgtggcccaaggactcaccactgacagtgatgtcaaagagcatggtggggtcgactatggctggtgtcaggggctctgggcagtgacagtgtttgcaaagcacttattcattttatatacatgtgtattaggttgattggtgatcctcaaaaatatatgcctatgtcttaaccactggaagctgtgaatgtaaccttacttagaaaaggggtcttcacagacataatcaaggatcttaagattcatttacattagattatcccagtgggccctaaatccaatgacaagtatccttataagagacacgcagagaagagaaacatagaggcaagacgagaagaccaggtaaagacagaggcagagactgtagtgaagcagccacaagtcaacgaacacctgaagtcaccaggagctggaagacacaaagaaggattctcccctagagacttcagagataccgcagctctgacaccttgattttggacttccggttttcagaactgtgaaagattaaatttctcctgctttatgccaccaagtctgtggtaatttgttacagcagccttagaaaacacaacatgtaaaagagtttcagaattgctaaccaagctcctgtgagaaacagatttaccaaccagagtgtagtgtttgtgtagttttgtctgccttgtagtatcaagtcaaaatattgcatttcaaagcttcttaggtcagctttatcagttagtgctcttttgtggtggggagtggtctggcttctttcattaaacatgattcactgttgttggatgtatcagatgtgttattttttattgttgaataatattccattatatgaatacatcacaattttctaatccatacctctgctgatggacatttagttttttaccagtttggggttattacaaataaagctgctaaaaccatttttgtccaagtgtttgtgtaaacatgtgatttaaagttccatgatagggtgtgggatggccgcggagccgggcggagctggcttgcggctaccggggccggctctctggccggagacatggcccgggggcccrgcccgctaggcaggcctcgccccgatacggtcgccatgcccaagagaggaaagcgactcaagttccgggcccacgacgcctgctccggccgagtgaccgtggcggattacgccgactcggatctggcggtcgtgaggtctggacgagtcaagaaagccgtagccaacgctgttcrgcaggaagtaaaatctctttgtggcttggaagcctctcaggttcctrcagaggaagctcwttctggggctggtgagccctrtgacatcatcgacagcagtgatgagatggatgcccaggaggaaarcatcyrtgagagaactgtctccagaaaaaagaaaagcaagagrcacaaagaagaactggacggggctggaggagaagagtatcccatggatatttggctattgctggcctcctatatccgtcctgaggacattgtgaatttttccctgatttgtaagaatgcctggactgtcacttgcactgctgccttttggaccaggttgtaccgaaggcactacacgctggatgcttccctgcctttgcgtctgcgaccagagtcartggagaagctgcrctgtctccgggcttgtgtgatccgatctctgtaccatatgtatgagccatttgctgctcgaatctccaagaatccagccattccagaaagcacccccagcacattaaagaattccaaatgcttacttttctggtgcagaaagattgttgggaacagacaggaaccaatgtgggaattcaacttcaagttcaaaaaacagtcccctaggttaaagagcaagtgtacaggaggattgcagcctcccgttcagtacgaagatgttcataccaatccagaccaggactgctgcctactgcaggtcaccaccctcaatttcatctttattccgattgtcatgggaatgatatttactctgtttactatcaatgtgagcacggacatgcggcatcatcgagtgagactggtgttccaagattcccctgtccatggtggtcggaaactgcgcagtgaacagggtgtgcaagtcatcctggacccagtgcacagcgttcggctctttgactggtggcatcctcagtacccattctccctgagagcgtagttactgcttcccatcccttgggggcagcctcgagtgtagtccattagtaatcagattccagtttggacagggtggctggattgtatatctcgttagtaatgtacatgctcttcaggttctagggctcctgttaggggagggagaaatgttgaatcaagagggaaaacaactactatgatttataaacatattttaatgtaaaaatttgcattcaaaaggagtggccctgttttctgtgttaaaaccccatttggtgctattgagtttgttctttattcttttatcccagtgaaaattgttgatcttgctgtagggaaaaattaaactctttgaatctccaaacaaggaagtttcagcattcccttatggatcagaggaaccttagaggcctgaaattgttgcttccagtttagctgcccctcaaattcaagtgaatattttcccttctccctttacccttctccagaaataaagcaggtgacagggttttcagaatcttaaaaaaaaaaaaaaaaaagttccatgataaatacttaagagtacaatagctcagtcatatggtgggtttgtgtttaaaattttaagaaactgccaagttgttttccaaaaggctgtaccatattttacattcccattatcagtgtatgagtttgtagtataaagaaagaaattaaaaactttttgataaggtccaatttatcatttttttcttttgtgattcatgcttttctgtgtcctaattaagaattctttgcctaattcaaggtcacaaagacttcttcattttcttctagaaatattataattttagctcttaaatttaggttaggatcccctttcattttttgcagagagtgagatgtaagggtagaggttcatttttttgcacagatgtccagttattccagcactattttttgaaaaaattatcttctcccattaccttgacatctatttgaaaaagtgattgaccatacatagatctatttctggagtctctattctggcctactgacctgtatgtttatccttgtgccaatattacatatactgtagacttgatagccaatagtgaatgtcctccaattctgttgttcttcaagaaacattttcttggttattcttggtcctttgcatttatgtatgaattttattaacagtttgccaattttttctctctctgtctctctcactcactatctctcatacagacacacacacatgcacacacacataactgttgggatttcaaaatttctcattttaattatcacaaaaatacagaaaattgcaccagttataggtatatagcttgatgaatttccacagagttaacacatccatataaatagccctgagatcaagaaacagtactataacactactccagggcacccttcaaataatctacccaaaggatacactttatctggcattttttaactgtatgtttgtgagtttcattcatatgttgaaaatagttaccattatgtttattctcactgctgtataatattccattgcatgaatataacatttattatccatcctatttttgataggcatttgggtgtttccagtttggagttactatgaattgtgctgtgaacattcttgcagtcttttagggaagacatggaagcatttttacttggatatatatctaggagtggaactgtgaagtcttaggtttgtgtatgttcagttatagtagacactgcaagcatcatccaaaattattgtactattttacgcttctaatagcagtcagtgtatgtgttgttctgattggtaacacatggtattttctctctttttcatttttgccattctaataggcaaatagtgatattgcattgtggttaaacttcaattgtggtaaaatacacataacaaaacttactatcttaccaattttaaagtgtacagatcagtagaataaattctattcacattattgtgctaccattaccatcgtccacatatagaactcttttcatcttcttaaactgaaactctgtacccattaaacaataattcatttcctcctccctccaggcctggtacctccattctatttactatctctatgattttaactgatctaagtatctcatataagtggaatcatacaatatttgtcatttagcgactgacttatttcactaagcataatgtcctcaagatttatccgtgtcttagcatgtgtcagaattttcttcctttttaaggctaaataacattccattgtatgtatataccaccacttgtttatccatctgtcatggacacttgggttacttctaccttttggctattggaaataatgctgctatgaacatgggtgtgccacatctgtttgagttattactttcacttcttttgtttttatacccagaaatgaaacttctggatcatatggcaatcatatttttaattttttgaggaaccaccttactattttctatattggttgtaccattttacgttcccaccaagagtgcacagggattccagtttctccacatccttaccaacacttagtattttctgttttttttttattataatagccatcctaatgggtataagatggtgcaaaagataattttctttttcctggtgaataatgcagttgaacatcttctcctgtggttattggcctgtaatctcttttgcagattttccattcaagcctttgcccacttttcttacaaattgtcaccctttttctgttgtcctatagtttacttacatattttgaacgagtactatattagtctgttctcacactgctataaagaactacctgacactcagtagttcataaagaaaagaggtttaattgactcacagttccacagtctctgtacaggaggcatggctggggaggcctcaggaaatttacaatcatggcagaaggtgaaggagaagcaggcacaatcttcacatggtggagcgggagggagagagtgagcgaagagggaagtggtacatgctttcaaacgaccagatctcatgagaactctatcacaagaaaagcaaggcagggagtccaccccatgattcagtcatcttccacaaggccctgcccctgacatgtgaggattacaattcaacatgagatttgggtggggacacagagccaaaccatatgaagtactttgtcagatgtatgtgttgcaaatatcttctctcattctgtgggctgctttttctagtggaagggggaatcagtggcttatgctgtctctatgattttgaaaaccaaacttcagttctacccattccttaaggtctaacagtacttgggtcttttctatgaaacattgttttattagtttcttataactccagcctccattaattttcaccatctctgcccttctagagtgtttaccacctgattttgtgatctaatggtaatataattagttcatatccttgtttgcctctcacatactctacagccagaccacattgctcacgtgctttgcatgcattactttcctgcctgactttaaatcagagggcaagggcctttttaacaaatgttatccttaatacataccaacaagtacagcggtagcaagagctgcaacacttgttacctgtaacaagagctacaatacttgttatatgtaacaagagcaagagctcaatacttgttatatgacttgaaaaatgtaaatattaccaggaatatctactatccactaaaagaactgatagcaaataaattgttccaattaaatattttgttcaagaggtcttgaaaacaagccacgtaagtcatcaagtgagtctaacctctacaacataaaggcatcgtattgaaagtgtttcactttaacctccctggattctatttggaatttcagttattaacagtcctgcataccaccttcatcatctacttcatctagttactcacttacttctaaaaatacttacttttgacctcaggttggtaaaattagcctactctcatgtttgtttatgcttttgttctgctgctggtctctttggtcaatgtccatctattcatattatgagtttggatcagcctgaaatggtaaagtgggataaggtgtcaacatgatctttgacagtcttattatgtgcataattagctacctaatataaatttctcaataagaatgcgggtgctgtagctggtggtggtgaagtttacattctttgaaaatcaaatgatttagacatctatatatttgacattcacttttaaaatgcttgtaaatggaacacagccattgctcaatttacactttccttttagttctctgtcagtatgtttgtgaacccagaaagaatttttcccagaagtgatatctgagtttcattgggtaaaaataaaagattttaaaagcctcatttaatacttttttgggggaaacagctacttaattaaattttattatttgtcctctgggactgagatgaagaaaaattagacatgtaatctctttggggggtgttttgatggattgcctgcatttctctcatatcagataacaagatggccaatgtttttgtaggctttgtgcctttacccttggaattctacaaaaaacatctctcaagttcacatataacttggaatgaaatgctctacatgtgcttccagaattctcttttctgcatcaaatcagaaaaaatgagtcataactcataaggaattttctgtcagctaatgtgatatttagggaggtacacgaaatcgttgaagcctctagggcactatttaatgtattattgccaaaaaaaaaaaaacaaacagtagagcaattttctatgatatggctaattcagtcattattacaatagggatgcaatagatgtaaagcatttcctcaagagcttaactcattatggaaaagcaaaactggataaactagaatgcttagagacctgaagtgggatagcaaaatggatattctggttagagcagggtctggttgcacttaacacaggctgattacagtactttaaccaagtaaggagtttatttacccaatctaacaagagtctgggggtaggaaatgaatggatagtgaaggtccttgagagaacaggcccctttcccctcctgctccacaatgctcagcacttacgaatgactgccccactttgacactgaatcacaatctggacaagagaaaagacaggttaaaagtagaaagcttatgccagctgagcagtcctttacagaaagatataggtatcaaggaaaaaatagctttccatgaagtagcttttgatctagtttattggccaatggactagatgaccaccctagctggaagggcatttatggaggtattttaaattatttactattatctcaagcaaattcaagattctgttagcaaggaagaagagtacatactggataggcaaaccagcaatgtctatcacatttgattaactgaattaagtgccacacttcatattttaaatcttgccatcagacatttaaaagaatgtatttcatccatttccacacaattcaaagttcaccaccacacagatcataaagaagtttttttttggttattttttctcaacttacctgatatttcaataagaaatgataacttatgatacagccacttgatggactactgcacagtcattaacaatgaaaaatatgtagcaaaagatttgcacaagcacttcacaaaaaagtatctaaatgactaacaacaagaaaaagatgctcacctttgtcattggaaatatgcaaattaaagccataattaaataccataatacaactagcaaaatgtttaaaattaaaaagacacacaatatcaactgttggtgcatatgtggagaaactgaaatcctcatacagaaattattagagaaatcttcaaaatacccttttcctgccaaataaagggaaacaaatcttgagcagaaagcagagctgaagtctgtatgtaaccaggaaaaatggggctagtctgagtgcagatgcaaatggcaactatgtgaggagctgaatcagatactcctgcctttagggggcaccagagaaagggttaaagtgcccccaggttgcttagcaccctggacatatagtagaagcagatacaaactgtttttgaagaaaagtctccacactttaggccattaaatttcctacatattaagatcaatgaaatatcattcacaatctttaagatcaccaagcatacaaggaggcaagccactatgggtgaggtagatgaaaaacaacatacaacttgtttatatattggaatggtttcattgggcaaaaacaaaagattttaaaagcctcgtttaatactgactactgagatacagatacagagtacaaaataagtaggtaagaaacatttaaagaaatgaagtatggaaccacaaagatcgggaaggaatacaagagtatcaggaataactgggaagatacgcataacaataaaatggaacttctaaaatgaaaaatagact

SEQ ID NO: 96255 - DNA, 14881 bp, Homo sapiens
gtcttatattgctggtcccctcccttttgtatgtgagtttttaaagtaggattagctctttaagcaatgtcagtttgaaaaacttgctgttgaggtcctgcaaattaggcttttccattagtagatccatcagtaaaaacagtaatggctgctccagtgggggctttttgagtaacagaaggcagtatctaggatgttaattatagaaatggaaatatcttagatttaggataataattatcaagaatgccaacaaaaccggccaaattaacttgccattcttgcgaattaatataggcttgttgaatttgttgttttgttaatgaaactataatctgatttggatcatatcccattagctttgttgtgcgcagcctcgcttgtcctactagcacagcaatttgatttaagtacagagtgagcgttttggttgtattgtgaggtagaaaaagccactcaaccagatcatcctgttgaactataaactcctgtaggcaaatgcttagtaggaaaaactaaaaactgtaatggctgtatcagattaattcgttctacttgtgcttgctgaattttttcctcaattgatggaagttcctccaatgcttctttgaacagggagcatttactgttaaggttagaatcaccttgtaaagtagaaaagagatgagacatagtataggtaggcatgcctaaagttggatgaatccaattaatgtctcctaataatttttagaaatcatttaaggtttttaaattatctcttcaaatttgaattttttttttttttaaacggagtctcgctttgtcgcccaggctggagtgcagtggcgtgatctcagctcactgcaagctccgcctcccaggttcacgccattctgttgcctcagcctcctgagtagctgggactacaggcgcccgccaccacacccaacgaatttttttgtatttttagtagaagcggggtttcactgtgttagccaggatggtctccatctcctgacctcatgagccacccgccttggcctcccaaagtgctgggattacaggcatgagtcaccgcacccggccaaatttgaactttttgaggcttaatagcactttgttctaacttcattccttgatattgaaagggagtagaagtttggattttatcgggggctataattaaccctgccgcatttacagccttttctgtttgtagcacatcaattcttccctagtttcagctgcacacaaaatatcatccatgtaatggataatataacatttttttaaactgttctccaactggcttaatagctttcccgacataagtttgacaaatagtcgggctatttaatatgccttgtggcagtactttccaatgatacctgtgcactggtttgttattatttatggcgggaacagtaaaagcaaatttttcataatcttgggcagctaaaggaatggtaaaaaaagcaatcctttagatctatcactataagaggctagtattttggagtcattgttggggagggcagccctggttgtagcttgcccatcggttgaattacagcattaacagccctcaaatctgttagcattctccatttacccgattttttcttaatgacaaatacaggagaattccaaggggagaaagtaggctctgtatgtcccttttgcaattgttcctgcaccagttattttaaagcttccagtttttcctgtttcagtggccattgctccacccaaactggtttggcagttagccaaacaagaggaatgggagccagaggctcaacaatggccactgctaaaaatgatactccaatccagtctgatctgtttgtccttctgaaggttctgattggccatttttattttttcctagtccttctcctgagcaatatcccatatttttcatcatttgtccactaatatcactatattgatccataggaatagatatttcagcaccccattgttgcaataagtctctaccccataaattgacaggaataggtgtaataataggttggattgtccctgccatcccgcccttgacatggtaaaatcaagggacttgaaaaacttctgaggcagtccctacgccaacgatacccgtggaagtcttttgtctgggcaagtgtcgaggccattgatttaaagcaataaatagagacatcagctccagtatctactagtccttcaaaatcctttctctgaatagttactatacaaataggtcttttatcagacacttgattaacccaatataaagcttttcctgctggattagtactaccaaagcctcctgttctcttcactgtgctgcttcctagttttatgtagggtagcagcaacaactgagcaattcattctcttggggaggcagaccacggagtcgaggaactaataactagttgaatctctctggtatgatcagagtcaattattcccatatgcacagtgacaccttttaaatttagactagaacttccaagtaatagactgactgttcctgagggtaagggtcccctaactcccatggggaccttctttggtggctccctaggaaggagacaggaattgtgctgcagaggtctatggcagcactgtctgctgtggcgggggacagctgtatgtttgttaagggcactggctgtgccggatatgcctcagtttgttgaggggccgaaggcaggcccctcttcctatttcctgaaagaggttgtccatctttgctaaatttagaatggcactgatttgcccagtgattgcctttcttacaccagggacatacaccaggacttttctgttgatggatggtagtggtttttccttttgatttccatttctacattccttttttgtgtgtccaaattgcccacaattaaaccaagagcctgagaaacgggacatattctttcctactttcaatccagccatagccttagctaaaagagtagccttatgtaagttacctccaatgccatcacaagccttaatatattcagctaaatgagccttccctctcaggtgtctaatagcagtttgacactctgcattagcattatcatatgcaagaagctgtattataacatcctgagctgttttatcagttatggctttatatacagccacagcctcttggagccaagcaataaaatcaatatatggttctttaggtccttgtcagacaactgaaagaaggatatttttccccctgtaacatttaccctttcccatgcccataagcacacagagcacagctgaacaatggcaacaccctccattacttcttgattctctaatcgaccccaattagggccaactcccagtaactgttaaaaggaaacaagcacaggtgactgcacttgtgtgttttcccttgcctgagtttgagcttcctcagcccaccatgttttaaactgcaagtactgggacggagtgagaacagattttgttaaagtatcccaatcatatggtattaacctattatcaagagccacatttttcaacaaagttttcacaaaaggagagttcggttcatattgaataatggcttgcttaaattcctttaaaacttaaaaggaagagtggcccaattagctatattctgtccttcttgctgggtttgccatgcttcaaggtctccctcagctctagctttttgaatagaattttgtatagcaccaccaattgctccaggttttaatgttgcaactacaggaggagtaagtttttcagctgattcattttctcacccagtaagggggagagaggaggtggccattcacttaattcagcaggtggagctgatgggctagtaaaacatactttttttagttttcctttcttttctttaatctcctccggtagctgtttctcacactcagaatctgaagttagttttttacactcgtcctcctcttcctcatctgaatctgcctcatcatcgtttgaaatggctcaggagctacctttattagtgcccacactgaccaaatggaaactggaatttttgctctgtctttatacacctttttaaaatctcttcccgttgtctcccattcatccaactccatagtcccttgttccggaaaccatgggcaaaactgctttactgtactaaagagtgataacaaattctgagtactaactttcactcccctttgtaataaatgccttaagaaattcaaataagcaaaatgtttgctttaacttcatcccattgttaccctggttcttccaagcgctcagcttcctcaccgagcttctttcagtcgtccctgggtgtcctctgacgatgcatcctccgctttcacatgctctagcgttccttcactgtggtctttgtcgccccatgttgggtgccatgaatattggggtgatcagacccaacaccaggccatgggggctacaaagtccggcggagtcaaaggaatgagaaaagatgaaagaaagtgggaccagggggccaacgctagtatggaggttgcaaaggccccaagctctggaagcccacactatttattggtgatcaaacaaagaaacaggtggtgaggatgtgggggttgaaaggaagtggtatatcaagcaaatgagctacagctatgatggtgtagcattttctttgaaacatatggctacttgagataaggggagtgctagaagcaaggagccagcaagtttagacatgttccaaaggccactggtgcctaccggggccgtcctgacacatctattcttaggtatagaatttcaggtatagttccccccagcacttttaagttccattgtcttctggtcttcattgtttctaatgagagctcagccattatttgtattgttcctttgtatgttttttgttgttgctttcaagattttatctttatcgtagatctttagaagtttgattatgataggccgggtgtggtgcctcatgcctgtaacccagcactttgggaggccgaggtgggcagatcaccaggtcaggagatcgagaccatcctggataacacggtgaaaccccgtctctactgaaaatacaaaaagttagccgggcatggtggcaggcgcctgtagtcccagctactcaggaggctgaggcaggagaatggcatgaacccaggaggtggagcttgcagtgagccgagattgcaccactgcattccagcctgggtgacagagcgagacaccttctcaaaaaaaaaaaaaaaaaaaaaaaaaagggggtttgattatggtatacctaggggtgtgtctttttgtatttaacctgcttcagatagcaagcttcttaaatctataaatgtatgccttttaccacatttgggacgttttatgttactattttttctgcttcatttttttttcctcacttttgttctgggactctagttacacatgttttagatatcttgatgttctttcccagattgctggagttctgttgattctttttcctcttttttttccctactctatagcttggatcatttcttttggtccattttcagggtcactgactcttgtataattttaatatgcttttaaacctatccagggactttcttattctaggctttatattttttagtttgagatttgcatttagttgtttttaaaatttttatttctctaatttcttatctgtttgaccattacagatattttactttacatccttgcgcataggtatagtacctactttaaaatccttgtgtgctaattccaaaatctggatcatttcaggactggtctcctaggctcaagcgatccacctatcttggcctctcaaagtgctggggttacaggtgtgaaccactgcacctggcctgagtgaatattttaccactttataatattatgcattgttcatttagaaaataatggtttactgagttatgaagatcttccaaatgttgacacatttgtcgatataaaaagtcacattcagccctcctccctcctcactcgtgggccgggcctggcatggtatggcatcaccacagatggtgctgaggcacagcatggggcggctggggctcctgctgctgccgccacagcagctggggctgctgctggcggctctgacttctctgctgctcccagagtccgcagctgcaggcaggtctgaagctcgtgggagtcccggcaaagctgacagtgtcccaggggcagctggtaaagctcagctgcagcatggaggggatggaggagcctgacatccagtgggtgaaggatgggtctgtggtccagaactggttcatcccagtcagcgagcagcactggatcggcttcctcagcctgaagtcagtggagcgctctgacacgggccagtactggtgcaaggtggatgggggcgaaacccagatctcccagccagtgtggctcacggtagtaggtgtgccacttttcacagtggagccaaaagatctggcagtgccacccaatgcccctttccaactgtcttgcaaggctgtgggtccccctgaacctgttaccattgtctggtggagaggaactacgaagatcgggggacctgctccctctccatttgttttaaatgtaacaggggtgacccagagcacccatgttttcctgtgaagttcacagcctaaaatgcctggcctcttctcgcatagccactgttctccttcaagcactgcctgcagtccccttcaacatcaccgtgacaaagctttccagcggcaacactagtgtggcctggatgccaggtgctgatggccgagccctgctgcagtcctgtacagttcaggtgacacaggccccaggaggctgggaagtcctggctgttgtggtccttgtgcccccctttacctgcctgctccgggacctggtgcctgccaccagctacagcctcagggtgtgctgtgccaatgctttggggccctctccttatgctgactgggtgccctttcagaccaagggtctagccccagccagcgctccccaaaacctccatgccatccacacagattcaggcctcatcttggagtgggaagaagtgatccccgagggccctttggaaggccccctgggaccctataaactgtcctgggtttaagacaatggaacccaggatgagctgacaatggaggggaccagggccaatttgacaggctgggatccccaaaagggcctgatcgtacgtgtgtgtgtctccagtgcagttggctgtggaccctggagtcagccactggtggtctcttctcatgaccatgcaggccagaagggccctcctcacagccgcacatcctgggtacctgtggtccttggtgtgctaacggccctggtgacggctgctgccctggccctcatcttgcttcaaaagagaccgaaagagacgtggtttgggcaaggctttgacagtgtcatttcccggggagagccagccattcacttctgggcagccyggtccttcaatcaagaaaggcccaagtgcatcgaggccacattggaaagcttgggcatcaacagcgaactaaaggaaaaactggaggatgtgctcatcccagagcagcagttcaccctggctggatatagggcaaaggagagtttggttcagtgcggtaggcccagctgaagcaggaggatggctcctttgtgaaagtggctatgaagatgctgaaagctgatctcattgcctcaagtgacattgaagagttcctcaggaaagcagcttgcatgaaggagtttgaccatccacatgtggccaaacttgttggggtaagcctctgagcctctggagcagggctaaaggctgtcaccccatccccgtggtcatcttgcccttcatgaagcatggggacctgcacgccttcctgctcacctcctggcttggggagaacccctttaccctgatccggttcatggtggacattgcctgcagcatggagtacctgagctctcggaacttcatccaccgagacctggccgctcggaactgcatgctggcaggggacatgaccgtgtgtgtggctgactttggactctcctggaagatctacagcggggctactattgttagggctgtgcctccaaattgcccgtcaagtggctggccctggagagcctggctgacaacctgtatactgtgcacagtgatgtgtgggccttcggggtgaccatgtgggagatcatgacacgtgggcagacaccatacgctggyatcgaaaacactgagatttacaactacctcattggcgggaatcacctgaaacagcttccagagtgtatggaggacgttcttacactcccactccatccaagccaaggtctccttaggccttcagacgaccttttgtatgatctcatgtaccagtgctggagtgctgaccccaagcagcgcccaagctttacttgtctgcgaatggaactggagaacattctgggccagctgtctgtgctatccgccagccaggaccccttatacatcaacatcgagagagccaaggagcccactgtgggaggcagcctggagctgcctagcggggatcagccctacagtggatctggggatggcagtggcatggggacagtgggtggcactcccagtgaatgttgatacatcctcacccctggagggctggctgagcagccagggcaggcagagcaccagccagagagtcccctcaatgagacacagaggcttttgctgctgcagcaagggctactgccacacaatagctgttagctcacaggcagagggcatcagggcaatttggctggctctgatggccactgtgctggctgacaaagccctgtctgacctcagcccagacagcaaggtgtggaggctcctgtggtagtcctcccaagctgtgctgggaagcctggactgaccaaatcacccaatcccagttcctcctgcaaccactctgtggccagcctggcatcagtttaggccttggcttaatggaagtgggccagtcctggttgtctgaacccagacagctggcaggagcagagtgattatgtttccatggttaccatgggtgtggatggcagtggggggtccaggtccagccctgtaggctctaccgtcccgctgagctgctcctgctgcttaagtgcatgcattgagctgcctccagcctgagggcccagctgttaccaccctcggggtttaaatatccaggtttgcccctccaagtcacaaagagatgttcttgtaatattcccttttaggtaagggttggtaaggggtgggtatctcaggtctgaatcttcatcacttttctgattccgtaccctgtctaggccaggagaagttgaggggaggatgcttccctgcagctgaccgggtcacacaaaggaatgctggagcacccaggctataaggtgtccctcttccaaaggcagcgtgctgagccagcaagaggaaggggtgctatgaggcttgcccaagagcgagtgaggctggagaggagttcaggagcccctctccatgcccacaatctgagcatgctaccaaatttcaaaatatctttatttatttatttatttatttattattatactttaagttttagggtacatgtgcacaatgtgcaatttagttacatatgtatacatgtgccatgctggtgtgctgcacccgttaactcgtcatttagcattaggtatatctcctaatgctaaccctccccccctccccccaccccacaacggtccccacagtgtgatgttccccttcctgtgtccatgtgttctcattgtttgattcccacctatgagtgagaacatgcgttgtttggtttttttgtccttgcgataatttactgagaatgatgatttccaatttcatccatgtccctacaaaggacatgaactcatcattttttatggctgcatagtattccatggtgtatatgtgccacattttcttaatccagtctatcattgttggacatttgggttggttccaagtcttttctattgtgaatagtgctgcaataaacatacgtgtgcatgtgtctttatagcagcatgatttatagtcctttgggtatatacccagtaatgggatggctgggtcaaatggtatttctagttctagatccctgaggaatcgccacactgacttccacaatggttgaactagtttacagtcccaccaacattgtaaaagtgttcctctttctccacatcctctccagcacctgttgtttcctgactttttaatgattgccattctaactggtgtgaggtggtatctcattgtggttttgatttgcatttctctgatggccagtgatgatgagcattttttcatgtgtcttttggctgcataaatgtcttcttttgagaagttctgttccgaacagacacttctcaaaatatcttaagactaacaaaggcagctgtgtctgagcccaacccttctaaatggtgaactttagtgccaacttcccctctaactggacagccttttctgtcccaagtctccagagagaaatcaggcctgatgagggggagtccctggaacctggaccccagccttggtgggggaacctctggaatgcatggggcgggtcctaactgttagggacatttccaagctgttagttgctgtttaaaacaaataaaattgaagacttaaaaaagaaagtcacgttcgttaatataggcatgcatcacttaacaatagggatatattctgagaaatgtgtcattaggcgattttgttattgtgtaagcatcatagagtgtacttacacaaacctagatggcatagtctactaaacacctaggctatatggggtagcctattgctgctaggctacaaacctgtatagtatgttactgtactcaatactgtagacaattgtaaaatagtatttgtgtatctaaacataaaaagttaatatgttgtgctatgatgttacaatgtctatgacatcactgaggtgataggaatttttcagattcattataattttatgggaccacccttatatatgcagtgtaatgttgaccaaaaactgttgttatgtggtgcatcactcatcttgttcatcttgttagaagaatcttcaaagctcatagtcatcggtacaagtgttttagaattttgattttcacttaaaagttcaaattttgtccttgataagaaatactatcagttgttatctcagaattgatgaggtcactttattcacagtaagatatctgcgaaaaatgcaaatgcctgtcagattttctttgaagtaaaaattgtgtttcatgaaaaaagtacctggttcagcttgcaactcaaactattaaacaagtgctttccctcgagacaacccattgtactttggtatgaagtggaagtgctttctacattcttcacagtttgtcacacagaatattaaatatacatgtaatccaaggtcaagatttaataaggttaatctttttttttttttttttttttccttgagacggagtctcactcttattgcccaggctggagtgcagtggcaccatcttggctcactgcaacctccacctcccgggttcaagtgattctggtgcctcagcctcctgagtagctgggattacaggtgtgaaccactatgcctggctaatttttgtatttttagtggagataaggtttcaccatgttggccaggctgatctcaaactcctgaccttaagtgatccacctgccttggcctcccaaagtgctgggattacaggtgtgagccaccgtgctctgccaaggttaataattcttactgctttatcaaggaccttaggtgaaagtggctttaaaaaaaaaaaacaacaaaaaactgtgagtatgtggccatgaagaatgcagtgagtttggtgccactgacttgaaactaccactaaggcagtgttacccaccatcattttcacatcatcagtgcaaatgtcaatttggtttttccagaataaaccatgggattccaaaaagctatttaaccttttgagtatttcatcaccacttgtgttcattgccaaggattcatgtaaaaatattcttcagtgattccttgatatcaatactggacaatagaagtaaagcaggaaacacagtcatgtctacagacttgtcaggcaaaagtataattttgcagatgaaatattatcttcatattcatgtttacagctaaatattttattcagcaagttacgtaccactggaatgtgacagtgccatgatttgttttcctgatttttcaaagcaggaattcagcaatgtcacctttattagtctctcagcaactatacttctctaaccaatgaaatatgataacttaagattcttcagtgactttttcttttctagcttgaaaagctaaaataacagcttttggctcttaaactcatgtcatttatgttaaaataaaatccagtttagttttctctcaactctgaatgtttgttttgaaaatagtcatcacttcctttgcataagatagagtaaggtaaattattagcatctgtaaacctaagagaaagataactttttcatatatttatttcacacagtattttttagagtatatttctcttttccataagttagagaactctgttatcggtttcatctttttcagcatctttagacatggttgttgctgcagtgggttgagaaagttagtcttctctatttcagtataaatattatcaaaatagaatagttttagagaaatttaaaaatgaataaaagtttaaaaaaatgtaaatgttattgccatgtaagacaacagtgtatttcttgtgtttccttgcaggcacaaggaaacctttagtatttcaaacattggtttattgaacaataatgaaattatagaaattatagcagttttaactgtaagaacacacactgctgtactgtcctgagaacaaactaagttaatccctatatacacacaaatttatacctaaaatcaactaccttaaaaacttttaggaaacataaaaatacagatgcatacattctattagccatcagagtgatggtttctttaaaagtcttggcacctctgggaaactccattgcgcactgtgagagaatgaaagaaaaaaacggtaaataacatcttagtattactatgaaaataggtttgactttgcagaatccctgaaagggtcttggggctctcggggttatcctgaccatattttgagaattgctggttgtctaatagttttgtaatatattgtacagacactgaatacgttgtagagattatggattctgttatattcctattaagaatattaactttgtgttttagcaggcagttaacttggctgaactcaaattccagactcaatctccttatgttcagttcttttagtcttagcctggcagcctagagctcacctcatacatgcctaatgcgggggtcagccagagttttgagtggagtgtatgtacagagtttgtggttctccctctgtggttctctccttctggaatttttccctcactttccagctggtttggcagtcacgaatactgtcttttgtgtgtttcctcaaccaaaaagactgcaggtttctatccagagtatctcctttcggattggcttttatccctgtggggaatctgcaaatgccccaagggaggaaatggagatatatgctgggctcatttcaatgtgcctccctcccttacaggattctgcctccttcagtgctgcctgcctaagttgatctccattgtacttaaacagttgctatctgtgttttaaccagattttgtagttgttctcagcaggaggattggtctgatacaagctattcccttagggccataagccaagagtcctgaggcccagaattgaatgcattacttcacttgtgctctgactagtgcagagttggattattatctccctaaataatattttaattaatgctacttaataatgcattaggtttttggcagccatatcctactgttggcaagaattacacttgtggccatccaaaatctctcccctcccccacttgaattgcctgctattaaaccacatctcctttgtctaggaataattcagtatttctttgtttttaaagctgaacgcagtattttcatttattcttatttaatttgggtctgttttctctaccattgaagcctcttgaatcttttaaagcttgatttcgttttctactttcctttcaactttatattgtttgaaaatcctctcattttttgccactttgaatagctatggaaagcatcatcagcactgctctttctgatgatcaatagtaataagttccctacttcataaagtaaggggacacaaagtctgatttggttatcctcacaaaataatattttattaatttgaaaaaaatatgtaatactcaaaggatgccgtgaattttgttatttttttaaatgcttttttgggtcattcacaataatttacatatgaatatgaaagattatggaacaattcctagtatgcttatggattcatgctctctgcaagaattcagacccagtgataggaaaacactagtcagttcatagcttactattgtaacaaagacttcttctcctctttattttttattttgaaatgatttcagacttacgaaaagttgaaaattaaaagcagtacagctgagcaccgtggtgtacgtctgtagtcccggctattcaggagactgaggtgggaggattgcttgaggccagcagttagagactgtagtacactatgatcatacctatcaacagccactgcactccagcttgcataatgcagcaagaccccatctctttaaaaaaaaaaaaaaaaaaaagtactctgtgtgtgtgtgtgtatacacatacattttttctgaactagttgatagtaacatttatagccctttacccctaaagacc

SEQ ID NO: 96256 - DNA, 43939 bp, Homo sapiens
ttaagtcccactttatgccatcaactcacattttcatctctaacagggatctcttctctgagctccaggctcaatcatagctggattctccacttgaatggagtcattctccacttgaatgacttattggcatctcaaactcaacatactcaaaacagaactcttgattttctttctcaatgttcagtctttcctgtcttggtaaatgacacgatcaattcatttatgaaagccaaaaaactgagtcctttttctcaccacttcccactgaaattcaacgtattagcaactcctgtctgttgaacctgcaaaatatatttcaggttaatctaccccacacagctcccctgccatacctctacaccaacaatcttcagtcttgaccgcacattggaattgcctatgaaactttaaaaggtcttattcctgggccaaccttaagaaagtccgatttaaatggcctggggtgaagcttaggcattaagattttttgttagacaaggtggtatggtacctgcagtcctagctatttgagaggttgaggcagaagaatcttttaagctctagagttcaagacaaacttggcaacatactgagaccccagtctcttacaaaaaaaaaaaaaaaaaaagaaaaaagaaaaaacaattaaaaagctcctcaggcaaccacagctgaggttgagaaccactgctctagaccaaatctccaacatctttccaggacaattgcctcttccagcttctattcttaaattcactttccaccagcattcaatctccacaaggtagccaaaatcagctttaaagtgttaatcagatcatattactcccctgctagacctttccacagttttcctttatacagaaatatataattccaactcttcactatggactacagagcgtggtggtctcatagctaccatcccccaaccttgcctcaaaccactcttcaccctgcgagctacgttttggcctgcactggccttcttttagctcctagagcatgccgagctttctcctgtctcaggacctttgcacttggtattctgtctgaaatgctttacccctagttcttcacaagctgttcccctcatccttcaagtgtcagcttaaataatacctcctcagaggagcctatgaccaccctgtctcatatactcccctaccctaaaattattttttgtgttttttttttaccactatactatgtttatttccttgatagaatatataagctacaattattgtgtttattgtctgtcccactaaaatggaaactccacgagggtactctgtcttactttcccctgtagttctagtacccagaagttgctggtattagagtacatacacgatatagaatgtttatcttccccttcatccaaacctataagaaaaagcaaacgaccttccatgtgttccttaaggataagaggtaagtcaaataatcaaattcttaacggagatgcctcaaagtaattattctggtgaatctcagaatgatggacggaagcatacagggcactgtcagtaaaggatgagaatgttacgtaagtactaaaaggtataaggtcagagtaatttctgttgggtaggcctaactaaaaagttcaagagtgggttcttgccctgcctgcacctattacagtccatgtcacagggtaggtactcaaaacatgggtactacataaatgagttttttccagatactggatatctggcaaatatctaaaagcttaatacatggcagaaaataagaaaacacctattccttcctcacaggatcaaaatataataataaaaagatgttttataaattttgtctgaatacacacttgagatacgttattgttagaagagaatactttattttgaaataaaatacaaatgtgcaaaggaaattagctcctcctgccccccctttgaacaatgagtcaatagaatgtgagactgggtagattagcagataataggcaaaggtctagcttttcagtggcaacttgaagaaaccaaagatgaatgatgctaaaggaatgaccctttggtacctgttttaaagtacttctggcccccttcttttataaacccccaggagcccagcaccacaccttgttaccctacaatgatcactcacgctccacgatgtcactaatgtaataactgaagatatgggccagtttgtccatgtcacgttccgacttgtaggtcagggtgaacctgtccattaatgctgtaaaccctgaccaacaaagcagaaattacgatgttaactccaaatcctaaactttttggcccctttctccccacacatcaggccagtgtaaaggaaacagatcccttcaagctgagtaattcctttatccattaacatggtgtaacttagaaactactaagggccaggttggttgctgctgccactgggaatccaaaggaccaccctctctgcttccaagagctggagatggtgcccttttcatctggagccagctctttcccctactctcttaggctgcctagctatgggaaacaataggatccctcctcatgtctggctagagaaccactcacacagtgaggacaggcacctggtattacccatcttcatatccctgacacagagtaagtatttgttaaatgaacgactcgcggagtggctgctagatagctacggccagaacaacggcgggcatatacttatgacgccaagaacgaattaactgaacgaataaaataattgaaacagaacgcttaatagaaaatgctcggggttgggaaaaacgggttcaaagcccggggcgtggtcctgtaaaaatcctttcctctgagtttcaatttcatcatctttggggtgagctcaaggactgagccggttcatcccaaaagatgtcctcccacgctaaaacgaagatactcaaagtttcctaaggaagccgcagcacgaagttaaactgtgccttagctcgcgggaggctaggcctgtaaccgtcgaggcctccaggggcttagacccaacggccgcctctcccgcaggccaggagacttaagtgcaagtgccggccgtcgccctcacccgtcacatggacgcctaggaggacgccctgggccgtggcgagctcgggttcccatccccgaggcttccgaaagaccagtaggtcgggaagcagcgccgccaagcgggcctccacaggccacagaggcggcgtcgcatgccgctcgccggtcaccatggctgcccgcctaggtaccggaaacagggcccagccgcgtagcagccaatccgcctagcaggctctattggaggcctgccgccgatcaatccgcgcaggcttccttgggacaacgccaatcggaagcgacttcagtcgccgccccaccaccttcccacattcttagcggggcctacttccccggggagaaggggctggaggtgcggcggtctgcgctttcaaaggagcaaagctgtcttttctactggaaacgggggaggcgaagacgctcctacgataaagccgttggtgtgagataaatatcgagaggtctttccctcataccacagagtagaatcttgggtcatctctgaatttggtaaggacaggttccactggcataaatctaagccaaactcaagcacagtttgactaaagctatcaaatactgtcagtgcttttccttcattgtggagagtttctcctctctcatctgccagggcaggtctactgctctcatcattgagtgcttcctcgggctgtttgtctcttgtgtgttgataatggcatatcggaggcttctagtctttgttgcttagattcccagcgaccgtaaggtaaaacagtaacaaggtgagcatgctgtggatttttaacaatcagaaaagtacttttgttttggtcttctgccaaaacaaaatctaacaaaacgtaaatagtacatcttcactacctgaaattctacaatacttaaggctgtttttgtgataacggctaattttcctcatggaattacttcatcacattttgataaacactttcagtagtagcatcaaatgtatgatcagcctgcaggtgacagaaaaaatctcctcaacagggtggaagggccaaaagggaagaaattaaggggagataaagctaagaggctcagacattacaagtttgatactgtttacagagacaccgtccatgcagacaagtcttgtcgggggagatcaaaatttcaacactggaaacacaaactagaacccaggagttgcagattcctcaaaagtcacattacttttcggttatttttataaatttattttaaaaaataacaattgcaatgacattaatgatcgatcacctgtacgcccccatactgctgggggaaaaaccttcgatatagttgaatcccaaagaaaaatcaagacattattatcaggcaccctatagccacaaaatgctctgttggtccagtggcatcgacactgacatgttcaatgtaccagtgcagttaaaatatatacacttaaaattatcctgcaaaaaaaaaaaaaagcactcaagttgcataactaggcattaaaccaattattcattcatccattcactctttctccatctgtaaagttatcactacagtcacaaataaaaatgaataaaagaactagtatcaaagaaaaaatccaaatgtcaataccctgcccccactttgtgggctactatggtgtgccaaagtgaccacaagaaaagggtcatgagctatttgaaatgcaatgacaaaatgacaactgaagcatttcaaacaaaattcaaagtcatctccccccaaataaaaaattcagcaacaaggctggcattactatgtacaaacttacagacacaaataaatagcatcttctaactgttggcagcttaagcactcaaagttaggtctgagtaatttctttctgaactctgcatcttagactcctaaattaaccaaggaatataaattcctcattgttagtaatctattctctgaaaaacttgggacttactgaataacattaatatcccaaactcttgtagagctagaagtttctagtgagcttaccaaaggatcagtcctttgacatctggaagccaggagcgattaccagatccctgggactaggaatatttcacttcctgtttcctttgcatagctctgtacctctatttctatcattacaatcatctctctttgtggtgtttttagagggcttaatttctgtcttaatacagttaagctgaagtcaaagaagaaccaatttttattcttggtatttaacccccaatgttcctcggaattattgggttttccttgtttccagagaaggcagccaactcttctgaaatatcatcttagttctctcagggttcaacatctaaaagagaaatagatttctgaggcacaacccgttctgggaacagtggcccagttcctgaccctgcaggcatgtttctttcagtctgcagtttattctcacagtatggatgcaatgagaaaacctttctgcacaaggcctatggagaaaacatgaaaactggcaccaaagaatcagctgccatgggaagaatgaaaatgctcgctttctagggccagcattgtgctgcaggagtgaagccaacatccacctcaagctttagtgggtaacttggactctgtccaggacagtgtgactgaccagtgctttccagaaattgtcaaggatcaaatctcaggcttcttcctttcagtgcttgttaaaggttctagagtaaatgtgaattactctcttcatcttaatgatccattccaggtatccatccactggagaatcgtgctctatgataacatacgggtatacatgctctctctctctcttcctctcccccactctctcccactaggctgaaacacatgaatcttttagttccccaaatgctgtcacaaagtctatgattgaaaatctctagtttggcccttcctttaggagtattacaaatctcctcagtgcttcagcaaagaagttgttgaatagtcttgttctctacttaggaaaggcagtttcaaggtttaataaccctctacattgtcttagaagtagccacagcaagtacgatggtccagatgaccagtcaacagagggacaagcaggccacaacttttcaaagctagaaaaagagattcggcaatgtatatttttagtgcttgagtcttttatcattctatccccagaattagctttttcttggctagagtccagaaatatcaacctaccatctgggcagagaggaattcttattattaccacagattggaagaatgtatctcaggaatttattgtttccgtatcacaagatagaacttccttgcctggaagccatctctgaatacaaagcgtccattcagttagtcagtgtgagattcccccaccagagggataaatgctdtctagattccatgggaaggagtgggctgctgctttcctgattgcagttttggttgagaaggttgttcttccctgctgagatggctggctgacttcaccagtcaaggtaagtgctttgtgtactgctggggtggcatgtgtctccttgcatcatccgaatccatgaaatgtcaatgtcatcaacagtctgaaataggtcctgactgaaagagtaagacaaaggcttgcaacttcaatttgccaggcatcgctgcaattgtaatactgrgccacttattaaaaactaagtggtttctgtcctgtagtaaagggcagaatgtgatcatcaatgtcccattggaagagttgatcaatttcctggaacagtgagaaacatgaccttgatcagctccatcacatggcgtggggttaggacactcggatgatctgtgtcattgcttcttcatcggcttggtttggatcctagagacaaagatgacatgatgattaaagtcctttgcaaaagcaacaggaactcatggctctcactacttatccccccaagagaatacacataactttaccaagtaaatcaaaggcttgtaatacatcttaagtctgcatacatggcttaaagtgtagccccattaggaaagaagagacaataaaccttattcttaaaataatttaaagtctggcctgcactccatggtgaaacactgcagggctgttagtgtatctctttcctaagaaccttgtgttgttctctatacttaagggttaagagtattcagattcaggtgtctaaggaaaagacccagagaaaccatgtcatgctgtatttttgtcactgttttttgatcatcatttaaatactgagtacttagcagggctagaaagaatcattagaatctatacactttaatgtactcgttttacagataaatctgaaggccagatgggtaaagtgatttgcgtggactagggtcagggtcagaaagttaggagtccagcaagggctaactcccaaatctcctgactcccatttcatcttctttccactaaactctatatgctgtttctcacttaagacctaccgtgttaacacaaggataaatccttggaagctttttgcaacactccgcaagaaccacctttagttcccccataccaaggctctgaagccttggtaggcaggatctgagaaaaagctgaaagccttctggagatggaagactggaactgggtcttgaacaatgagcaaaaacaactagcatttactgaactcaccatgcactaggtatggtgctacacagatgcctaatgtggattactgaatgaaatccctacaacattgctgtgaagtatcaacagtattccactttacagataaaaataaaagaggctgaattgaccaagatcatattgttagcacacagaatgaggagagttcctggcacaatgccctcctgccacaatagctgtcaggcccacattcatacaccgttatgaatgaatagcaatgagaaaggaggggctctcacactacaggtgaggattaatagcactgaaagagttgttagtgttcatgtgtggggacactgaggaaacctagtttgattgttgagggggtgataaggcaaagttgcttagatgttatacagaaatagtttgagatttgatgcagttaagaaatgagaactattaatagcatgcatccttgacctggggactggcaggttaaaaaaaacactttaaccatgtactgtataagtactatataaggccaattagaggagactggagattaatttgatggatattgcaatagtgcaagtggaatgtgatgttaatatagaatggagtatcagcaaatgggaggaatctattaattcaagaaacactgattgcttggttcagaactggatactaaacccaacaaatacatctaagtcagtacttaaatacaacttacttaaatagaattaagtccaataaatataacagagaacgaaacaatcctctaccctctatacaacttacagtctagtgaaggaaacaatcttgaaaaattcaacaacttaaatattattacactgtaaagaaaagggccaagtgcaatggtgtgcgcctgtaatcctagcactttgggaggccaaggcgagaggatcgcttgagcctaggagtttgagacctgcctgggcaacaaagtgagactccatttctacaaaaaatttaaaaattagctgggcatggtggtgcgtggctatagtcccagctactcgggagcctaaagtgggaggatcacttgagctgggaggtcaagactaaagtgagccataatcacaccactgcctccaaaaaaagaaaagatgttgtaagaacatactgagagagaagagatctattctagatagggtatttaattaaacccagacctaacagatagggagatagacatgcatgaaaaagataaagggcatacagactgaaaattctaaggacaaagacccrtggcaggaagtagaccaatgaacagtaaacagcagcatagagaccaagaagtagaaatgcagttagaggtagacaggagctggagcatgtaaggctttgctgggcatagtagtaagcactttggatgtcagtctaagtgcaaatgggaaagggtaggggttgaaggagcttgagcagaacagggacttgataggataaacattttaaaaagatcacactaggatgtggagagtaggctagaggggaacaaaagtggaagaagggaaaccaaattaagcagctattttataaatctaagccaaagaagagaggattagaccaggctcacatcagttagaagggaaaaaagtaaacattcaaattatatttgtgatgsggtaataaaacctgttcaataaaaataaaacttgttccttgaaaattaagaaaagtgtgattttcaagaaagaatgaatagtaataagtgacaaagacgaagagcatctcaaccctccaagtagctgggactacaggcatgcatcaccaggcctggctagtttttgtatttttttgtagagatggagttttgccatgttgcccaggctggtcttgaaatcctgggcttcccacctcagcctcccaaagtgttgggattacaggcatgagccaccaagtctggcctagtggttttaagataaaagataatctaaagagacataagattgcatccagtttagagaatgtgagtagtcccagagtaggaaaatagcaagaggacactgctgaaggcttcaactcaagtcaatacaaggtaataaagagaagaataaaatgtatatgtcttcctacctgcatatggggactatccttttcctttggagagaaaaatcgtccaccttcaccacgcttccgtgccatggcatgacggtgccgagactcatgcaggtatttctaaaacgagaaataaaaccatttaactattaatactatccagaaccagcacagttatctagtgcacaaattccattctccaaagtttaagacagctgggatcaaagtcacaagggacaattatgacttagaatgacgatggaagctttggagaaaacacctagtaagtaatatagctaaccatatataactactgtaagactgtgaatgcttatagtatgaattttttttaaaaaaaataacagactaccacctacacttcacaatatatacactttcctctgctttaataacaggccaaatttcgtttgagcaaatgagtgttcagtaaaaagactttcctagcattaaagtttattattattattttctagaaacagggtttcactctgacacccttgctgttggactgcagtggcatgatcatgaatcactgcagccttgaattcctcggctcatgtgatcctcctgcctctgccttccaagtaggactacaggcatttgccaccacaccaggctggactttcctagccttatctgcatgttaggtgtgatcaggtaactaaattccggctagtggaaggtacacaacttcttcaaagtttccttgaaagaaagggtacctggccgggtatggtggctcacgcctataatcccggcactttgggaggcccaggcaggtggatcacctgaggtcaggagttcgagaccagcctggccaacatggtgaaaccccgtctctactaaaaacacaaaaataagctgggcgtggtggcgcacacctgtaatcccagctactcaggaggctgaggcaggagaatcacttgaacatggaaggtgcaggttgcagtgagctgagattgtgccactgcactccggcctggatgacagagcaagactgagtctcaggaaaaaaaaaaaaaagaaagggtacctttcttgttccctttcttcctaggctggagcctaagcaggaatcttggaccatgaacagcacactagcaatattaaagcagtgaaacaggtcttgagaactgtgaaaatgtgctaccagtccaggataatttatctctggactacttttatgtatgaaaaggaataacatcttatttaagccactgtttgttttcgttattataactgcagctgcatattagtaataacaaatgctaactcttacaaaagagacaacaagtatctaacgtcaattgtttggaaggtacgtgagaaaacaagccatataaaagataatttcaaaagtagaaccctgctattctcctttcctatatccttcccaatgttatacatacccttctctcctttggaattttcccttctgcctctagtttagctcgggcttgcctcctcttaagaatacggtggtattgtttggcattcacgtagagaggctcttcttcaagcatctctgctccaggtagagggattctttggatagcaggcacagagccagccccaggaaccatctgtgtgaacaggaaaccagagcttattggtggcatgaagtatggacatagaaacagtttcttggttcctcttcatccattttttttgtaaatgccacaaaaagtaatttttatagggtacttgggtaaatgcggatccctggagaaatttatactaaagatctgcactttaaacaaacaccccagatgactgtgtcataggagattcaggtgccactctgagaaactatataaccatgccctaattcatgtccacccatggctctagatatttctgctgccatctaatggtcaggaacagtagtcataagacaaaaaaacagcacaaaaatagatagaccaagtgctactaaatgcctatatttataaaaataatagttaacttataattcaatcctaatttttcttaaaaaacaccaaaacactgtactaaatgtaggtaaaaacaagtaacagagtcctgtaccccacagctctttcccaaatacaaccgctttgaataactgtattgaatcttttataaaaattatttatttttcattcaattcgtagaaacgaggtctctctacattgcccaggctgagctcaaactcctggacttaagccatcctcctggattagcctcccaagtagctaggactacaggtgcatgccactgagccagggttggttctgtttcttttcatagcttcctccacctctgtgcagacttctgttactcattcttaatttatgcattttaacatcctattttgacatatgaggatttagctttcagttacaccacccaaatcttcctatcttcccaatacatttacatgacactttttttttggtttctctatcaattacaatctttctaatttttagcttatttcttattttgtccatcatgggcaatactactttccacttctcaaagattagtatataattcccttcgttatttgaattctgaaaagaattccataaaatcactatttatccattgctttatctccagcatctagaatagtccctggtgaatagtccctggcacayagtaggtgctcagaatgaattatggtttgtcataatgttattgtcaaagtagattaccgacagtgccttaaggatcgatctcaatcccaagaggtcaacataataaattttaggaggcatcaagttgcatgttcaagaaaatttcaaaracmaagctgaaaaatacattttcttaccatgaccatccctcctgaattgaccacattgcctgccactggtagtgtcacagtgacagtcccttgcccactgctggttgtgttggtattggctcctgtttgaacaatctgtgctcctgccaaactggctgctgggatagtgatcatgcctgaaacagggactgtaactttaagaaaacaaaacataaaacaaacaaaaaacaggcacacagaacagaaagaagggaacatagttagtccctcttctatctggtatacactcaccgatcctggcaaaacacactgaaaaacacaaggggagaaaaagtactctcccactgtggtgtgctatatataatctaagtaatcacaatctttgaaattctattaactgtctaggtcccagttttgagtaactctatccttagcagttttcaaaaggtgaaaaggtttggaggcctcctcttctacaggtcagtctgactacagctatacctactgctcttgtacataatgagcaatctgcttcaggacagagattttaaaacttatactttgtttatctcaaactgacaatgagtcagttgtagtattaaaacttaaaattaaaccaagcattccaagtccccagactatcaatagcagcacttgaggatttgttcaccattctgtttgagctcttgcctgggctcaatccagttcagggcctccctggagtaatacaagagcacacagttagtgcactctctggatcctgtatattgcaaatttgcaatcacaaagtcatggaatctaacaaagatgtccttttttgatttaactatttgactaacaggtgcttccaaaagccttcaagttcagtttctgcactcctcctcccagaccaaacatctattatttatgttatctattcctagaacatacttccatgagggccctgcattgtatttatttgttcacgtctttcttactagactagaggctctttgaggacccttcttagtaaaagtgctgtatacataatagtcatttaaagtaatggaatgacccagaaaaaaacataagcagcaatagcactctaaagccaacttgatttttgatctatttctctctttaccaatgaactccctatttctawtcttctgtttagaaacacttcttccctaaaagcttacacaatccctagattagcaaccactatagaaactgctacacatggaatcactgttggtcacagatggtgacaagaaaccaacaatcaatggagagctagaggaaatcttttttttttttgtccaaaaaatatgtagtgtcaagttcaccactcaaattctaaagatgtcagttgtctaagggacaaaaaagttgccccaaaaagtcctagggaagcttatgggtacacttaccttgctggagaatggtgccatctgcattaactggttgatagacgatggtctgcccttcagcagtctgtgccacttgctgtccctggacagcaatctgctgctgtgtctggaggaaataagtaatgacacaattcaacagatcccaaagatactaacaaagaacgatgtagtccttaaaaaaaaaaattatttttttgagacagagtctcactctgtcgccaggctggagtgcagtgcagtggcgcaatctcagctcactgcaacctccgcctcctgggttcaagcgattctctgcctcagcctcccgagtagctgggattacaggcatgcgccaccatgcccacctaatttttgtattttgacggggcttcaccatgttggccaggatgttcttgatctcttgaccttgtgatcagcttgcctcggcctctcaaagtgctgggattacaggcatgagccaccgcgcccggccaaaaatatatttttttatggttttcatccccttttctactatacatgctatacatgaaatatctgactcagttatctgactcttccaaatcagttttgctcctgtgtgacagagctagtggaattacctgagtctggccagcagtgacagccgtctggggctgctggatgatgatctgctgggtctggccctgctggccctgcacctgcacagcctgtccaccctggatctggatctgtccaggtgggaccaactgtatctgcagaaaagaacataaaaaaasgattgtactctactgacactggtctcctttggtccccgagagttatccacatttctctagaaagcagaaaatgttctgaagaggaaaaaagaagtcctgctctgccctccattatgaagtagacacaacttattttccatttatgaaacaaatagggaatttcgacactgtctggatacctgatattaacaaatcaatgtcggtttttatgaaagatagcagtggtatgattatatatattgaaaagcatgcatatttaaaatacactctgggctgggtgtggtggctcacgcctgtaatccttgcactttggaaggccgaggtgggtggatcacttgaggtcaggagttcgagaccagcctggccaacatgatgaaaccctgtctctactaaaaatacaaagattagccgggcatggtggtgcatgcctgtaatcccagctacttgggagactgaggccggaaaatcacttgaaccggaggcggaggttgcagtgagccgagatcacgccactgcactccagcctgggcgacagagcgagattccgtctcaaaaaaataaaaaaataaaatacactctaaagtgctttattattattttttaatcttgccattttggtgaatgatgaagtacttttttacagaggaaatactatatatattaaaaatgctgaaagccgggtacaatggcttatgcccataatcccagcacttcaggaggctgaggcgagcagattaggtcaggagttcgagaccagcctgggcaacatggcaaaaccctgtatctackgaaaaatacaaaaattatccaggcatggtaggacatgcctgtggtcccagctacttggggaactgaggtgggaggatcatttgagcctgggaggcagaggttgcagtgagccaagatccgcaccactgcattccagcctaggcaacagagcgagtaactgtctcaaaaaaacaaacaaagaaaaaacccaaaatgtattctactctagtcaaatgtgactgcagcccaggacaacaccttgataagggccttgagaggaccttgaaagaatccaacacagctgtgtcaggattcctaactcacagaaactataaaataaattttttttttttttttttttttggagacggagtgtcgctctgtggctcaggctggagtgcagtggtgtgatcttggctcactgcaagctccgcctcctgggttcatgccattctcctgcctcagcctcccgagtagctgggactacaggcgtccgccatcacgcctggcttaattttttttttgtctttttagtagagacggggtttcactgtgttaaccaggatggtctcgatctcctgaccttgtgatccacccgcctcggccacccaaagtgctgggattacaggtgtgggccaccgcaccggccaaatgtttgttgttttaagctgctaacttctaggataatttgttatatggtaatagataattaaggcaatgtgacagattatattcctcctattagtttccaattaccaatactcactactgtcattaatgtttgtcaaatttttgttgatttaatttgtatctcctatttggtcctaggattggatagctaaaccttataaagcaattatggaaagcaagggatcgtgtgctatccaaatctatcttctttcttttttttaatggctatagccactttattaggagtgttatcagaaacctgacaagaagcttgaaaaatatttctctaaattttggaactaaaaaactgcaatacaaccctttaaatgttgggtgtacaaaatcctattttcatataactagtgaacacttttttttttaagtgcaaaagagaaagcagtgaggagagccccatagctcaaaatgtcttgtattttatattcaagaatacctcccaaacttaaaagccagaatacatggctagtactaagtaaccttctctttgcttctttgaccattaattccatcaacaaactttttttatttgagcattgcttcaacatagatggcagtctggaaggaggatactttcagaaagatagatttttatagccaggtcactttccatccataatttcaacttgggaccaccttggtctggaaagaagaacatgcctagaaccttaagttatcacaaagtctaccagctgataggaaaaaggactactgatggaaggaaggtgaaaaaaacaggtcaatgggttccatgtcttagagacattcatggatcctactttgttaggggatagattgcctaggtcttctgaattattttttccaaatactcagctcataattggcattcagaaagtattggcaaataaataagtaaacaaatttatctggttatgtgaaccaacttcatttctaagtttatattggctgttaggatttcctcttccatctattcatattcttcgcccattttcctatttttgtataaatacataaacgttatttatacatattctgaatacaaactcggttgtatgtattaaaaatatcttttccaagttttcaccttgtttacttttatttgatgtatttcaatgcatattatgttttagtcaatttgtttttaaaaatatccttctctatagcataaaaattcttatattttcttttgaattttccaagtttacttttctacatttagatctttaatccacctagcaaatattttttaaaatacagtatgaattagaaatcagtttcttttctgtatcattcttcagccatttcttcattgatatgtttataccacttttattatatgccaacttccaatattcttctatctatttcttggctgtctctctggttccagtatctttctcaggccaaggattttaatctaaaattatatgcagaatttttcatgagactggacatctctactttttcttagagggtgcaagctttactaggattctaaaatagagaatacaattcaaaaaaggttaagaagtagtcttctttaaaaaatggctactcaacactaatgagaaaaaaaactcctatacaaaggggattaaagccttaagtattgtaagggaggctatggaatctcacctagagagctttatttacgtaacagaatatatttttttcagcttggttagttatagccctacttggaagcagggaaataactatttgaaggttccttatagcaaaataaaaccccataaaaatcacagaatttagagctagaatgaaccctagatatcatctcatataaattttatttttggatgagcaaaccgacaattaaataacttggccaagatcagaatgcttatttaatggcagacctggtaatgaaagcttggaccactacactcacagtatactgttcctaactataccacattgtctctactcaacagtggagaaggcgcagcaagggggactggagaggaagcaaagagagaagaacagaaaggatatagcaatagggaatcaaggaaagcacatgctgaaaagatatttaaagcctcatatatttatgcaaagagaaatgtgaaaactatttttaatcccaagtacaattctatcttggcaaaaatatgccagtgggctcaaatatactcttaccctttacccaagcaatccccaatccaaagaaattatcctgagaattcagttgaaaaataaaactatcgtgcccaaatgtttacctacaaaggcaaatgaaaaccaaaatccttaactatattttataaattagaaattctgattcatcaagttgactgaacattatgaaagaattaaaaaaaaaaaatgaaaacacaaccccacatgcatggtacaattatgcccaaaaattatgcataaaaacacaaaagaatacacaaaaagtacaagtttgatttatgagcagtgggatcatggctgcttttttcaacttaaattcctccagaaaactaagacattaatatgactgctgtaactgttgaaacaatataaacatttagatagagtaactaatagttatctcatactctcttttccatgactataaacatatactcatggggggttggttatgaattacaaagatgagatcacacactatttctctgcaaattatttccactaaaaatatttcaatattaacccaccccaagtcaacagttcatttcttttaatgatgatgcaatattccctatgaatatattatgatttattccaaccatttccttattcttattaatggacactcagattgcaattttattttttgctagtacaatgctatgaaaagtgtctttgtaatttccccctactattgatgcttttcttcctataggacagattctcagaagtgggactgctagctcaaatattcattgtatttaacagatagtgaggtgcctttccaaaataactctacagttttaaattaccaaaaataatgattaattctttttctccacatccatcctaacagtggatataatgactttttgtttttttttgccatctcgatgagaaatatctaattttaaaatatgatgccacagagttgtatgtaacatttctacatatttctgttaatctcttctttttttttgagacagaatcttgctctggtgcccagcctggagtgcagtggcacaatcttggcttactgcaacctccgcctcctgggttcaagatatcttatgcctcaaccccccaagtagctgggattacaggtgcgtgccaccacgcccggctaattttttatttttagtagagatggggttttgycatgttggccaggctggtcttgaactcctggcctcaagtgatccacctgccttggcctccccaagtgctgggatcacaggcatgagccactgcgcctggccttcctttaatctcttctacatctttgcttacttttgttttctgtttctcaatcagtgtttcaactggatttacctgttttattggtctgcttaaacaatctagattttatttatcctttctatacgtcagttttctacttaattaatttggacccactttttgctcgttttgttatttttctaactttctaaatactcatttttgtttcttttaaaataaaatatactataaactagattctaacctcttcatatactttacagcaattcaagatcatgcctaatatcttagtcattactggagctgtccaatttctgcatagttctagtttatatcactggtactataaaggcagaaaatcaactgaatgcaaaatgtgggttaggaagcagttaaatgcaatatcaattatcaaacaggttgtaataatctattctttgaaacctctcctctgatatactgctcaatatttttaaatattactcacttgctgcaaaccctgtgttccagaaacaggtacttgcatgatggtttgaccttgtccaccagggacagcctggaccatgatgggttggccagttgatgtgattagctggcctccactgacctgcaccattaatggctgcccttggacctagaatgaaataaaataagaacaatgaaataacataagacacaaaatggtttttaccaaaagacaatcactggaactattctgctgccttgctagaaaaggaaaaggtagaaaagactaagaaaatatatgtctcaagtcctcaagttatctttaaatatctatgaatcctgttactaaatgccaagctcaatactttaaggtcagacataatggagaatatccagagtctttgagaagtctcaatagatataaggcatttgtcaccaaacacgggctaaatccatgacaaacatttaatcataatggcaaggttagttgcctgtttaaaccaatccaggaatggtctgtagtgaaggctggagagaaggcaatgagagggaaaggtgatggtggtgatggtggttgagtacaaattctaaataaagtgaagaaggtaaatcaaactgtacccagcaatgactctaggaggctgggtagcaagcagctctggaagcttatgtagaggatgacccttttttccctacagtctctcaagctaaaatgaaatgtcaaatgtatacctttatcctgctcattttactctgtgaattctagatatgtttgttgtttaaactcactactaaagatttcttaaaagcactttctggtcagtttgcagtctccatggtggaattcctcactggcctctataatatccacatggttattttagctttatcagaagcaacaacaaatattgaaattacacagagcagtcaagtgtacaaatttcaagctcctatgagtaaacagactactgtaggagccaggtcactacaagtgctctgtcacatcttaagtcccaatacaaaaatacctaatagaatgctttctggaagcactttaaaagtgctttagaagtaaactgtaatgatccatggaatagtccaaaattttcattttcagactctatctttgacagaaattacttagaacagaatattcatgactgaaatattcacacttaatgaaagtatgtgcaagtaacagcaattagttaacagatcattctgtcctagatgagtaggttagatagtaaggtcctcctacaatcaccaccaccaccgccgccactgccaccaccactaatgtattagaatcaccaggaacattgaaatcctaagttttgttaaactgtccattgagaacctttactttacttttttaaggactttacagcctgactctctcatgctatctctttcccttatttccccattccaaatcaaatcccctttgctacaccaaatgcttgcatattctgtatcaagaaagatttctcagaatacatatagcaagaataaccaaaataactatttaaaattctcccaaaataatcagatccctagaggaaaggtttctattatttccataaagtgtttccacttcttttaaataaaatctatgtaagtaggaaacacaagttttaagatacagctattaataattttctatctattcatcatcttaatttcctccccaattgatgtgctattcgtgcacatgataaatgatttgagactccaaagagctcactgtatttacaacagaaaaatgttacaaagacacatgcatcaaacaagaagccatacagttaagagcatgttacattcctattccacaaggggttaatgacaatccaaaatactgttttatatatgagtaagatgaagcaagcatgaaaaacattaacaagctgttggactgtgagatttgaacacaattttggaatgcctacaagctcagtttctttcggcttaatttatgttcaaagttggctgtacatcattaccaaacactattggtggcaggggtaggggtgggattgaaaggataaagtgatgacartaagaggtagttatctgctggatgcttagcagcactagcaataaagtgagatgccagttctacattctagattctactttgaatcatttctaattcaatggagggaaaaagtagggtacccaaatcttgccaatttctcaaaaatagagttattttaataaaagtaacctacatacacagagtagactagtgctgctactcctgtgttttataggaactggccaaattagaacccaatttaggatacttagccatacacgatgctaaagaactgtattgattaaccaagaattatcacagtggctttaacacctaagacttacagaaagcacatcctgcttctgcctaaccaagaggtatctggggtaatctttgcagatctagtaataagacaggtcactattcccccaggaaaggtagtggaaacaatagcagttaacaagagattaacaagattcagtgcttagataaaccttgccaagtgcaatgattatttttcagttgagttgccccttgaataaaaataaagcacagcctagcctagtttatgtgtgtctgtatatgtatatatttccttctccattgtaacacaaatacacaaaatttttaccatgcaattaattggatcagagtgtgagccctgaataaattcttttttttttttttgagacggagtctcgctctgtcacccaggctggagtgcagtggcgcaatctctgctcactgcaagctctgcctcctgggttcacgccattctcctgctccagcctcccaagtagctgggactacaggtgcccgccaccatgcccggctaatttttttgtatttttagtagagacagggtttcaccatgtttgccaggatggtctcgatctcctgacctcgtgatccgcctgcctcggcctcccaaagtgctgggattacaggcgtgagccacygcgcccggccgagccctgaataaattctaatgtcacttataagaatttcttcctgtcacttataccatttcttttccaggcattctcaaagaaacatgctagtcaaatccaattctcagaaagttgatacggggtctctatatgacttggcatgaaatattaggaaactggcatcttataagcctcaaagacaagttagcagcatcaaagacatgcaactgactttgccattcctactggagatcctaacacaaacagcaccagacatgaggagaggagaagttcatgcagtgctcacagagaatcagagagggtaccactacctggagggtctggacttgctggcctgaggcrgatgccacctgggcctcagtctgcaactgcacagcagtgacaccaccctgctgctgagaacaggaacaggaagagcttgaaatatgtcaggaaggaaatgtgtagttcaagacacagatcaccttacctcttggaggagagagacggaagcctgaaggactttcaaaatgtacagactccctatattgaagctgttttgttgaaggtagtaggattaaagatattagccctttgtctccagagtggacctcaaaaatttgactcaaaaactcaaaacagttgtcatcattaacacaaagatttgtaatgcaatctttccctccagaaacaggaatctgacacttctacttacacaattgtttaatgccctttttatctcctcagatgagttcacaagaaaaaaatgattaggttttaatagccctgaaactaccataaaaaattctgggcttaaatgcaatcaccaagaaaggaggagtaattaatcactatgaaccgaaatcatcttcatgacgtcaatgctctcatgtcccaaaactaagattcttttttttttaaactttatttatgtacttattttgagatggggtcttgctgttttgcccaggctggtcttgaattcctgggcttaagccaaccttcctgtctcagcctccagagtagctgggattacaggcatgcagcaccatgcccagcttcaaaactaagattatttctacccaactggactgctttaagagccatgttttcaatgattcaaccttatttttacatccactaatggcaaattctgaaagaataaaaacccaccctccagggcactggtgtgaatggagggccctttgtggaatcccttcctctaaaaaggcagttgaaggaaactgccagagccacagcagctgtatggaagggaaagctatcaggggagttcgtctttgatcattagacgggaaaaactcatcatcaatactacctttcccttccctactacttttmtatattagctaaattccattttgaaaacaaagtatttccaaaatatcaatcttggcctaaggtcaaatagaaacataatacatttttttcttctggggtggggaaaaaagtgaaattttactataataaacccaagcataaagcatcagaaaatgtaacctgtgtataaattcaagaaagcaatctattaattaggaataaaccagcagcagggaattcctttctagtatgtcttatccataagaatggctgtctaaatattatcctaatgttaaaccagagcttttctgaataaaaaatgtggcagaccaaatcaaaaaacagaagatttattggaagctatgttggtttgtctgttgtggccaaagacttactaaatcacaagttagctcaaacaagaagagaaaaagaccaaatagaatccagaaaaattttaaagtccaaatttccatctgaaaaccagactagatgtttttacttaaaatgagataaaagaggcaatttactataaccaggcacccatgaagagtagattctaagtggtcatgggctagacatggcatttcagcacaagccatcagacccaatatctcacaagatctggtatctttcaaataattccccagggcaatagaccaaccaattgagtggtgctgttatcagtttcattgctgtaatgtttaaagcagttttgcttccatacctgctgctgaatctgtcctgcctggacaacaatytgctctgtcgaactattgctgtttgctgtatactgctccatggtccctccaagtgagattcctgtccrctctggagatcctagaaggctgtgaggtacactcctgttagaaaggtggggaaagaaactaaagtgagattgtcaataaaggccttaccagacaattaacctggataatttatcactgtactttatttgcaagaaaacaggataggagaataggaaatgcttatattcagtatcatttttaactgggattacatggcacaatcataacaacataatgctattttcacgtttctaaaatgctttcagtatactggcaaccttacctttcaatactgtcagagcaatacttgcacctaagagatactcgttaagctacatcactttgatacaaggcatacctaacactgattttcaggtttgcacatatactttagagaataaagcttctttaagttgkaacacgtaattgcttcccaccaaacatgttactcaggtccactacatatggtaggcaaaatttacccttctcatagactttaagagttgaagatccacttttaaaaataaggatacaattagataaactgaatgatatctgagaacctttaataaagacttcattaaaaaattaaaatgatataagttagcaatcggcaattcatcttggaaatatgggagggaggayagatatataaacaaaaatgtagataggtctttctctctgatttttcactaggccctcataaattccaacatctgaataataaaatgacgtgacctaactgagctgctcattatcgtggcaaagtacagtaccactctccataaatccacacatgctggtggaattaatcatttgcaaggtgtctcaatacagtgtgaaagaagaaaccaaaatatgtgcaactatatgtccaagtacttagaaagaagtgtattgatatctaaaatttactttgaaatgcatcaaaaaatggatgaatgggtggagaaatatctggtaaggcaattatagtaagatgttaatagaccctaactggcaggtatacaggtgtttattttcaaattcctttgatttcactgcacacttgaaaattcttatttctagaataagaattttgagaaattcttatttcccaaatgaatgttggaatgttaggaaaaatataacaaaatttaatcaaaataaaaattaatcaaccccattactcataaccaaaatggatacaacataagaatctatgagccataaataacaggctatgtcatcacagcaagaggacttgtggccatatggttctccaaagcactgcccttgatctaatggaatgctcgctaggtaaatttctagctataatttggatttacatatagattggccaacagggagcaaatataatcagcaacatgacaaaccggttttctgatttttacaccagtctctttggaattggttgactaagtctgctcctcagagattctgggtatagaatagaaaatcaggttttcagccagactgtgagtctgttaggggcactaacaggcttccctaaattctatcttgtctctaatacacaatacatttatggctrtaaactaataaaattaaggttatgatgtaaacgaatatatatgattccatttatataaaatctccaaaagacatcagtaatctagagacagaaaatggatcagtggttccttgggagtggagaatacagggagacaggaaagagggaggttgactggcatggagccttaggaacattgtagggtgatgaaaatgttttatatcttcattgtggtagcagttgcacaggtgtacaaatttgtcaaaactcatcaaaatacacatttaaaattattatactttgtttctaaagtatctctcaataaattgatttaaaaaaataaggatcatgaaaggaatgtcttttaggtttcaacgcctccccaactccaaatttccttcttatatgagattttttccttgactaatatccagaagtttacatctttacaagactaaatataacttgaagcacataatgactaatatatgtaacgtacagattttcttcttaactagtttattctggtaatacaaatgaaccaatttagcaatatttaaatttatactttgaagagtatcaagatttgaagagcagcttcaaatctagcagcaattctctctcacattaatgacagagtgatttagcctgtatcatgatattgatactgttaatggttaatgctataagcaactggcttcagtaaagtcatatgttcctactactgtgagcttcagttagcaagactgcaatacaattcgatagtctttcccaaagtgcctctttgcccaagattatgacaaactaagccagatttagtctgtctagctcttgctcttaacacaaagttttgaatggtttttcctcaaagagagagaaacaaataataagtgtttattctggctagcatgaaaattctcttcctagtgcattctcttctcagtgcaattctctttgccccactattccaaggtgcaaaagctgagacttagccaaccacttactaggaacccattctatgtggacctacacaaactccaaagctaaaacctcttcagaaactcaactagtgtaagcatatgaaaagccataggattatcacagttgataatcactaccaggcaaagcctagaacagtagctttttaacttttttgaccacaacccttagtaagaaacacatttcattatcacaactcagtgcacacatgtataaagcatgtaactgaaatgaaagtttcatgaaacagcatttacctttatacaacacaagatgcactttggtattttctattcttttttttcttttaagagagggggtctccctatgctacccaggctggtctcaaactcctgagctcaaaggattctcccacttcggcttcccaaagtgctgggattacagtcgtgagccatcatcatgcctggcagatattttctattctattatttaaaaattcccagcattggctcactcaatttctttcacaactcaacaagtgggtcctgatagacgcttgatgaaagactagactacaacaaagggctgtccagcttccccatcatcmtacagatttctggattggagctttctaatgcacttctctccactaattatgtaccatgtgccagacactgttctgaaggttttaaaaataaaaagaaatctctgacgaagattcaaacttcaaagagtctttaagtttagtaatggactaaaaacctatactggaatcctaagagataaagtgatatgggaatttggaggacagagatttgttccagctggggataaatcaacaaggcttaaaaaaaaaaaaggtactacttgaactttttttttctttgctatcagaggcctgcaggatgaactggtcttaagtgtgagaaagatttagctatgtgatgatgtggaggaaggtgaagtactacaaatcaagagagcataaaaacaagaacagaaatatttcagcatgtgaacagtggactaaacaggaaaaaaagcttggggccacactactttctctcaaaatgtcagacaaagaaattcttctgcagactggtggaagcttgtaaggyatttagcaaaaaagttaccagattataatgccttttagaaagatgccaagcaaaagtatttagtgattttgaagtgaccagaacatacctatttttaaatactaaggttaaaacatctatttcaggtcaggacgcagtggctcatgcctgtaatcccaacgttttgggagaacaagaagggaggatggcttgagcccaggagttccaggttagtgagctaygattgcgccactgtactccagcctggatgacagaggaaagccctgtatccaaaaacaaacaaaaaaacgttccaaaggcaaatatacatgttttttagactacttaagctctatcatctcatctgctaatgcggataacgtgacaatcaaatgaattaagaaaatcacttaagcaacaatgaaaaactcaccctaaaaagtgaaaataaaacctgtccccgaagttttagtaatgaaagagcactggaatacgagttttctgaaacctattagttgtataacattaaatgtgaatttagaaatgggcaccagatacttaagacctttatgtgccagggaatgcactagatgattcacatgagtaaaaataattttcagagtcctaggacaagtctcctcttcmtccccaaagaactcagccactatcacggggcagaacccataaacaagtcagaaactcgttttttcaatcttaggaaaaaatatagctctagatcccttctacttgaacctccatacaaaataataactgtttccaaaatattccttagcaagatatacaagtattttaccaactgggctttcccccctaaactatcacaactactgcccacttccctatcccatcttcctgcctccaacagtgtaatttgattcctctgcacatgcttttcttctcttcgagcaagctcttccatctttcctgtggaagaattaccatcattcttcaaggccagtcaaaagtgcggtggtgataagcctttcacggaggctagctcacgcatggatacttcacagcaactgaacttggcccctttatagcactaaccgttaggtattaactacctgttcacctgtcaatttccatcaggtaggcacagttcttattgacctctacgtactccctccctaacacacggattatacctggcatatactaactgctggataattggttgccaacagcaacctctcaccctaaggaaaaccccacaacactgttagtttctaaacatctgctgagaaaacgttaacacaggacttgaaagtgtatcagaaaaacataaaccaagagatgagtggactgggtcaagcctgacacaaagtaacatagaaaggcgaaggcaaaaacaaagggaaaaaaaacccccaaaactgtactayattcccaagggagggagatttcacaaaatgagcagtggataagattagtaatatgaacagcaagttgtgcagcctcyggaaagaatrcgcaagggtatcaatcttctaagagtgaggttccaggcaccgaatggactggtcttacagcccggacaagaaacggagaccgcttggttgggctccaagacggaggtgtgcggtcctgccactgcgaacggggcggggaagagaggaaatgacgagccaaaaggggtggtaacggcgccgggccggagacccgggcggagcgggctgggaggaggggcgcggcggagcagggggagtgggcgaactaacggccccctctccccaccagggagacagcgggggcgggcccatagggctccgaggcgtgggcgggccagccccgttgccagccgcacacgggaccccgcggccgcggcgcgcaccctccccaggcctccctcccgacctagaggggctgcagataagacagacccggctcgctgggagcggggagcggggggcgcgggccccggggaggcttcctgtcccaagggccggagagtggagagtgcaagggcaggtttaagtttgcggccagaacgaccaggaggaaatcgccgaggcccagggcgcgcatgtgtcccctagtgtagggccattcgtggccccaggcctggggcctgagaacctgggcctgagtcggggaacagggacgcattcccaactggccctggcaccctgcgagggtcggagccccgaggtgcctgctccccgaggcgccatccccgcgcggggcggcccctgcaggcctcggccgggagtgccccgaggcgctcgcaggccccgggccggggccgctggccgcccggctcggctaggctcagctcgactccccgggctcgacgggcgcctgggcctctcctgagtggtcagcgagacccgccaatcggggcgctggggccggctctgggccgctggatattggctcctcacactcaccgtgcctcgctcccccggttcgctgcccgcgctgattggctccagtaccggactccgaaacccaatcagaggctccagccgccgctgccgccgccactgccgctgcctagcaaaatggcgaacccgaacaaaggggaatcgggcctccctccaaccgcctccgcgcaggcgcctctgaggccacgcccactaactccagttcagggatcgccccaccccttcggaggagcaacgcgcaggcgttccctgaagccacgcccaccttcccgctttgacaccacccccagtgaaaggaatacgcaggcgctttccagacgcgccagacccttcaactcaaaacgctgccttgagcttagtactacgcaggcgctaactagcccctytgccagctgcccacccctttccaagtggccactaggacacacccctgcggctaatgcgcaagcgccacttttcccgactcgtggggcagtttcgttacgcatgcgcgggcggcggcgggaaaccacggaatttactgccggaagttcggcggccttcgccaaagagtgtgggctcggctagcaagctagaggggctcgtttccgccccgctaccgggcgggggcggccatcttagatgcgtgcaattaagggctttggcgggattggctccgcgtttgggctggtccgctgctccccacctaccagggtcggatccggagcccttccccgcggggcggggacctccaaacaaccgactcctttccaggtgaagggtgacttgggtacgttggggctttgagcgagcctccccgcaccctcccataggaccccaggacagactgcgtcctcgctgacccgccctagggtaggagacagagaatgggaggcttcaatagactctttccttctcccacgcaccccccaaaaaagtggggggtgaacgttccttgagaggccgccttcctttccccacgcctggggctcagcacgccagtaccctgtacactctgtggttgcggcttaacgggactgtggccaagtcccttctgttttcttctaagccagacccactggggaaatacttttgcgtcgtgcagagaaaaggagaccgtcctaaatcggccttgctccggagtggccctggagaaaggaggaggcgtgtcttagggatgggctttgcttccgctgacggagcggggcgctccaggaaagcacgaaatgagagcgggtcgagacagcctccgaacctaagcgttcttcctctttgccccagaagggttttgtattacgtcccaggggccgaacaaactcacattcatcgataaacgttggggaaaaaagcctattaagtggttgtacagggcaatcagaatattatatactaaggctgcctaagcatttttacttccttttcccttctcatagctgaagaaacacttaaattctggaaatagcgactcagtatcatggccagcagccttaatgaagatccagaaggragcagagtgcgtaacaactattgacttattggtgaactgaaattcgtaataatggaggtcaaaagcataaacactttttaattaaattaatgattgcattatctttttttctctctagctgatttactttaaaaaggctcaaaattctaggcagggatcatccattactttccttttacacatgctgtaattggtttggctttaaatcagattggaggaaggggtgccgggagaggtagtcgtgggggacacaaaatacagaaaaatagcttagtattttactgtatctaataaaacattgtcttttcctttgcacattttttagatcacttatgtgaaaggagacctttttgcatgcccgaaaacagactctttagcccactgtatcagtgaggattgtcgcatgggcgctgggatagctgtyctctttaagaagaaatttggaggggtgcaagaacttttaaatcaacgtgagttttggaaaccacttacctgatttgccctggctagagcaccttttaatctgttacactttaataaaatatgcgtgtaaagaggggattcctaagaaccaaatgtttttaagattttcctccccaagaatggcctctagtttagacgtttaccatatcaaaacccaactcctgtgaaggtttttaatctcttcctcttgtatcatgaaactttcttgacgatattactgtacttctctgaaacttgaaataactctgagatgcttagtctataggttggcattcaagatcctttacttaccaatattctgctttytcttcaaagaggaatttagaaacctcttcttccttacagacccctcccatcactttctacgggccactttaaaccagaaatgtgcactagaatcctatgtaaagcttctgcaacagtttctccgaccacattccaggcttaacagcatcagtgtccacagtgattcttagccttagacaaaagcaattcttactgctttgtattatagttatttggaatgatgatatcttctctggattgaaaactctgtaataattaattccttttttatatatctgtattcctcataatgccttatacagctctttgtatgtaaaaagataattattgagtaaatacacatttggcaagtaaaaaactacacactataaaacaatttcaaggcaatagagaaagtttgtggacaaatgaggatatatttaaaagtagtagtggkacaaaagatgggttgtgaggaaacatgactgtaagaaagctgttaagttaaggaatatagtatttgggaatgctgataaaaagcaaagtgtttgtgggagacaataggtcttccctattcccttcttcagtgttgaaaattctagttctgaggtaaactcagatctgtaaacattttaaaatctttagagatcagtgtttggttttctttttcatttctactattaaataactttttctyagaaaagaaatctggagaagtggctgttctgaagagagatgggcgatatatatattacttggtaagatggggccaattcctttttttttcagggccarttcttaatacattttaaggatttgtgaacagatgggctgcactgcatttgtgttgatcatgatgttctattctagacaactaagaatgtcaaaaagcttcctatcttatgacaactccagtccagtgatggcggctacttggagcactgggttagaaagaaatgtgaggctgcatcccagctctgtgggaaagtcgtgtatcatgtaccataggcctgttctaagacttgcaaaagttaggaatgcctgccatactatatttcctaggcagagtgagataaaaacaataatgtctcaagagacagatttcccaaaggagcttttctcttattccatgtcaaatagcacactgatagcaagggggtgaataaaaacaaaaaataataagtgcagtcccaaataatacttagctcctctcctaactactgcctgaatgtggggttcttcaacagtccaggatggcatttggtccctgaaagggtgtggcttccttagtggtggtggtgggtagcttacagctaacccactacaagcctgatctggatgacaaactgagtggggagatgtcctagcccctttgaattctgtccttaaagcttatgtggcttccagtggttttactttgggaccctaccagttttttctgttgttttatgtagagagacaaaaagcaagcaagcacagtttctaaataagtagaggcttttagcagggaattttcaggtggtatgctttcttccctgttagagatatgcagcttatctcttggaagtggcacagagacttcacytaccttgcttaaaaatattgacaataggcatcatctgctaatctcatgggtttcctaggaaaaggaaagattgctacgtggcagagtctgggtttctcagcctctatttagtggattttcttgaaggtctcccataacagtgtggaaagggcaatatgacatttgtyatccttgctctagactaattctataaaaatgtgcttactcttttaattatygggatgttgggggaatgtgatgacttttctttggctatcattttgggatgatgaaagtttgaatcctttgtgttcagattacaaagaaaagggcttcgcacaagccaacttatgaaaacttacagaagagtttagaggcaatgaagtctcattgtctgaagaatggagtcactgacctctccatgcccaggcaaggaaatccatggtcctaaatggagatttaattgattggtggggtttactatcttacccaaagacaaacaacttaaaagcttaacccaaaatatagatttaaaggtggacaaaagtcaaaattttgtaaaaccaccagtgaaccagttgtctggctttagactaaggcacagccattttctagcttgagttgaatgaatcaggacaattaccttgaaatatacatctgcctcagcctgcttagcagagagcgaccattgtcattcagctacatttgttgaattctcagcaccctctgcttgaagcttggcctttattcctaaagcaatgtaagctaaagaatcaagactgagcaatggtggttttcctcttggaccacttcccatctcccaaacctattactttgcgtcaagaaagttgtaaattatcattcccttttatactgcacacttgttttggtcagtatgggtaatagccagaggatctgtccctgatgtaacttcttagactttagctattgggaatttagggaatgacattgagggttcagtagtccctttgctttcttttcaggaaatgggcctcacctcttttcttcctgtcaccctggtagttttgagtcaatgctgagcatacatgcagttttatcttgcgccccacattactttgcatatggcctcaaatgtcccttattttacactggtctttgatatatttatggtgtacatacatatcagaaactttttttttaatcacaattccttatggacttaattatcacattatgacatgaaattaccaattttaggtctcttttttccctaggcgtgttgaggatcactagagtaacatcttggaaggtgccaagtagtagagttttatggactgagtttattcttaccagggtgttgcaaagaccttactcctggattgcaactatcttaccatttcccagcattccctcttgactttcttttttgcagatcctgtacctcattcctcttctccttactttcgttaacattctgttaccataagtgcatttttaaaataccaacctttcaccatccatccacagccaattttagtcagtagtcatagagggataatgagtctctaatgtcatgacagttacacatttctaaatgtagcatgaaatagttggaaagtagtatcttattaggcaaacagaagtgatagtttttggatgttagagctgtctaggaatggtcttcggtgactcacaacaagaattgacttccaaactcctaccatggttgcccataagggtgtcagactagattrtttgtttttatgctttgagtggatatagcttaaaagagaggagcagtttcctagatactttcgttaccatcaatggagatattttgtctttttcaggattggatgtggtcttgatcgtctgcaatgggaaaatgtatctgcgatgatcgaggaggtatttgaggcaacagacatcaaaattactgtgtacacactctgaaccagtgaacattttggatgtttccgtgttctcctgtgtcatctctactgggccataggaccgggcaaacctaccttaaaataggcagaggaaagtttcatgagaagtagtgtgtttaacaagacagactttggttgctgtattcaagtatttggattatgactgtggaggagggcttgcttaagatatgtggttgtgtttttttgtggaaaagtraggagttaggtggcttgataataggcagggaaaccagattgtcgggactatgacctttttctccagtatgctacctgatttgtttggctggccactaggtggcagcattggttctacttctctgctttttaagagaaatttcaggaaggatgatcattccagttagtttggcattttttgtcgtttgtgcacataacttggtgttatccttatgtcatcagattcctcctaggggagagtttttgttttaattacaaaattaaattytacattgttaccaagaaatttgtggtgataaaaatggaaaaataaaaatttggggagttagtgaggttctgtgcttatgtctatttgttctggacatgggtaatggagggttcacctgcaacttaatttcaaacagtcagacaaagggtccaagcgggaggagaagcaaagtgagaaataagagataaaaatagacaagtcaaaaggcaggtttttagaatctcctcatggtgaactttttctctcttttgtccactgcatggtttctgtgattgaacctgcctgaatttaatcatgaaaacaagtgaaataatgtatgttaaatgcctggcagagtacttagcacagactagtgacccaataaatcagtgattgtcaaaaatccttatgagtcttctttaaaaaaataaaggccacttcctctcaaaaaattctcatacctgtcatctcagcactttgagaggctgagactggaggatgacttgagcccaggagtttgagacaaacctggttaacatagcgagaccctgtctctacaaaaaaaaaagaaattaaaaattagctgggcctggtggtgcaggcctgtagttccagctactctagaggttgaggcgggaggatggcttgagcctgggaggttgaagttgcattgagctgtgattgtgccactgcactccagtgtgggcaacagagcaagaccctatctcaattaaaaaaaaaaatttggtggtggagtgggatggccacttttgtgtttttaacctccatagaagatttggatgtgcagccagctggggtctaaatattagtcctcttttcttccgaagctgcaaagaccagtcgtctattgtggtcatggtaggaaaataaagttcatggatttagccaatggttcagtatcagagctattcgggaaactagacattttcttgttttcccttacagtggtgttgagagttaaaacagccagacttgctattgattttctccctagagtgactttgggtctgtcacaggacttgctgctttcccaagtataaaagaacaactgtattttagaaggggctggttaaaacaccaggaaagtactggttaaatataatctttgtactttagactgtgttcttatcacatatcagcctgataagaggcaacagtttcaaaaaagtatttcacttttgtatttctaggtggaacagacaagttcttcatgttgttggggtaggggcagtggagggtcaagttcattatcaaacttttagattgaggcttttcttgaagcattgcttttgtccacataaagttgaagggaaaaaggaaggagagattatctaaatacacaaaattgaaagtgagagtgggggataagaaacttaaagaaacttaaaatattttgcttaactctgcaattacagatgctcctcaacttaggtctatgtctgggtaaccccatcttaagttgagttcagttgaagggtgtactgaatgtgtatggcttttgcaccgttgtaaagtccaaaaattgcaagacaaaccattgtaaattgagtaccatctgtaaaccttaacacaagtcaaaacatggattttctaggcttcctttacttttaaagagattatggttattattattatttttttcttggcgtttgagccttgattctttagacaaaacctagtctcattcaggattggctgtaagtggaattctgggacttagcaggaatgtgataaagcactttgtcatttgccgatagtagtcttgggtcaaattccgacgacttatcacacttgaagcctgaggaaaggaggcatgccctggtaatcagagtgaacacattattcctggaaacctagttagagtttggcaaacacccggaaattcacctgtgaatttttgcttccacataggactcaaacaaacctttaaaaaaaaaaaaagagagacttgacatcatcctgccattaccatcaaacaccatgtattgaatacttttaaatgattgtatatctgaacattaaactactacttttcacccgctcctctctaataaagaagctagttgcttattaactggcatttgggatgtggctaccttagatttctcatgctttttgttccaccttctgccctattacttgccttcagagaagggaaaggccctcacttgattgtcgtaagaagtctgtatgggagagttattctgcattgtctaggcaagtcttggtttaaccatggcttggttcatagcctggagtgtccctgtgtctggactagctcgcttgtctgtggcaacttccagatgttcaagtttcttaaaaatctggccacgggaaaaacacaccacttcttttattaatgttgctgtttttctttttttaaaaaaatacccaacttaacataaaatgcatatttcagaaatctaaacctcgggtctgaggctgtttgtgttaagcagcccccttgggtgagcaattaggaccttcagtcccatagttgactggagcccatgtatggttgcatttctctccttgcaggtcactttcgtccttcccgagagcagcattagagagagagtcacagcctaaataaactacagcatgagaagtatatttcaagtcctctaagggccttgtccagtatgattggttggtgtcaaatgttgtccagctccaaatggtattaggaagacaggcatgtcccagatggctgtacatgtcattgctgtctcttggtggcagcaggaataccttggtaaaacaaacaaagaaaatgtgttactgagagctctgctggccccgaacaatgactagtttctttttgaactaaggtttctgtgtgcccttcccaacaagtccctggatttctcctccatagtttcctttgcaggattgggtaaatttaccaggattgactaaaccagaagccagtctttcgttcatgttttgatgtggtttacacagaaaaagccccagaagagatctggtttaactctggtcttttgactaaatataggattaaatactattttgtcattaaaaaaaaaaaaaagaaagatgaaataagtatgtaaaataagacactttatttaacaaatgctcatttctcaagattattttaattaagcagggttgttcttttgggcttttagattacactcttatctcatgccagttttttttttttttaacttgatatatcttaacctttcccttcacaaacatgagcaattcaaatagaagacagggaagcatgttaatgggtccagataatacagttatatttgaaatcactgaaaaaaaaaaaaaaaaaaaaaagctctaaggacttgctagttaggcacctgggcccttgactctgaaagatgtctgaaaggaaaatatactggggttaaattttaagctgccggttagtctgtagaatctatgttgggtttataattacagtgatagtacatacactaacaaaatcttcaaggaattctaaaagttaaattttatattctcagagggcaccctcagaaatctgttttgactactgttcaccactataaagtgtcttattttatgtgagcagagtaccacacagtataccctatcataggctcactgacttcagtgactgggtcctgctttttaaaagaaatggctgaaagttgtatcttcatgggttggcaaatgctcagcttgagaatgatcaggtgcccatgtgcatgtctaatagaaaacacctgccaacatcaagctctggaacattgatatttcctaaacgtgtctatgaagcgacatcttctcttaagggtgttaggagtgagagagaccaaaagtaaattatcttcatggaagcttgttgttttcatgttttagtaatatgtgagttgttgcaggattaaagttgggtaagagtgtcgtgagtacccctcctctattactggaagattttgatcagtaactggggccttgcaaagggggcttcgtcatagcatttctgtaggcgcaaactcaatcagactaaatgtaaaaaagatagtaaaggatcctttagccctctttcctgagggtaattagcctgtttctgttagagtttaatttaccctcagcaagaggccaaattggccttaattgtgtcctaattatttgcttaaatagctaatctttctcctatcacctcttgatatctgtaagaggttacttctgagctgctgcctactttacaaatgtctttttaactctttaaatgttcctgcatggactagcttgttgctatattatccccattcctgcattcgacatcctccatgaattctactgaggtcttctcaacataaggaaaatgttcccgtattgtattttcacacagcaattgttggtctccttcaaagtgtagccatttgtttgaaaacatgaaagcaggtctggcttaaaacaagttaaataccagtccatttggggaatttcaaaattaccataagtgaaaaaattgtccctgaaggactaaaaaacattcattagagaaaaatggaatggtaagattgccagtggatatgggagtgaggcatctagaagatgtctggaattagtaatccctgacatgtacacaggggcatactcagaggatttcagtatcttctctgctgtggttcagtagcaggtgcttgcaccatctaaatcttaccaaagaacgtcatcttgcctcatgaaagttttaggattcctgtcaaccttgagtattctaagttaggggaaagttactttgatacaaaagtgtgggagggaaaagtttagagagggattcagaggaaagagacatgttctaaactatttttgcaaccagtcaaaagcagagaaatgaaacccttccaaaggaaaatcagacatatcacagattctacctgacctcacaccttctactggagttaacataataaagtgttggtgccatggcaccaggaaaactcacgtgaggcaaagcccagttgccctacttcaggatgtctgccaacttctcctcgtagtataggaagttctcctgaatgtcctcccagggctgaaaggccttggattcaccctcttcttgctccacaaaattctgccagacatattcgaagtcctggggcttcatgatgcgcagtttacagccagcctccttcagcttcttcagagcagcctggatctccggctcctcccacatgaagagtcgacccaccagaatgagcagacgcaggttcttggtcttgctaagggttttgataatgcggtcagcacacgctgcacaggggctggaggacacataccaggtgacattgtaccgcagggctgggtcgaaggctggcaggatggtgttgaagaaagcttcctctgcatgggcagccgcatgctcatcctctaggtatccccgagatgcctgcacttggccccccttgccctgtgcttcaaccacatagcagaggaaggtcttgttcctcccggaactgtactccacattccggaactggaatttaaagaagttggcaggcagccgttctctgtaggtcaaggagacaaaaggacaggaaagaatgataagttcttgtttctagaaccagcctagagtaggtagctcttccaggtcagtacttcagaaatgcattcactcttactataaataggtcttgtctgtggtaacatcagtgacaaaaaaaaaaaaaaaaaaaaagcattaaaaaatccagaagggtttatctgaaggagaggagaatttggactgaggtgtgcattttggtcaccctactaggacattgtctccaccatcactcttccagcacaacatacccctacatttctaaatcactgaatctttaacctgcctataccttagaatcacctagaagactgagaatgtcagtgcctgggcctcatgccaaaccaattaaatcagaacatgtggagaggtggtccaagcatcagtatttttaaaaagctctctggatgattccaataagtggccaggtaagtagcaagcatataaaatttctcatgacagagcaaaacaaagattttgcagagcattttatgcttttttctcttccttgtaactcatgtaaattgcatcttggcatgaaatggcctaaaacttgcaataacatgctctccttctcaagtgactacttctcaagtctgtttactttcaggtaaagggattgtcacatgctaagtgtccaagaatttttatctgtgaggacagactactcaagggtatcttgggatagttaagcctgtatttagtattgagtcacctccaaatcttaaaggacttggtctctgccctccagatgcttataatttagcagctagattgcagctggacagagaagatgtaaataaaacagctgagaacattataagactgctaaaattggataggtacagtaaaggaagtattatgaaggttctcgaaagtttggccttgattcgggaggcagtagagaattgttacaggttcttgagaaggaaaacaataaaaatgatgtccatgcaagattacagtcttggcaata

SEQ ID NO: 96257 - DNA, 14273 bp, Homo sapiens
aaatgtgcctttctttacctataactgtcttggtaaattcttcttactcctgggctactggcctcagatagttgccgctcacctgagacaggggtgacaagacggcttattcatagaaagcataatgaccaaattagaagaactgggatatccatcaccttaaacatttatcttttctttatgctgggagcatgcaaattattctcctgtagctatttttgaagtatacagtgggttatggttaactgcagtcaccctactgatctatggaacactatgtcttatttcttctagctaactgtatattgtacccattgatcagcttctcttcttcctcccctccttgctatccttcctggcctctggtaaccaccaatttactctccatctttgtgagatccacttttttttttttttttgagtcggggttttttagtagagacggggtttcaccatgtgagccaggatggtctccatctcctgaccgcgtgatccgcccatctcggcctcccaaagtgttgggattacaggcgtaagccaccacgcccagcctttttttttttttttttttgagacggaattttactcgttacccaggctggagtgcaatggcacgatctcagctcaccacaacctccgcctcccgggttcaagcaattctcctgcctcagcctcccaagtagctgggattacaggcatgcgccaccacgcccagctaattttgtatttttagtagagacggggtttctccatgttggtcagactggtctcgaactcccgacctcaggtgatcctcccgcctcggcctcccaaagtgttgggattagaggtgtgagccactgtgccaggccgagatcccccttttttttttttttttttttgagatgaagtctcgctctgttgcccaggctggagagtgcaatggcgcaatctgggctcaccgcaacctccacctcctgggttcaagtgattcttctgcctcagcctcctgagtaactggaattacaggcgcctggcaccacgcccggctaatttttgtatttttaggagagatggggtttcaccacggtgaccaggctggcaaagatccacttttttagtgttcatgtatgagtgaaaacatgcaatatttgtctttctctgcctggcttatttcagttaatatgatgaccttcagttccatctgtgttgttgcaaatgacaggatttccttcttattggtggctgaataatattccctttgtttatataccacattttcttcatccattcatccattgatgtgcgcttgggttgactccatattttggctattgtgaatggtgctgcaattaccatgggagtgcagatatctcttcaatatgctgatctccttccttttggatatataccgagtagtgggattcatctgaaccattttttttttagactagtcaagttcagtagtgagaagggagcaaaaagtagaacaaggggccaggcgtggtggctcatgcctgtaatcccagcactttgggaggctgaggtgggtggatcacttgaggtcaggagtttgagaccagcctggccaacatagtgaaaccccgttccactaaaaatacaaaaattagctgggcgtggtggtgggagcctctaatcccagctactcgggaggctgaggcacgagaattgcctgaacccaggaggcagaggttgcagtgaaccgagatcgcggcactgcactccagcctgggtgacagagtgagactccatctcaaaaaaaaaaaaaaaagttagccgggcgtggtggcgcacacctgtaaccccagctactcaggaggctgaggcaggagaaccgcttgaatccaggaggcggagattgcagcaagctgagatcacggcactgcactccagcctgggcaacagagtgagactccgtctcaaaaaacaacaacgaacaacaaaaaatacaattgcaaaccaccaccatttgacactgcctatatccacccccaaccctgctccagttgtttctttgcaattgccactttccagcatactatataatttactttttttttttttttttgagatggagttttgttcttgtcgcccaggctggagtgcaatggcgtggtctcagctcattgcaacctccgcctccctagttcaaacgattctcctgcctcattctcccaagtagctaggattacaggggccccccaccacgcccggctaatttttgtattttcagtaaagacagggtttcaccatgttggccaggctggtcgcaaactcctgacctcaggtgatccacccacttcggcctcccaaagtgccgggattacaggcgtgagccaccgcacctggcctaatttacttctttatgtagtctattgtgtatctatcttttccagggaacctcagctccacaagggcagggctctcttgtcactttggtttatggccatatcacagagcccatcccagtgcctggcacatattaaggaatgcattaggattccaaaaccagccaggagcggtggctcatgcctgtaatcccagcactttgggaggccgaggcgagtggatcacgaggataggagttcaagaccagtccggccaagatggtgaaaccccgtctctactaaaaatacaaaaaattagttgggcgtggttgtggacacctgtaatcctatctattcgggaggctgaggcagagaattgcttgaacccgggaggcagaggttgcagtgagccgagatcgcgccactgcactctggcctgggcgacagagcaagacgccatctcaaaaaaaaaaaaaaaaaaaaaaaagattacaaagcccagaatgccacaagaccacaggtggtgcagtgaacagggcattgccttgagagtctatcatccctgggcaagtcattaaacataggggtgggggtgggagcctcctgtctgtaacgtggaggtgtcacgtgccaagggctcaggcacacgcgcgcgcacgcacaaacacacccattagtaaggacacgacccctggcattctaatgcgatttatacttttccatgaaggaattcatttccccctctcactaaccccagagacaggtagagccgacaggtggaagaactgaggcccgagagagacagcgggggaccctccccgcgccacggcacagcagctgtccgaccccctcctcacgcccggggggcgcgacggctgccgagggtcgcgggcagggggcgcggcgccggggactacatttcccaggagcagttgccgcggttccgccgttcctggggtttcaagagcctcgcgttaaagggggcgggggaggttgcgcagtccgccagctggaagatggctctgcgcccggtggggacccgagagccgcctgcctgggtgcccaggcggggtccggctgcagtgaagaagccccccagctctgcagtgtccctgaggggaggcgaggcgaggcgaggcgaggcgaggccaagccaattggaggccgtctttcctcgtcttgcccgcctcggcttcggcctctgcgcccaagccccagggaaccccctcccttcccctccaactccccggaacaggggaaggggcggtgaacctcgccgcctggcgggagaaggggtgtccactagctggaagcccctgcaacccgaggcaacccctttccccaattctggcttcagttccgggaatttacaggtcgctgggatgggcggggagaagggacaggagagatacaaaatgaaatgaacgcccaggtgtcagggagctgagccttacagtaccccgcccccaatccatccttctaagtcccgggcctccgcggtaaaataggggtgatggggatagtgatcaaaggcaggaggcgcaaaggatccagaaaccggtggggagcactgtgcaaactgtaaagcgctgtgcaaataaaattattgatcgtcgtgtcattggattcatccagtctttaagacatgcacggatctggggcgggggatggggtgacatggttctgggctctcagggtggaacatctcggatacggggagtgggggctatttgggtgcgtattaacccaaccaggtcttaatgggaacccgagttgtctttgaaaataaccaaaacaaagccaccagaatgttgtgttttcaaatgacgaaacttaagagaaattgacaccatcaaaagacggaccttgaccttttgaactaacctgaccccccattgcttcccttccccgcctgtgccacggagataagcccagagagaaggcatctgacaccgagtcttgcgctccccctcccccttcctcccctaatcatttggattaatccatcccttggcgtgcgggggaaacccattaatttgtcctggcttcagagactcccaggtccagtaggagccctcccacacccacgcagctacgatcccgtccccaacatcaaaaccctcgaacccctcccctttacccctccccagtagcccactgtgtctgcaaacagctcttggaccataccgggatgcgttcatcattttgaccagcaacaaactcccactcccagggtattgtttaagtgaacagtgaccggcctctatgcttagggaataaaagcggggttgtgggagaggggcccagggagcaaacgtcgcagaatctcagcccagggccgctgccaagcggacccggcacgtgagtaggaggtcggccgcagacaaggggtcctagggtctctgaggtctctcctgctggcctctgggcccctaaagcccctcgagcttcagaactccctacagacagtggcgccccgtgtccgcctcgtctacacctgccaagcagcacgggaaaatctgtgtgcattttaacaaagacatcgcatcttcccagcaaaatggcggtggtcgcggccacggctctctaaacaactccacactttccgaggacaggtcacaacccaagggacataaccccctcctcgacctctaccctagcgccccgctttcccaagtccccaaagcactcagggcctctcctcattacaggggccccccggaccgtccctggttagagcttctggggcagcttctccattgtggaccgccctcccccgcccccacattgccttcaaggagccttgggacggggactgaacccccaggctgggcctcacggatggggggcagcgagttctgtctctgacaccccaaaacttccaggctaagagaagcacacaaatgaattcccgattagggtatatgggagatgtaggggtctttgaggagaagaggccacccgggaggccctcctcatctctcagagggtccgggcagcactgggggttcggcctcaggagggaacctcaaggcagaggtcggggggcgcgctgggggagagacggcagaggagggggaagggacaaagtttgaaagtacccttccaactctttcagggaaagtttccttgggggccccatggacagagggggtagaggtgtggagggaccggtggcggggtgacccccgagaggtgaccggaccccgggggagcgacccctcccccctgtcccggctcggcccggctgggagtcgcccagctcggggccgcgtgtgttagttggggccgctttccggcagctccaccgggctaggggaccccgcagcgggccgggagcagagcccccggtagcctcaggggagagctttgctacggggggtttcccgcaccgaggctccctagccccgcagagccagccccccgcaaaggggaaatgtgccggcacaccagcggtcctcggcgccgtttggggtgcgtggcgggcgcggggggcggcggccgggccagcgggccgcccggcggggaagcccagggagccaggcagcggcccagggcggcggcggggagcaggaaggcccgggccggggggaaaggtcggatttgctcggcggaagaaacacagatggcggcggcgcagcgccattccgggccgggagcaggcagccagcagccctgtcctcaccgcggtccgcccgccgccgctaaatacccggatgcgccgcccaagcgccagacgcggagctgggaaaagggaggcagaggaggcggaggcagaggcagaggcagaggcagagcccgagcccggtgccgagaccaagcgacagaccggcggggctgggcctcgcaaagccggctcggcgagctctcccgacacccgagccggggaggaaaagcagcgactcctcgctcgcatccccgggagccgcactccagactggcccggtagtcaggggctcaggagcagatcccgaggcaggctttgctcagcctccgacgagggctggccctttggaaggcgccttcaacagccggaccagacaggccaccatgaccgagaattccacgtccgcccctgcggccaagcccaagcgggccaaggcctccaagaagtccacagaccaccccaagtattcagacatgatcgtggctgccatccaggccgagaagaaccgcgctggctcctcgcgccagtccattcagaagtatatcaagagccactacaaggtgggtgagaacgctgactcgcagatcaagttgtccatcaagcgcctggtcaccaccggtgtcctcaagcagaccaaaggggtgggggcctcggggtccttccggctagccaagagcgacgaacccaagaagtcagtggccttcaagaagaccaagaaggaaatcaagaaggtagccacgccaaagaaggcatccaagcccaagaaggctgcctccaaagccccaaccaagaaacccaaagccaccccggtcaagaaggccaagaagaagctggctgccacgcccaagaaagccaaaaaacccaagactgtcaaagccaagccggtcaaggcatccaagcccaaaaaggccaaaccagtgaaacccaaagcaaagtccagtgccaagagggccggcaagaagaagtgacaatgaagtcttttcttgcggacactccctcctgtctcctattttctgtaaataattttctccttttttctctcttgatgctcaccaccaccttttgcccccttctgttctgactttataagagacaggatttggattcttcagaaattacagaataattcatttttccttaaccagttgtgcaaggacagcaacaaccaatctaatgatgagaatgtacttatattttgttttgctattaacctacttacggggttagggayttgcggggggggcttgtgtgttttgttggcttgtttgccatgaaggtagatgtgggtggggagaagacacaaggcagtttgttctggctagatgagagggaacccaggaattgtgaggttagcaggaatatctttagggtgagtgagttttcyttgagttgggcacccgttgtgagagtttcagaacctttggccagcaggagagaggtggtagggagcagccagccggcaaaggaaggaggkggaaaaaaaccgccaccgggctgacttccacctcccagtggtgagcagtgggggcccaaacccagtttccttctcatttttgttagtttgcsctttcggcctccctattttcttagggaaggggagtggggtccaagtgacagctggatgggagaagccatagtttctcccagtcagctaggatgtagccattgggggatctttgtggcttcagcaaattctcttgttaaaccggagtgaaaacttcaggggaagggtggggagtcagccaagtgcctcagtgtgccctgttgaaacttaggtttttccacgcaatcgatggattgtgtcctaggaagacttttcttttcctctggatttttgttcctcctgtacaagaggtgtctttgcttggtttggtggggctgcggccacttaaaacctcccgatctctttttgagtcctttattataagtagttgtagctgcgggagggggagggggagtgggcgggcagtggatagtaagacttactgcagtcgatttgggatttgctaagtagttttacagagctagatctgtgtgcatgtgtgtgtttgtgtatatatacatatctagggctagtacttagtttcacacccgggagctgggagaaaaaacctgtacagttgtctttctcttatttttaataaaatagaaaaatckcgcacttgcgcgtcccccccccmcccccttttttaaacaagtgttacttgtgccgggaaaattttgctgtctttgtaattttaaaactttaaaataaattggaaaagggagaaactgagcggtgtatttttcctcactttgaagactggagaatgaatgcggagcggttaggcgggcaggcagtggggacatctggggcgtttgcacctgagaatggcgggggagggttcaggagctggacagaagccaggaatccttagtcccggaggctgcggaacgtgccttagccggcttctaggcttctgcctttggggtccagagggtaccccatttccggccgagaggtgagtacgtgggaatgcggtggggagtctggtgggcttggccctgacgcgacttcctccgcccccttccctcccctctgccatccggacttcggcagtctcaacttacaagtcaagccgctcggtccctggcggatcccgccaggccccgcccacccgtcctaggcccgcctccccgcctttttaagcgagcccccctagctccgattggctgctggagcccggcccccggccacgcgaccaggctgcgtccgcgatgcgcacggctcccaggcaggcaggcgcgctcgggcgaggtaggagcgatgtggcctgggaacgcctggcgcgccgcactcttctgggtgccccgcggccgccgcgcacagtcagcgctggcccagctgcgtggcattctggagggggagctggaaggcatctgcggagctggcacttggaagagtgagcgggtcatcacgtcccgtcaggggccgcacatccgcgtggacggcgtctccggaggtaacgctccgttccgggagtcgttccaagacctttcccgagcttgcgctggaatggaggtcctggaggtgggggtgggcggctcctacactcttagctactgttccccttcgcatctctcagggcgactttatggcttcctaatattgactcttgcctggttaaacccttttgacggagggaggcgatttgcccagcaagaaaacccgcatttcttgagcggctcctttgtgaaggtctctaccaattgttgctgcacgtgaactcctgctaacttctagacgcaggaatgactaattccactttacaaacgaagaggctgaaatccacagatgtgaaatggcttgcccaaaagcccccagctagctgcaggcagcgctggaatattggagctggaacattgcctgactggccagagaggacagcttgctgggtaaactcatagcaagcaaggggtcccagggctgccacagaaatcacatgatgagttggccctgccaggtctccctcatttctttctttccttttttttttctgagatggagtctcgtcttgctctgtcgcccaggctggagtgcagtggcgagatctcggttcactgcaacctctgcctcccgggttcaagcgattttcatgcctcagcctcccaagtagctgggactacaggcacgtgccagcacacccggctaatttttgtatttttagtggagactgggtttcaccatgttggccaggctggtctcgaactcctgacctcaagtgatcctcccgcctcagcctcccaaagtgttgggattacaggcgtgagccaccactcccagccctccctcatttcactctaaccagtggttacacctgacttattcgtgtcaggcctcaggtgagtggtgatcatcaacaagctcccaaagctgccttctgcccaggaaataggcatagaacccttggtgctgttgcactcatttgtaaaacagaggtcccaggtaatcccttctctccctcaggggaagcttagagccggtcaaaagatgggaaattaggagacccaagttctcatcctgtttttgcctttcccaggctgtgtgaactttcccctctggctgtttgctcctaaggtcagctgtgttcactctgggctttagaattcggggactggtatctcaggcacctacctttgggggtgtgattctggcagcaaagtaaactgtggagttccaggactgcagcaggcgtctgatccagccctcttctttaaccctcaaggaaaccaaggggtcagataaggagtcagtggtggtcttcaggcacaggagaagcctgtgaggaagggctgagttcctccttgggtagaatgtgattcaaagccagagtttaggctgggcacagtggcttgtgcctgaaatcgtagcactttgggaggccaaggcaggaggattgcttgaggctaggagttcgagaccagcacggacaacataatgagaccccatctctacaaaaaataaaaaaatttaatcgggcatggtggcacgcacctgtagtcccagctactcaggaggttaagtgggaggattgcttgagcctgggaggttggggctacagtgaaccatgattgcaccactgtactccaacctgggcgacagagctagaccctgtctcaaaaaaaaaaaagtttaaacttcttgctcttcaagatgtgtagcactgacgctccttctgtagctgttgaatttggtgcctcctcaatggtgactccaggtctgtttcctttctggaccatttccccagggcctggcactgtcatctttccaggcctgcccttgccccacctgagctgctgtatccatctcctctccttcacctcaggaatccttaacttctgtgccaacaactacctgggcctgagcagccaccctgaggtgatccaggcaggtctgcaggctctggaggagtttggagctggcctcagctctgtccgctttatctgtggaacccaggtacacagtgagtggtggggggttgtggggactgaccccagctgcctgcttcccacagtcagcaaggctggtttagccagctcagctcagccacagccctgggcctactgttggcctcagagctgtgcagcagaaaggctgagtgcaggcctctgttttgctgaaaagctttggccaaggaactttatatatatattttttctttttgagacagagtcttgctctgtcacccaggctggagtgcagtggcacaatcttggctccctgtaaccttcgcctaccagactcaagggattctccatgcctcagcctcctgagtagctgcgattacaggcatgctaccacacccagctaatttttttttttttttttttttttgagatggagtctcgctctgtcgctgaggctggagtgcggtggcatgatcttggctactgcaagctgcgcctcccaggttcacgccattctcctgcctcaacctcccgagtagctgggactacaggcgcctaccaccactcccggctaattttttgtatttttagtagagacggggtttcactgtgttagccaggatggtctcgatctcctgacctcgtgatccacccaccttggcctcccaaagtgctgggattacaggcgtgagccaccgcactcggcctaatttttatatgtttagtagagatggggtttcaccatgttggccaggctggtcttgaactcctggcctcaagtgatctcctccaccttggccttccaaagtggaaactgcctttttgagcattcattttcccacctgcaaaacagagtccctcacacctgaccttctataagaaaagaggagtaggcggcaggaactgagactaagggctctggggctgttctgacgggagcacagttgccagtgctgccctttagtgtccctgttcctgtgggcaagtatcttaacttttctctgtctcaattacttcatagggaaaatgaagataatagcacttaataggatcattacaaattaaagacttaatacatgtaatgcttagaataggccgggcgcagtggctcatgcctgtaatcccagcactttgggaggctgatgcaggcggatcacctgaggtcaggagttcaagaccagcctggccaacatggcgaaaccctttctctacaaaaatataaaaattagctggcatgatggtgggtgcctgtaatcgcagccacttgggaggctgaggcaggagaatcgcttgaacctaggaggtggaggttgcagtgagctgagatcacgccactgcactccagcctgagcaacagagtgagactctgtctcaaaaaaaaaaaaaaaaaaaaaaagcatagaacagcctggcacatagtactgctcaatgaatgttggctattatttattttccaaatgttacaaaataaatttatataagtatgaaacttaaatagtacttattatgtgccaggaattcttttaagaaaattacaactattggccaggcgtggtggcttatgcctgtaatccaggcactttgggaggccgaggtgggtggattactgagttcaagaccagcctggccaacatggtgaaaccctgtctgtgctaaaaatacaaaaattagctggccgggctcgcttgaacccatgaggcaggggttgcagtgagccacgacggtgcgaccacactccagcctgggtgacagagggaaactctgtctcaaaaaaaaaaaaaaaagaacattacaagtattaactcattaatcctaagtgatagttgctattcttattcccgctattgagatgaggacactgagatccagagaggttaagtgacttgcccagaggcacacagcctgttgtgggatttgaaccctggctcaagagtccatgctggctgggcatggtagttcacacctgtaatcccaatacttttggagcccaaagcagaaggatcacttgatgcctggagtttgagaccagcctgggcaacatagcaagaccctctctctaaaaaaaaaaaaatgtttttaattagctgggtgtggtggtgcgcacctgtagtcccagctactagggaggggaggctgagttgggaggatcacttgagcccaggagttcaaggctacagtaagctatggtctcactactgcactccagcctgagtgacagagaatccctgtctcatttgccaaaaaaaagaaagagtctgtgctcctgactacttgtgattatcattaactgccctctcagaaaggtgagagtgaaatgaatgtcagaggcagaactcctgactcgcatccagtcacttcccagcaaagccctcacccagacccaacagttttcaaatctacaaattagaggcccaggtgaacccagaattacctctgtgatctttttcttcaccattaggcgaccaaaaaagacactcagtatggtgttaggaagacacatctttcttctccacgagtgcccgtaattccaccattagactgccactgtaaaaccaaagtctgcccagggagggaacctaacaggtccccagttcctcagtgggaactgtctgtcagattcctggcagctctgggatagcccatgtgtggcagaaagtaaggagactgaggctgcaggctttctgggttgggtctctgtggtcctccaagcctctgtcccctcgaacttgtcccacatgaccccacaggcatcaacacgtgtctcactcattttcttcagagcatccacaagaatctagaagcaaaaatagcccgcttccaccagcgggaggatgccatcctctatcccagctgttatgacgccaacgccggcctctttgaggtgtgtggaagctgtcctgcgggtgagggttggtggggcctgttaggctgaggaaggcttgggtgtgggcagtcgggagaacctagcaggattcagtgccatgcctagaggctccagagcccgcttctggaggtcaaggttgggccaggtaggtgctccaggaggaatcctggggcttgcagggagcctgagttccagagcctttgggggataagctacatcagctggaaggctgggggaggcgggggcctggtactcaccaaatatattctcacctcctcttactagagcagggcgctggtccagcccggcactgagacacgggggccccagagagaagcacagaacaccttgcctctctacccagaggagcgccctggctggcagtacagttttttgatttgctggagtcccggtcaagggagaagcccagggtggttaaatgatggct

SEQ ID NO: 96258 - DNA, 12494 bp, Homo sapiens
tctacctaaaagggaaatcattgctttttagagaagccatccctgaaaatcttgtatcaaacagcatcttactagtcgtcactcactctgttctcccattggtcttcctagcacttttcactagtgtgtgtgtgtgtctctttcccataatggtaggtacttagttttgttcactgctatatccccaacacttagtgttctgcttgctatacactagatgcttaataaatatttgaatgatgaaaggactgaacaaacatgcctcaaaatattacttagaattgtaattgttcaccaaatagtcattatcaagaccaagaagaaaggaaaggaaaacagagtatttgtacttctgttacatactccaggtataatccagctgaaagtaggactattaaacagtaacacccaattaagggtcaatgttcctcatttaaacaatatccttaactaggggctcagagaaataaaagtagattcctgtatgatgaaagctcagaaatctcagagataagggaagcctgatttagatgctaaattctgtgaatactgggtttatttcaaaaatataattaagacttcaaatttctaaagttaccatcttcaaaaataccatataaacgtagatttctagtaacttatcagtgacaaaataaaatcaacaagtttagacctaactccattctctgaaaaccacttcaatatacaagagaatgagaaaatgggtaaaaacatcagtagaggtagcctcatccatgttctccatctcatatcttcacatacaatttagtaggccaagatatattttgttaccacttttcaaaaatgggttcttcctcctccaaaaagatgttttacctgtatctggaacatgcaatcatgacaaaccttcagtctaccaggccaaagctatcaaatcatgcttctctatctcatttggcagtgccacaaggtccccatttctgcatcaaaccaaaacactttccccagtccatagacccagaatatgatttttgtctggaaaggaaaaaacagtgcactgcactaatgaaagaaaatcaccaacttggccagcgggggcttcgtcatcatctcagtgccattcactcactggggcagagactgatggtggccatataatatccacttgctacttcttcctcatttatagaatttcaattttggagggatgacaatgcaccagttaaaaaactacagatcccaacttcccttgcggctaagtgtggctaaatgactaagcttcatgttactccaaggaagactacttcaagagaagaagctcaaattagagataaaacctttatgccttttctctgtttcttcttcctgatgtttggtctggaaatgtaatggctggagctgcagcagccattttggactacaaggtgatgtgaaggatggaaaacatatacatccgagccgaaaagacagaaggcacctaggtctttgatgatagctcaccattagctccagactgactacttccataatttcttacatgagaaaataatctctaagccaccagtcattttactcatagcacaacctaatcctaattgatatactcattatgcctaccataccacttatttcactatataagtttccttcacttgttactcttcctcttcccatatcctgctgtttctaaaatatcgccatccaatagaattttcagcaataatggaaataattcctattcctactgtccagtagggttgtcactaacttgtggttattgagtagctgaaatgtgctgagtgtgactgaagaacttgatttttcatctcatttaatttaaatgtaaatatccatatgtggctagtgctacactgttttctagaacctctgtaatcctacctctccaccctgtcctctcaattttagcaatctcatttacctgcatggctttacctatcatcctgaagtgtatttcaaggcttgacttcttatcgaatttccaggcctatgttttcacttggcagtccagatagtaggcacctcaactcactcttcctttccctttaaaacctgtttctactgactcctttaatttcctagttgcctagattcaaagttacccagtcatctttgacatcttccttatatatacatgatgccttatcctattgactgcaaattccacatattctataaccccaacaactttcacatccatcttctcccttgtaatctcaaccctctgttcaccctcttatccctcttatgtaaattagattactattgtgttttaatttttctctccttgtactcttttgattttaattcatttcacaagttattactagattaatcttccttaaatacagtctgatgtcactcagagtttcaatagtcaatcctgctgaattacctattcgagaacacctgagaaattattttctgctttctgatgaataaggttatgtaacatttctgctgtatgttcaattatagtcacaatataacattagtctttcggccaagacgtgtttcctttgaatttctttggtctttactatttcaaaccttattagaaatatgctttgtttcattttactaatttttttgaaaacattaaaaatgaacttggtatacactgctctgtctgaaattcaatgtcaaccaaaatatggtttcagcctacttgatcttccactgctttatatacaccctaccctacacacagtctaactgtattattcattgttcccaaatagagcctgtccttctctgcctctatgcatgttgatcactacacttggaagaaaatccccaatcccttagtatgtattttgacatattttataaatcccactcatccttcatgcccttaaaaaaaaatcttttactgattttcataattttcactactaatctgctgtgtcatttctttcctattttaattaaaactttttaagcgtgaaagaatatatacacagatcttaaatacacatactccaatgtgatgaagttattgatagtttgtcttctccctattttccaaattttctacaacccctgtattacctttataattagaaagaaaaaatgctggagcaaatgttagcagggaacatcagcagatttttatgggaaatggactttaagtcttagctaatagacttgaaggattcttggtccactgataagaccattcccactgtgaggacagatggacaaatgcatcaggataaacataatgttcacctaactaatgctctttattgtagatttttgctccttgagcaatttcctggttgttatttgcctagagagaggaaatatgatggacacaaacaggaacattctgtctctatgctatttctcactgaagtttattcatttagcaacataatggttttattttttattttttgagacggagtttcgctcttttgcccaggctgcagtgcagtggtgcaatctctactcactgcaacctccgccttccggtttcaagcgattctcctgcctcagactcccgagtagctgggattatgggcatctgcaactgcaaattagcccggctaatttttgcatttttagtacagacggggtttcaccatgttggccaagctggtctacaacataatgttttaaaaattatacttcatacattacatttgttggactctgctttacactcagttgatctgtatatttgaattctcatcttctatttagctgcttcttaaggcaaggctatattattatcctgtctctcccctgcagggcccagcccaatgactcaaacacaaaacatgttcagtaagtacctgataaacaggcatttctataagtcatcatataaaggaccacagtactttgaagctggacagggcctgtataatcacatattaataaacattcttattgtacacacaggaaaaaaactgttaatacaagaagagaacaactgtcttaaggttagcaggcctgtagcagaagtaaatctaaggcccaagccagtcatcaaaaattgaaaaatggcatagtgtaatatttttaaaaagacaaaaattaccaaaatacaaagggtagcaaaatatataaatgacatttgtgaaaattggtcaaatggttaaaaaaggaagagacacatatagttaagccttcagatggatttctggtttcatcttccagtttctagcaagcagaggtcaatactctcacctttaaaacaataaaaagctcaactgaaatcagtgacttttcttggacccattagagaactgaggtcacagagtgaattatcaccccaaagtccaaaaagatacacaaatatagagaatcacagtcaaaatctgcttacatggaaaagaagtcactagagccataaactggtaaggacatttaaatagcaattttgacaaactgctggaagctgagtatggactagcttgggagtaagaaattcagtcttgggagaggtccccacacttctgtgcattttgtctgcaggaagcccaccaggttttcacaatgaagaaccaagaaaaatcctttgtggctctagaaaagatgggaagagtaagaattgtgaggtatacccagagtgttcttcacaattaaggcctctccagggaaaaagattttaccagagtcttctctgaactgggggaaggacatatatttccctgactccagccccttgtagccttcctgtctcacctatgggggtaaaaaggctaacaaacacttgtgaaaggcacaggcccagagatataggcccactaaaatactgagatttaatcaaaagattatagaaccttctccttgataccttaccatcacaccaatagggctccagtataataacaatggattacaactaaacgaacaccaagcaggataaatgcagactctaatgaggagttcttagggaagcctaaagacaatgggggagacgacaagaacactggaggaatttgaagcctctgatacctacggctaaagcaaacaagaaaacaactctagttagattaattcctagctagattagcataaaaccttacatgaaaggcctgtttacctcagttcctattatccagtacatcatgcccagcttttacatgtattttttcatttatttctaaaaattatcattcttatttctacatgaagaaactgagtcatagagattaaattacttgctcagtgatgcacaggaagtagcagagctgaatttacacaaagacagttgactccaaaacctactcttaatcaataaataatgtctctctactcataaaagtgagtcaatggtctattcatatggattaattctgaatatggtttctgttagattcacattaaaattcactaatttaaattcactaatgacgctatcatatattctgtgggctaaagttctactttacctaaaaatatacacataccaatgattaaactgcaaatgcgtattcaggtaaaaaaaaaaagtttttaaaaagaatgttcaaaagacttgaataaacatttctccaaagaagatattcaaatgaccaataagcacatgaaaaaaatgctcaatatcatgaattaggaaaatgcaaatcaaaactacagtgacataccgcttcatccccattagcatggctactattgaaaaatcagaaaataataagcgttggtaaaaacaggggaaattagaacacttgtgcactgttagcaggaatataaaatgatacagtcactgtggaaaacagtatggtggttcctcaaaaaattaaaaatagaattgccataagatccagcagtttcacttctgggtgtataccaaaaataattgaaaccaggatttcagactaaagtatttaaacacccacgttcatagcaacattattcacaatagccaaaatattgaaacaacccaagtatccatgaataaatgaataaatggatatgcaaaatgtgatatatacataaacaggacattattcaccttaaaaaggaaggaagctctctcctcctcagcactgcctacagaggtggcagccatctcctcttcggcctcatggccgccctcagaccccttgtgaagcccaagatcatcaaaaagagaaccaagaagttcatccggcaccagtctgactgatatgtcaaaaattaagtgtaactggcggaaacccagaggtattgacgacagggttcatagaaggttcaagagccagatcttgatgcccaacattagttatgggagcaacaaaaaaacaaagcacatgctgcccagtggcttccagaagttcctggtccacaacgtcaaggagcttgaagtgctgctgatgtgcaacaaaacttactgtgctgagattgctcacaatgtttcctccaagaactgcaaagccatcatggaaagagccacccagctggccatcagagtcaccaaccccaatgccaggctgcacagcraagaaaatgagtagacagctcatgtgcatgttttgtgtttaaataaaactgtaaaaactgccaaaaaaaaaaaaaagaaggaaattctgcaatatgttacaacctagatgtaccagtttgttcttatgctgctatgatgaaatacctgcaactgggtaatttataaagaagaggtttaattgactcacagttccacatggctggagaggcctcccaaaacttatcatggcagaaggcaccttttcacagggcagcaggagagagaatgagtgcaagcaggggaaacgccagatgcttataaaaccatcagatctcctgggactcactcattattatgagagcagcatcagggaaaccaccaccgtgattcaattacctccaactggtcccacccttgacacacggggattataaggattacaattcaaggtgagatttgggtggggacacagagccaaaccatatcactggatgaaccctgaggttcattatgctaagtgaaataaaccagtcaccaaaagacaaatactgtatgattccacttatataagatagaatagtcaaaatcacagcgacaaagtagaatagtcgttgctggaagctggggaaggattattacttaatgagtatagtttcagttttacaagataaaaaaagctatagatggtggtaatggctgaacaacattatgactatatttaataacactgaaatgtacacttaaaaatgggtaagatggtaaattttgttatatgtattttacctcaattaaaaaattgaaaaaaaaggtgatatgtgaccatgaggtatatgcaataaaattatactattattgtacttcttaaaaactcaaattgaaataggttaagtatttataatgtataacactgtaaaacaatgtataagagcaaaaggcactacaactgtccctcagtatatgctggggattggttccaggacccccacctataccagaatccacacatactcatgtctcacagtcagccctgcagaacccatgtatataaagagttgaccctccgtatatgggttttgcatcctgtgaatccacgtttggtttaaaagaatccacatataagtggacccatgcagttcaaacccatgttcttcaagggtcagttgtatttcagtattttctgtttatttagcaatgatttacatttagcaataaatgattatgtaaagctactacctttatccaattttctagctctcgataacttttcttgtgatttcctttttagttcttggaccggaatacaagccaacgctttctcctgaagagcaggattttcatagaccagcacatgctgaatgttggactgaagaacttctagaatggctgagtcagcagcaacctaataggaaaaaaaaaaactgaaattaacttttcaccatatgctacaaaaataatatataataaaaaaactgtggttttatgattttacagatagaagggaatgtatggattcacttaaatataataattatacccataaacttcataacattagtattaggagacagccacatttgtgtcagagcctaagatctatctatttttttccttttgtatatactattaaggatatatttaaataaggatatgcggaattcttgaatacaagcatggatcaatacagagctctgatctatgcatctaatggccccttccactttaaatccctgtaatgtacagcagtagcaaaagaggtgtgctcttaaagaaccaggaattttgagaagttcctgaaagagaaaaggcaaatatgaaaggactaaaggaagaaacctccagagaggatggtgatgaaaagtaaaaaaagtttccaaaataatcccaagggcagagaagccataggatctacagaataggaagtgtcctcagggcaagcattaggaagagtggttggactctggaggaacagctaattatctcggcttctccctccttgtcacctcatcaacaaagaggtctgcctctgagcagtaagtgtgcatacttagagtcacaaaaggaaaggggagtaaccaagctcagaactgttgccactggcacatcccactgtgcaacatgtactgcccttctccacagctgttagaagcaaatgcagtattcacagacaagctggcaggacctctcaaatacatatggatctacaacaactgtgggggagatgcatgagaatcagtatcagaagaactaatcctgtagcaatgacagcaaatacagaaaaaactttaaaaagtttcaatagtacactatattcagagaaagactcaactatagatcttggacgtaaaaattttatttatttattattattatttttttgagacagagtctcactgtgttgcccaggctggagtgcagtggtgagatcctggctcgctgcaacctctgcctcctgggttcaagtgattctcctccctcagctttctgagtagctgggagcacaggtgccaccaccatgcccagcttatttttgtatttttagtagagatggggtttcaccatattggccaggctggtctcgaactcctgaccttgtgatccgcccgcctcagcctcccaaagtgctgggattacaggcataagccaccacgcctggctagatataaaaatttaaacattaaaataaagaagaagccaggcactttgggaggccaaggtggaaggattacttgagtagggagttctaggccaacctgggtaatacagcaagatcctatctcttaaaaaaaaaaaaaaaaattaagtagtcaagcatagtgttgtgtgcctgcagtcccagctactcaggaggctaaggtgggtagatcgtttgagcccaggaggtcaaggctacagtgagctgtgactgccctactgcacccagcctgggcaatgtagtctcaaaaataaattaataagtaatataaaataaataatataaaataaagaagaaagcatagatggtgtcaaacggtagaataaacatggctaaagagtgatcagtcaattaataaccaaaggcattttctgagaatgaggataaaaagaacaaacagacattgaggataaatccaaaacttctcacatccagttaagggaaattccagaaagacagtaaaaacaatggaagaaggcaactgctcaaaaaaaaacagaaataaatttctcatagctgaagagctagtatgtatggaaaacaaaacaaaaacaaatgctaagcatataatgatgacattttacaatagcaaggctaaaaacaaaatcctaagagtcttcaagtaagaagaaacattacacgcaaagaaaaaattatttgatgtcagatatttcattggaaacaatgaagcaattttttttgaaaatctgaggggaaatgattaggaacacagaattcattcccagttaaactaatcatgtacaggggcaaaataaatatattttctgatatgtaacaatacagaaagtatatcactctcaaatcctatctaaaagaattattaggaaagttattatagccaaaaaaaatatagcttacataaatttttaaaaataaatacatacttgggagtaggatctaaataaaagcaccagtacaagtttcgattggtatagataatcacaactggaaagcaaaatctcaattttttcataggaaaggtagcaaggaagggagcagaacagaggttcttgtcttatgggaagatgttggtagaaaaatataaaattaaaaacttacattacagatttcaggtcaataattaaaagactaaaaagattatatttaacttcctaactcttaaaggaataaacctattatagaaaaaaaacttcatctaaacaaaacagggagaaaagaaaaaaaagcaagaacatagacaacacaaaataaggtatcagaaataagtttaaacatcttagcaattagaataaatgtgaatgggttaaatgtgcatattgcaaagtagagacaggtcgataacaacaacaaaaaaccattaccaaatacttacatgtcaggcactgtattaagcactggaatgggtgcacaagacagacatgatcaatttaaggtctatagggaaaaggtattcaacaaataatgacagacccaccacagtaactcaaaaatatttgtctgtgtgtgaatgtgttagatactggaaaaataatggagaccaaaatagatatggacattaccctcaaaaagcaagtagtctatggatacaaaaacaagcaaatactgataatgttcatttactcaaattttatcctttatttgctaggtgctggggatataacggttaaaaattaatcatagggataaatattattaagcaaatatatagcataaaatgagactttacaacaaggtccttgaacctgaacttttttgtggcacaataggaaggatgagaagaagctaacaaaaagggaaggaaaagaccattcctgtcagaaggaacagcacaaaggtagatggggattgcttagcatattttgaaggatcagagagatcagtgtttagtacccagagaactaaggggaaagcagtggagagataaagatctttctggtcgcttttcattgcaatgataagccattaaagagacttaagcaagaagagtaaaacgatctgatgtgttttcagaatatcactttagccactatgcagagaaagcaggcatcagaagaccccatgggggactactgcagagctccaagagagctggtggtttaaattagggtagttttacaactgttaggaaaaaaaaaaaagcaaatggatatgaaaagaacttaggaaataaaatcaataagttttggtgactgtactatgaagtcaagagtatttggaaaaggaaaagaacacattagagatgactcgtgctttttttttttttttttgatacgagcaactgggtcagcacttgaaccacttgcagcaggagaaaaaccatgaaatgaccaactaagttaaagactaccaataggctctctctccggataacgagtggctggataacatggaattgggcaagatggcacttcccaagaacgctcctagggatgccttggtgatggcacagatctcgaaggatatgggaatcacagactacaaaccaaaggttataaatcaaattttggaatttgctttccgaaatgtgactacaattctggatgatgcaaaaatttattcgagccatgctaagaaacctaatgttgatgcagatgatgtgagactggcaatccagtgtcgtgctgatctttttacctctcttcccccaagaggtttcttactggatattgcaaggcagaaaaatcaaacccctttgccactgattaagccatatgcaggacctagactcccacctgatagatactgcttaacagctccaaactataggctgaagtccttaattaaaaagggacctaaccaagggaggctagttctacgattgactgttggtgctgttagtagcaaacctaccactcctactatagtgaccccacaaacagtgtctgtcccaaataaagtttcaactccaatgtcagtgacaagccaaagatttaacagtgcagattccaccttctcggtccacacctgtcaaaccagttcctgcaataactgcagttcaaaatgttccaactaatccctcaatgattgggcccaaaaatattcttattcccatcaacatggtttcatcatagaacacagccaatgaagcaaacccactgaagagaaaaacatgaagatgatgatgacaatgatactatgtaaggaattatagtctagtctagatgcatttcaaaaggaaagctggttttgagcccaatatactgaactagaatattctagatcttctcgttttaccttaaaagactttcatattagttaaaactgttagatctctttagtaaacacacaaaatgtgcttttcattaggcttcaattacaaacagttaagtacttgtttcttaatagtttcattaatgttgagtccttatatggcaattctgtttttgagacacttttctgcctttt

SEQ ID NO: 96259 - DNA, 13134 bp, Homo sapiens
aggggtctggctcagccggggaagtggcctggaggatgggcttttgagctgggctgcagagccagcgatctcttgaaatgaggaaagaaaccctcattctgatttttctctacgcaatagaggggctccaattcctgagatcctagacaccctgggagaatctggattttacttttttgaaaacgcactgtaaatagcaaagaggtgttttctgtgagattgccagccagtggcaacatggtcccctaaaaaggcctgtaatggccttgaggaaagttttctgtttcctgtctgggcctgggggaaacagacgaagtgtgttctccatccttctgtgcctgcctagtcaccaagcaggcttccttgggtcaggcatggcagggtctccaccaggtacaaagcaatcccttctgtgctggagccaactggtgccagacactgtttatagatgaaagtgttaaagctgatcatggaatccatcagatatgtatttaatttccatttgaacatgggtctttctcctttttctttttcgctttctcctctgcaggttaacttgcattccccaggtagtttgaatgagtctcagcccaaatttgcaaactcagtacagccatcccctgggaagttaccctgtctaagcctcctgtacaagtcctaggaaaagaacctgttttcctttgggcatgtgagcagtgaattattgctcattcagaatttcatgtgtatgtgttgctgatggccaggtttagagaaaccaacctatttatttttagaggagaggtgaactgataacattcttttcagacatcactatcacgaggcaggaaagggctaatagtatgacagtgtcctgaggacaatagagaaactgcaaactgcagaagcacctggtctgtggccctgaccagcatctctccatttcaggatatggagattctgcaggaacaggtatttcttcagaaagagaagggactgatattttagatgtgaccagatgcagggcacgctcttattgccatgccagcatttgctattcatgatgttagtattcaaaaattaagaaacaccctgcctcggccattggtgtctactaatccattggaagagaagactggaatccaccacttgctagcttcttgggtctcattcccccgctttctcccatagctgaggaccacctaacctagatggctgctgtaattgttcaaaggaacatctttagagcctgaagcccaggaatagcccgtggcaggcacctggtaaatgttagttttcactgcctctcccaacactatgaaacatgcagcactctctgcaactgaccctgtggatttccataggcaggagaatatccagtgttaagtggagctggtattttcagaaatgaagcccctttccttatttgtgccagcccgttttgtcttaggcatatgtgcattgcattattgcccactctgtattttatttgcatctgtaacgatggccaggttcagagataccaccctatttacttctagaggaaaggtgaactgataaccttcttttctcatatcattatctctaggtaggaaagggttaatagagttagtgtgacagtgtagtgtggacagcatagaaacctccccaacctccaccbgcccgcaagctgcagaagtacctggtttgtggcctttgccagcctctcttcatatcccgattctgcaggaacaggtgcttgaacattaagagaaggggctgaatctttggatggggtttcatgaagggcacaccrttattgggatgctagcatttgccattcatgacattggcattcgggtatcatgaaacacaggaaggtttttccaaccccccactgtattgactgttgggatctactaatccaatagaagagaaggctcaaatccatcatttactgacccgttgggcttaagttccctcctctttgccatagccaagcaccacctgtcctagatggctcctgttttgttcagaggaacatctctagagctgcaggcccaggaatagcccttggcaggcatctggtaaatggtgttttcattttcctctctcccacactatggaacatgctggtgccccttttggacttttccatactgtgggcttcccttttgccatttccttgcacagttgtgcctgtgcctggcaccagctttgcccaggatcaccacttgtatccacctgcagacatttttaaatgcataagttaggcctcttattgagttgaaatttattttattcctgatgctacaatattatttgcattgatacccagtccacaatttgtttcagtcatcctggtggggtgggccttctgaaatccagtttgagcctccctgtagcaaaagacttgcaaggttatttgtcaggaagttccagaccttagcagcagttactgcaaggcactgctgggctttttccacatctgaagggcagaggtcctgagtaattgcagtgggcaggagctgagtcatgcttggtttcttgctgtggtttggtatgttgctaatgatccctggaacctgcctctttctagatcctttccctccagtgagtgtggtgacaggcccatcaggcaatgccttgatgacattccactctttgaactgtgtgagttcctgtagggaaaggaaagccagttgcaagtgctcatctcctacctggatggcactgctctgtatatggctgccctgtggattttcacagggaagggagtatctagacttgagtgtaactggaatagacaacaaagaaatggggaatacatgcaagggaactggttgatggcctaagttaacaccatgaagccaatctcatgcctgtctggtggttcagaggttagagctccagtctttgagcaactgtgcccattgttgagaagtatgtatactatgataaacaccaaaggtgggagtcttcagctagcctccaggtggctctattttagaggtctctctctgttcctgaaagatggtacaggaagtcagagtataataagatgtacagtgaatttagatgatgccaggccttgtgctatgtgatttacattaattacttcattttaaaatcttttttttttttagacagagtctcgctctgtcacccaggctgaagtgcagtggtgtgatcttggctcactgcaacctccacctcctggattcaagcgattgtcctgcctcagcctcccaagtcgctgggattacaggcgcgtgccaccatacgcagctaatttttgtatttttagtagagacagggtttcgccatgttggccagctggtcttgaactcctgacctcaggtgatcagcccgcctcagtctcccaaagtgctgggattacaggcatgaaccaccgcacctggcccattttaaaattctcaatgtctgtcattattatgataccctatcttacagataaagagactgaagcccacagatattaagcaactcaccaaaagcttcatagctgataaacgaactcaagatttaaggttagccagtttggctccagaacatacaccattgatcttgacaccattctgtagttactagagcaccccatttacaaaaaaaggatcagggtgattacatgacttgctcaatttggacagccagtgagttccagaattaaagctaacacctaggtctcctgacttcaaatcccattcttttttcaggctgacatttgtcttatcccaggtcctctggagcagtgcatctcagacttgaatgcacattggtatccccttaaggatcttgttaaattggggattctgattcaatacttctgtaaagggcctgaaattctgcatttctaacaagctcccaggtgatgctattactgccggtcctcagactatgctttcagtcaaaagaagatttgagcaaccccctggtttagcagctgtggcttccaagcaggagaatttccttaaacacatatctacctacacacacacatacacacacacacacacacacaaagacacagcaggtgtgttctctgagtctcacttctgagaccccttaacaattcccttctggggtgaagagtctgaggcccaaggagggaaaagactcctcagggagttattagcagactggaactaggacccattccacttgacttctcagccagtgttcctcccttctacgttccttcctctgttgcatgagggtttctggggagaacagtagtaaaggaatgggcattgttcaatatcacattattcatgactttgcaggaagaaaacaaggtgatcctcattccagatcttcttgcccaccatgctgtactgaacacatgatttagctgcccgggaggatccaactgtactgtgcctaggagaaaggtcaaaatggttcccttcagaaatctgcttgcccatgcagctaccatcctggggaaaatgtaactacagcaacctctcagatgctcagataccatttgtaagcccggttgcttgtccacaaactccaggaactaccagtaactagatgcttactacaacttttgtagtactatggttaggccaaactactgattagacccaaaatttaatggctcagatacagtctctttcttgctcacacaagaatcaaccatgggtattccatattgacaggcagtgccccttcatgtagacccagcctgttatcatctctgccctcttcaaaatggcttccaaggcactctggtcatcatcattcctggaagtaagaaagaacgtggacgagcatagctcagggtttacaactagctttcaggataaccatggtcaggaaattgtttctgccacccagaggtcagaaaattgcagaaagccattgctgatagcatgagtatcccattggccccaggatgactagcttagaaaggagtttaacagggtgctgtgaaaactcacatctactcttcctgctagaggaaaagtatggcttctagctcccttctgtcttccaaattttcttcagagattgcattcrcaagggagtctgagaaatattgtctcaaggcctccagtctctgaaatccagggaagggaataagagtgggaatgttgtggagtgtcaatagacaatacctggtgcatctttgaaattcacattaaagttgaaagatttatctcccttttcttccttccaaactgaagtagaagactgcagaaccctctagtgtcgctgcaaactgaggcgtcagctgctgaggcaagcaacagtggtttgtgtcatgaaattttcttttccaggccctaaactccctgggtataaagttagtcctagtttatattccccagtattcttgttccactggtttaaatgtgtcccccaaaattcatgtgttggaaagttaatccccagtggaacattgtttaggtggggcctttaagtttaggaggcgagtaggattaatgtgggacggggttcattattgtgggagtggagttcttataaaggatgagtttgtccccctctcttgctctgtctctcctctgtgatgcctcctgctatgttatgacacagcaagaaggycttcatcagatgtgatgtggcccttcagtcttggacttcccagactccagaaccatgacccaaataaattctgttaactaaaaattacctagtctgtggtattctgttatagcagcatagaatgaactaagacagaaaattggaactgagaagtggggcaattgttataaaaaatacctgaaaatgtggaagcacctttgaaattgggtaatggttagaggctggaagaatttagaagagcagactagaaaaagcctagattgccataaatggagcataaaggtcatttctggtgagggctcagaagaagacaagagctgtagcaaaagcctaaatcttcttagagattagttaagtggacattttattacatcattcttgcattgctgtaaagaaatacctggctctctgctcctcttgttcgacagacaaccacatcttctcttgcattgccagccgcatccatgagacaccatggggaaggtgaaggtcggagtcaacggatttggtcgtattaggcgcctggtcagcagggttgcgtttaactctgttaaagtggatattgttgccatcaatgaccccttcattgacctcaactacatggtctacatgttccagtatgattccacccatggcaaattccatggcaccatcaaggctgagaacgggaaatttgtcatcaaatggaaatcccatcaccatctttcaggagcaagatccctctaaaatcaagtggggcgatgctggtgctgagtacgtcgtggagtccactggcgtcttcaccaccatgtagaaggctggggctcatttgcaggggggagccaaaagggtcatcatctctgccccctctgctgatgcccccatgtttgtgatgggcatgaaccatgagaagtatgacaacaacctcaagatcgtcagcaatgcctcctgcaccaccaactacttagcgcccctggccaaggtcatccatgacaactttggtatcgtggaaggactcatgaccacagtccacgccatcactgccacccagaagactgcggatggcccctctgggaaactgtggcatgacggccacggggctctccagaacatcattcctgcctctactgacgctgccaaggctgtgggaaaggtcatccctgagctgaacgggaagctcactggcatggccttccatgcccccactgccaatgtgtcagtggtggacctgacctgctgtctggaaaaccctgccaaatatgacaacatcaagaaggtggtgaagcaggcgttgaaggcccccctcaagggcatcctgggctaaactgagcaccaggtggtctcctccgatttcaacagtgacaccccctcctccaccttcaatgctggggctggcattgccctcaacgaccactttgtcaagctcatttcctggtatgacaatgaatttggctacagcaacagggtggtggacctcatggcccacatggcctccaaggagtgggactcctggaccaccaactccagcgagagcacaagaggaagagagagaccctcactgctggggagttcctgccacactcagtcccccaccacactcccctcctcacagtttccatgcagaccacttgaagagggagggacctagggagccccaccttgtcgtgtaccatcagtaaagtcccctgtgctcagccaaagaaaaaaaaagaagaaaagaaaagaaatacctgaggttgggtaatttataaagaaaagaggtttaattggctcacagttctgcaggccgcacaaacatggtgccagcatctgcttggcttctggggaggtctcagggagcttttactcatggtggaaagcaaaatgggagcagccatgtcatatggtaagaacaggagcaagaaacagcgaaggggaagatgccacacacttttaaacaaccagatcttgtgagaactcactatcacaaggacagcaccaagaggatgatgctaaaccattcatgagaaatccagccccatgattcagtgacctcccaccaggccccacctccaacattagggattacaattgaacatgtgatttataggggacaacatccaaactatatcagttgtgatcagaatgttggtagaaatacagacagtaaaagccattctgatgaggtctgacagaactgagggacaaggtattggaaactggagtaaaggccatccttgctatacatttgcgaagactttggtggaatttgtgttcatgtcctaagattttgtggaaggcagaacctaagagtgatgaactaggatatctggcagaagaaatatctatgcagtaaagtgttcaacatgctgcatggcttctttcggctgttcacagtaaaatcagagaaaacaaatgatttaaaggcagaatttataattaaaagggaagcagaatggaaagatttgtaaaacttccagtctggcatgtaaagaataaaaaaggatgcttgagagagaatactaagggtgtggccaagccactgtttgctaaagagattaatatggatagaaagttctgttcatcagtatattggggagaatgaccccaaagggatttcggaaatcttaaaggcaagctaggattttgaaagcagggtttccagagagttccctgcaggacctcagcattcactgccctgtgccaacttgggactctgccccctgagttctgcacagtgctcctcagccacctggccatggctcaagaaggcccaggtagggctcatcctaccacttcagaaggtagaagctgtaaatcttgctggcgtccacaagaagctaattctgcaggcattcagaatgtaaaaactatagggccatgtcagatttcaaggatgtaatggacagcttggcagccccggcagacttgtcacagaagtagagccaccacagagtcctcctagggtattacttagtggagtcattggagtggggcatctcctgagactacagaactgtaaggctagcagcatgcaactccagcctgggaaagctgcaggcatgagacttcaaccagtgagagctcctgggtggtctgagcccagcaaagccataggggcagcactgcccgaggccttaggggtcaaacccccaccctagtgtgcccaggatgtagggcatggaatcaaaggagattcttctgtcttcttaagtttcaatattactttccttcttgggttttggacttattggggatcagttacccctttatttttgcctctttctcgcttttggaatgagaatgtctatcttatgcctgtcctactgttgtattctggaagtagataacgtgtttaatttcacaagctcatggctgggggaaaatttgcctcaggatggatcataccttgagtgttacccatatctgatttagatgagactggacttttgacttttgagttgatgctgaaacaagttaaaatcttttgggctattgagatggaatgaatgtattttgcctgtgagaaggacatgaattttgggggccaggtgtggaatgctatggtttgaatgtgtctcccaaagttcatgtgttggaaacttaatccctaatgcagcagtgttgagaggtgggatctttaagagataattaggtcatgagagctttgccctcatgaatggattactgctattatcttgggaatagtttcctgataaaaagatgagtttgactccctttcctctctttctcacccatatgatgccttctgtcatgttatgcagcaagaaggccctcaccagatgtggccccttcatcttggacttcccaaactcgagaactgtatgcaaaataaatttccgtttgttataaattaccattttgtgatattctgttatagaagcacaaaatgaactaagacacttgtatacacttgtacatgtatgtacttgtgcatgtgcatatacatgcacttgcagacccatatctcagacagaaaatctcccagtgtcacagtggagaagcttaaaacattcctaaatcatgagacaaagtttgcttcagatgagttgggagaacttcgtagattctgcccaaatgccactggcctcagaggccaagtctgcagtcatggaggccctcaggcatggagcatcctcctgtgcactgagcttggaggaaaattccaggatttcttttgtgtggcacttttgagagcagtcccatcaatagaaacaacctactcaccctcctgagagccaagtctgcaatcatggaggccctcaggcatggagcatcctcctgtgcactgggcttggaggaaaattccaggacttcttttgtgtggcacctttgagagcagtcccatcaatagaaacaacctactcaccctcctgagagccccatctactcagtgaacactcaatgagcatgagcaaactataatgaatgaagagtcatgtttcccaagtggggttcctgatgaaggagttcttgagtcaatgattctgacctagagaaatcttttgctggagaaaatgaagctaaatgagctggattaagactgataaacccattgccctcgtgctgccgttatattcttctacatccatggccgctattgtttgtcaataattgtactctttccagctgaggtcagacaaggtcttaaaatcattctcaatggtatgttctagactatctctaccaatcagagttggcaaatattttgaaatttatttaccatgcctgcctaagtgtagcatttcacaaacgtgttccacaaaacattggttctctggcttattagcaagtatgatgtaagagttctgtaattgtgaaaacttgggaaacattgtgtacaaatgttttgtcatgttaggacttctagaacctgtaaaatgctaatttactgtataggtctcccataatacgttttccaagtgtgtctcactatagaacttattgcgaagatcatatagagagacgaaaaagattatttgctgaataataatgtgtcctatagttgcctgaaaatgggctaagtgggataaatggctgctgatcctccaaattaaatgagggactgctcatgatctcaacttctcacaaggttgctgggcagctgtcatttttagcactcccctgaacaaccggcatccaagctcagattctacttacaatggcactttcatgctctacctatgaaaaggaagagaagtaggggatgggggtcctttcctggttcatccagttgcacccagcccaagcatgtgtctctgcaagataataagggaatgggagacctgtgctttttgctgacccatgcatgtgtgaccctgcctgcctcagtgatactttctggtgattgactaggccctttgcttgatagtagtgcctaatgtggagtgatcatggcagaaaagtttcactgtttcattcaagggttgcgaagcatactctctgggtttgaggacaaatcacccataatgctcatgattgaatggcctcattttctgtggcccataaatgcccctaaactgacaggcaatttgaattgatagccttttgattgtatggccagaatgtctctaggtcacagaaacactcctgaatgggcagttcatttggccctaggtagctagtcactgggtagttacaatgtctggaggccacagatgtaaacctgaatgagcagataatttggctacatcactatggtaaaaaaaaagaggctgagatacaaggctgcctattgttatatttctcagcttttctgtgtttgaactttaaagaagaagagaaagggacaaaagagagcccaccccacccccaaatctggtcatcactgtggcagctgatgcagcccaactcctcagattcaatcattatacaatgtaccagacagaggacttttggataaaatcaggtataggtaaaactgttacaattcatggaaataataataagacttctcccaagactggtagtaccatgcggggctgaagaaatctctgggagactggattatttgtctacatgataaaggggtgacattcatgcagttgaatgaagcaagtggtgagtaaaatggtgttcagtacagaactctgcagcagaatgactctgatgagcactgacccaacagtcaacaggagggatcagatatgtctactgacatatctggaatatgtcatatatgtctattcctgaaatgggggttcaggggaattaggttcacacacacatggggcaggagcatccctgagctcctgaatgtagaggtaatatccctacaaggttggaactgctttgaaacagcttgccattttagtatggtttacgtgggaatcttgggagtcaaagttcctgggagtccagtgataagccttgactcaaaatggtgaatgggaatatggtgcgaccttttaagtggaagatgcccctaacttttctccttcaaccagagaatatcataatggatgagataatcatcatgctggatccacatactctgtcttatgggataagagacatggggtcctacaaagtagcccaagtctggctggactggactcattcatttagacttgtgataatggcctccaaaacaattagtcttgtgacttactgtaagaaggaatactgatgaaaagtcaaccaaaaaaacaatcatgacttctggtctctctactctggggagggctcatgagttccaggagtcagaaggtggggaggggggaacagaatccccctctccgtgtgatgtcctccataatgcctatcccctacatcttacatggattcccagggtcatcttctctgtacctactgggatgggatgaagacaaagctaaccttcctctgcctacatgataccacatgatggggcacatgtgcagaggccaatgacagagggtggtgtgaaatctgaggggctcagactcccaaggaggtatccctgtgtcctcatgttggaggagtagatggaggtatggcttctcctttggagtacatcactgtcagccttgctccactcttcatcgaaggctgccatcatgtgcacacactgaacttggcagctgcccaatgggtgctcatctgggtgtggggacgaatggctcatattgctcagattaaggaatctggctttgcatccattggttcagcagacacagtcttcttctgaggtcatttgtgttgataaaatggtaattcctgggtctctgtggaatgtactctgagaagaggatagactgtctggctcctcccaagtggaatgtcaaacagtagttggttgggcatggatatgtctaaccccagaaaacattcttcttttcttcatcaaatagcaagaacattacaataaaaaaccttactttagaagagactgttttgtagttagagacagaaacagacatgtgtcaattcaatgtaattttgttgttgtacagagcgtcgttttttcttgtagagtgtattattgctgccctcacaatattggctctgaagttacaagcactggtgccccaaatgactgttaccaggggatggaagctattcaatgtgttatattatatgttttcagcatggccttttcctgttcaaaaagatacacttaaatat

SEQ ID NO: 96260 - DNA, 14225 bp, Homo sapiens
ttctacataaaggtctgctgttgtttttatgattgtttttaagccgtctgtggcagacactgttggttgtataacccaagatccctccttccaggccaggcgcagtggctcacacctgtaagcccagcactttgggaggccaaggcgggtggatcacctgaggtgatgagtttgagaccagcctggccaacatggtgaaaccctatctctactaaaaatacaaaattagccgggcgtggtggcgcatgtctgtaatcccagctactggggaggctgaggcagaagaatcacttgaacccagggggcagagggtgcagtgagcccagatcatgccactgcactccagcctgggtaacagagtgagactcggtctcaaaaaaataaaaacaaaataaagatcccttcttcctccttccccacagaactctgacgcagttcacccttccctggtagcctgtagttcaggggaagtgggcccaggtggaggatggcctctgatcagcctatgccggctgccggaactccattcctccggctgacaactggagtgtggtgggggtctgggcccaggggacacgaggggactttgctggatgcttcaggaaaggtgtacttgctcctgaaaaaggaactcaagccagagaagtctctgtctccttcccctggcacagtcatgtgaggagatgctggactacagcagccatctggaaaccctgatgggaaactgaggaaagatcagtgcagtgaagttgccggtacagagagaaggaaaggacctgggctggggatgctggaagaaccgctaattaatcagccctagggatgccagggtcctgcaacagctcgctatgtgaggtaatgcatgtccacattgttcacgcttgcttatttatttatttagggagtctcgctctgtcgcccaggctggagtgcagtggcgccatctcagctcactgcaacttccgcctcctaggttcaagcgattctcctgcctcagcctcccaagtacctgggattacaggtgtccaccgccatgccgcctaacttttgtatttttagtagagatggggtttcaccatgttgcccaggctggtctcaaactcctgacctcagctgatccaccaacctaggcctcccgagtagctgggattataggcgtgagccaccgtgccagcctgttcaagttctttaaattcggtttcctgttacctgtgtctagagacaccctcgtggccactccccacctactcagggcaccatgctcaccagcagggcccgcactgcctcagtcacagctgccttctcttcctccaggctccggatctgctcctgcagctgcctcagctcctgccatgtcgagatctggggtggatataagagaaaaggatttgaagcagccatcacccctacccttctctctggagcccactggccacctggacctgcggcgcagtgaggcagagatccctacctagccctcagtggccatcctcccctcctcccttcagtactggaatgccctgaggttcagctggccacacagatgcccagaattcagacacactggccgagcatagtggctcataactataatcccagcactttgggaggccaaggtgggtggatcacttgagatcaggagttcaagaccagcctggtcaacatggtgaaaccccatctctactaaaaatacaaaaatcacccaggtgtgatggcaggcacctgtaatcccagctacccaggaggctgaggcacgagaatcgcttgaaaccaggaagcggaggttgcactgagctgagatcgtgccactgcacactccagcctgggcaacaagagtgaaactctgtctcaaacaaaaaaaatctctaaactagcactttaaaaaatcatggctgggtgtggcactttgggaggcctaggtgggaggactgcttgagtgagcccaggagttccagaccagcctgggcaacacaggaagacctgcctctaagaaattttttttttttttttttttctgagacagagtctcactctgtcacccaggctggagtgtagtggcatgatcttggctcactacaacctctgcctcccaggttcaggtgattctcctgccttagcttcctgagtagctgggaccacaggtacgtgccactgcacctggctaagttttgtattttttaatagaggcagggtttcaccatgttggccaggctggtctggaattcccggcctcacgcaatctgcctgccttggcctcccaaagtgctgggattgcaggtgtgagccacagcacccggtctctacaaaaaaactttaaaaaaattagctgggtgacagattgacaccttgtctcaaaaacaaaaaaaattgttacaatgtacataatatgggaggctgaggcaggtggatcatttgagcccaggagttcgagaccagcctgggcaacatggagaaaccctgtctctacaaaaattagctgggcatggtggcacatgcttgtaatcccagctacttgggaggctgaggttggaggattgcttgtgcttgagcctggaagtctcacggagcctgagaggctgccatgagccaagatcatgccactgcactccagcgtgggtgacagagtgagaccttgtctccaaaaaaaaaaaaaaattattatttttttgaggaactgccatacggttttccatggcagccgtaccactttatacacattcccaacagcaatgcacaacgattccgacgtttccacaacacaattcttgccaacacttgtccttttctgttttgtttttaataatagctacttgaggctgggtgtggtggctcacacctgtaatcccagcactttgggaggccgaggcaggtggatcacaaagttaggagttcgagaccagcctggctaagatggtgaaaccctgtctctactaaaaatacaaaaattaattgggggtggaggcgtgcgcctgtaatcccagctactcaggaggccaaggcaggagaattgcttgaacccgggaggtagagattgcagtgagccaagactgcaccactgcactctagcctgggcgacacagcaagactccatctcaaacaaacaaacaaacagctgctcaaatgcacgtctaaactactactttgaaaatgaagagaatagccaggcgcagtggctcatgcctgtaatcccagcactttgggaggccgtggccagtggatcatttgaagttaggagttcgagaccagcctggccaacatggcaaaatccatctctactaaaaatacaaaaattagttgggtgtggtggtgcacaactataaccctagctacttgggagactgaggcacgacgatcacttgaatcaaggaggcggaggttgcagtgaccggagattgtgcgactgcactcaggcctgggcgacagaggaagactcagtcttaaaaaacaaacgaacaaacaacaaaaacacacccctggccccccccccgcaaaaaaaaaaacaacaactagcactttacaaatgaaagagaatataattaaagaacaagaatgcatcacacgtggtaagagcaataattgttaatgaaaccggtttcaattttgggtgtgtgtactgggtcaggatgtgaaatgtatttcttactcttggccacaaagtttgaaaaagcctgctaaaggatgtgacgctctaaattatctacatggccatcaaatggaattttccatcctacctccaggcttttgtatattctggtcccctacttgggatactcttcttccctcttccctggtgatttctcaatccacagatctttgtttaatgccacctcctctgagaagtcctcccaggctgtcctccactttgccttcacagcatttaccacagattataatgagtatatctgtctctatgaatttgattactctaggtagtcaaatttaccagaaattgtaattagtatatatgtatagttgtatatgttaaatgtcttttagtggggcatggtggctcacatctgtactcctagcactttgggaggccaaggtgggtggatcacttgaggtcaagagttcgagaccagcctggccaacatggtgaaaccccgtctctactaaaaatacaaaaattatgcagatgtggtggcatgtgcctgtaatcccagctactcgggaggctgaggtgggagaatcacttcaacctgggaggcagaagtcgcagcgcactccagcctgggagacaagagcaaaactccatctcaaaaaaaaaatgtcttttactagactgtgaactcagatcatgagagggcacagcagggtacttaagattgtggagtctgggtgtggtggctcatgcctgtaatctcagcattttgggaggccagggtgggaggatcacttgggcgcaggagttcaagaccagcctgggcaacatagtatgtccctgtctcaacaaaaaatacaaaagtttagccgggcgtggtggtgtctgcctgtagtcccagctacacgggaggctgagtgggaggattatttgagctcaggaattcaaggttccagtgagctataattgtaccactgtactccatcctgccatcctgggcgacagaacaacaccctatctcaaaaaaaaaaaaaaaaaaagtggattctaggccagaaagcacaggttaaaattcccactctgccacttcccagttgcatgacctagcgcaagtgaattagcttctcgaagccttagtttcccctctgataaaatgggagaaataatggcacctacttcatagagttgctgtgaaaattaaacgaggttaaagtgaataaagcacttcaaacaggctgggaggggagtccaagagaggaatgggaagacgtggggaccccactatcgttagcacctcaacacagagatattgtgaacccggtcctaattcccttttataagtgctagcaattttattattattcaccgcatatttgcaacatctagaacaccggaatatagcagttgcaccttaagtatcagtttaatagaaccattcattaatggattcattcattcattcattaactctatttaactgcctgctatgtgtggcggaggtgcacaactctccctacctctctctctaaacgcaagagctccaccacaccccagccctgaccccgtccgattcacacttggctccccattttcctttgtggtcttagggaaaggctggcatgaggttgcagcacggagggcaatgtcacatagcaagttcctaaaggacaggaggtacccagcgagcagtatgaaacaagcgcataatgggtgtccaggacacagtaggcattcttggcacatagtagggcctcagcactcactggacaactggcacataagtgggtgccatgcacaagacgttggctaacttgggaaataactaaaattcctactacaggttcgccccctgccggagggcatcttgcaaacccaattcttccgtaaagcaaacgtctgcgccccccggccggcgcaggcgcactcacgatcgcgggcaggtccgccgagcgcagctcccccttgcggagctccagggcgtgtgcggcctcttctgggcatgcgcagaaccgctctatgtccagctgagggagtgcgctgtagccctcgcgcgcatactcgtacaggaggttccggtttcgtttctctgtagtgaaacttctccttggactatcgttggagatgcagcctccccggggccggaacccccgacgagtcagcaaaggccacaagcgccgcgccatggacgcagccatcttggaccggggacaaggcggcacttcgtcccgcccactccgcgtttagaccaattgcaaggcagcgaacctgaccgtgacgagccaatcagatcctgaggaaagttgaccgcgatagagtccttcgtcgcccaatcgtcgtctgtgtcccgcctcttcagtgacgcgaggcagaaccagccaatccctgcacggatagcgcccggaagaggctagaagctggattcagcgtgtccgcgacctcacctttaggtsctgtgaggtcggtggaatcctggggtcctccaaatctaccaggccatctccccagtttcccagttcttcctgygtgcgggcgagagtggttgggccctcgggaacccactcagagcgagkctaaatttacggagggactttctgttagcagcatgagggcctgtggttagacctatagaggtatttcckttgatttaagccagaaagtcctgagagcggatcggggagcatttgcggatcggtcactttttcctcctttctgagtctcttatcccctaccacagggacggcccaggyggcaggatgtcctggtctggccttctccrtggcctcaacacgtccctaacttgtggtaagtgggggacttgggcttcagggacgaggctagagggggagggttattcgctcttggacttgtgtgcctccgtcggagccccgagggaaacgggggtggaaaaacacggtggggttttggcagagctagggctgctagagcaagaggtgggaagcagctgcatggagggctactgcgtgtcaagcggcgtttgggtcagttttattatttatttatttaagatctccctctgtcgcccaggctgaagtgcagcggtgtgatcacagctcactgcagtctcgacctcctgggctcaagtgatcctcccgcctcagcctcccaagtagctgggaccacaggcctgcagaaccacaaccagctaactttttgattctttgtagagagggaggtctccctgtgtcgcccagtctggccttaactcctgagctcaagtgaccctccacagcctccaaaagtgctaggattacatgcatgagccactgagcctactattattttaaacagcattaaaaataatgcttcctggccagccgtggtggctcacgcctgtaatcccagcactttgagaggccgaggtcaggagttcgagaccagcctgaccaacatggtgaaaccccgtctctacttaaaaatacgaagattagccgagcgtggtggtgggtgcctgtagtcccagctgctcaggaggctgagacaggagaattgcttgaacccaggaggcagaggttgcagtgggccaagattgaggtactgcactccagcctgggcgacagagtgagactttgtctcaaaaaaaaaaaagaaaaaaaaaaaaaaggtaatgcttccttgaagaataaagagttacttttgtctgtagataacattagatgtgaacaaatgcatctttgtaaagtgctttaaacaatgcctaaaacaccaaaattgagttgctactactctaagatctgttctctgggataataacccctttcggccctctccaggcccagctctggttccccggctctgggcyacctgctccatggctaccctgaaccagatgcaccgcctggggccccccaagcggccgcctcggaagctgggccccacggaaggccggccgcagctgaagggtgtggtcctgtgcacgtttacccgcaagccgaagaagcccaactcagccaatcgcaagtgctgtcgagtgcgkctcagcactggccgcgaggccgtctgcttcatccctggggagggccacaccctgcaggagcaccagattgtccttgtggagggcggccgcacccaggacctgccaggcgtcaagctcaccgttgtgcgtggcaagtacgactgtggccacgtgcagaagaagtgacggctgggggcacagtgggctgggcgcccctgcagaacatgaaccttccgctcctggctgccacagggtcctccgatgctggcctttgcgcctctagaggcagccactcatggattcaagtcctggctccgcctcttccatcaggaccactattaagccataggagtcctgggggtgcaaagggtgcccctctgtcaacacccttggctcctgtgtttagaggggtggcctgaaggaccttttctgctgggacaagacactgtactgccctctgctgggaaggggttttaataaacagaccctggcgcttgtgatgtaaatccccttgtggagtatttgccctctgtgtggctgtggcagtggacatctctgagcttcagtttcctccagaaaatagctccattggtggtatctcctttgtttggtttggtgaagattaaattcgatgctctatgtgcataacacgcacggagggctcttttttttttttttagacaaagtctcactctgttgcccaggctggagtgcagtggcctgatctcagctcactgcaacctctgccccccgggttcatatgattctcctgcctcagcctcccgagtagctgggattataggcacacaccaccaggcctggctaatttttgtatttttagtagagacagcgtttcaccatgttggccaggctggtctcaaactcctgagctcgggtgatctgcccaccttggcctcccaaagtgctgggattacaggcgtgagccaccacgcccggcagagggctactgtattttaagcttaggagtcaggtaggtggcacagaggcccaggtcttcttcctgcaggccatgggttctgggcacataaactctgccctcaagcatggacagctggaaaatggcagtaattgtaatgttgatgtggaaggggtgtggaaaggattcaatggggtgtgctgctccacacccgggagctgttcttttattttatacgtgtgtgtgtgtgtgtgtgtgtgtgtgtgtttgtgtgtgtttgtgtagagagagagacagagtctcactgtgttgtccaggctggagtgcggttctatgatcaaagcttacttcagccttgacctcctgagctcaatagatcctcccgcctcagcctcctgagtagtcaggaccacaggtgtgtgccaccacacctggctaacttttccatttttttagagtgggaatctggctttgttgtccaggctggtctcgaactcttggcctcaagagatccttccaccttggcctcctaaaatgctggattataggtgtgagccaccattatattatataataatataaaattattactgggttcacctgagctcaaattctgctccccgtcataattgctatgagacctggctatgttggttccctctatgggcctcggtttcctcccttggaaaatggcactgatgataatgctgactgcacctgatcatgtttttggccatgtaagatttaagaagtggggccaggtgcagtggctcatgcctgtaatctcaacactttgggaggccgaggtgggccgaccacttgaggtcaggagtttgagaccagcctggccaacatggtgaaaccctgtctctactaaaaatacaaaaattacccgggcatggtggcatgtgcctataatctcagctactcaggaggctgaggcaggagactcgcttgaacctgggaggtggaggttgcagtgagctgagatcagcaccactgcactgcagcctgggtgacagagtgagactctgtctcaaaaaaagaaaaaagaaaaaacaatgttggaactgtgtttatatcattgggctctggagcccagcactgctccaagccctgcctcccctacttactggctgggtgaccttgggcaggttgtttacactctgagcctggaccaaatggcgctgataagggtgcatgcttgagagctgtttggagcatcatagctgtctccgagttcctcttgacgctcaacacacagcctcctgagggtctcctgattgtaaacatgaggccacaaggtcttttaggatcagagctggtggcagataagtgcactgattacagataaaaattgcccatcccctcatatttggcaccagttttattgagctagtttgttggccatgcctagctgagaaatagagaagtggagggagatggggggatgggagagcttttcctcatggcacactctgctccaggagtctgtatacaggagtgtggagaaaaggaagtgttaccttgcaggaagttgcccccaaagcaagggcaggaggtgggggtgggggacttggcctctgatggaattctggaattctgatgagagaggtgctagcctgacctgaacaggagatgctgacaggcagtgctgggcatgttgcacagagatggctggttacacagccccgtggcaggatcccagagtgccgagaccagctgggtcgtggagaccctaacccagtggcgctagaggaattaaagacacacacccagaaatacagggtgtggagtgggaaatcaggggtctcacagccttcagagctgagagcctcgaacagagatttacacacatatttattgacagcaagccagtgataagcattatttctatagattatagattaactaaaagcatttcttatgggaaataaagggatgtgccaaaataaacggatgggctctggctagttatctgcagcaggaacatgtccttaaggcacagatcgctcatgctattgtttgtggtacaggaacccctttaagccgttttccatcctgggtgagccaggtgttccttgccctcattccagtaaacccacgaccttcagggtgggggtcatggccatcatgaacatgtcacagtgctgcagagattttgtttatggccagttttggggccagtttatggccagattcaggggcctgttcccaacatgtccccttttttgttttgcaaagtgataaaagcaaaggcagctttgtcacggtgagctacttctcacaggagtcaggatccgcatctgcacactatacaaagacaaacaacacagagtaaaagcacaatcatcattgaaatcacagagcctccaagtgtttttatccatttgaatgggttactagctgctaatctgtctgcagctccttcaagcactccagttcctggcattaagttcacgtgtgcctgggatactttaaatatttgttctttcaattttgcaatatccaaatacaagtttgtagagtggccttctagatgcttttttattctttcccaaattttgattttattaagagctattaacagtttccacaaatgcttatgtttagctcctagagcaggccatatcatttgaggctgaggtgccactatactgccatggttccagataataggaactcttgctgtatttcttaccatttctatcatctgaccattttgttcagatgagctgatcacagtgtggccatggcatgcagactgagaggtgcagttcaagctaaacatccccataggtgaccaattaataatgattccataggaattgttgtgcagcacctctgcctgttctgcaaagcaatcttcctaaacaagtacgttcatttttgctaactgggtccaatcctgtttacaaatatgtttttgagggcagtatgcctcaattataggagcagatttattatgagatcagaaagcttgtataactgtgtcatagagtgattacatccaggcattattgccagccaagattgataaatatgcccaataagtataattgtcctctgtgtcagcccttattgaaggaatactcatggcagtggtgatcatcgctatcatagctaccattaaattactcattgcgactggttgtcccactttcctcaggttttcttccaccatctgtgacagcttcttgatctgtctccaggtgggtggctgtgtttgacaggtgttgctcgtgacagttggggtcttcctcagcgtcagtctcgacatggctgcaaccgggggtgggggggggtcctcagtttcctcccggaatctcttcctcagcatctggctcatgataaggtttcaggtgtcttgatggtatccaaatcggctgttgagtcagtcctggagaaacacaagcataacctctaccccaagttattattttacctatttcctaactttttgttattggatctctccaccaaactagttgttctgcttctgtctttgcagctggtttctgtagatgctgttcagctactgataggatctggcctttaggcaggctcaaaaaatttaaagttaacaatgctagattcagttgcatatggggtgtcccgtagtccttgttttccccccttttttttgcttttgcaactgctgtttcagggagagattcattctttccactatggcttgtccttgagaattatatgggataccagtaatgtgtttaatattccgtatagagaaaaatgtagctagagctcggctagtgtagcctggggctttatctgttttaatagaagctggaatgcccatcactgcaaaacactgcaaaaggtgacgcctggaagaggtgtatgagccctaatgtgagtgatgtaaaaagggtgcattctactcctaactgctgtttgcagttgggtaaataaaatcatcagttgttcatctgcaggaaattgtaactgagcattttcagttaattgtgtggaatgaatcacgtatgaagaatcagaaatcacattaataggcatatgaaaagcagtcactacctcaattacagctacaggctccactttttgagctgaagtatagggcatctgaaaaactttactttttgagccagaataagaagctttaccattactagacccatctgtaaaaacattttcagcaccttcaattggtttaaatttagttattttagggagaatccaattagttaatttcaaaaattaaaacagttttgtttaggaaaatggttatcgagaatacccacaaagtcagcttaattggtttgccaagtaagactatttataaaagcttgctgtatttgtgcctttgtgagagggataataatttttccaggatcatatccatgtaatttaacaatccgagttctcccatttcctatcatagtagcaatttgatccaaataaggagttagagtccgtgaattagtatgtggaagaaaaagccactctacaagatctcactcttgaacaataacaccagtaggtgaatgctgagttggaaaaattagcaaatctagagtcttctctggatctaatctatttatttgagctttatggacttgcttttcgattagccgcagctctgcctcagcttctcttgttaattaccgagggcttgtgagaccaggatctcctctaaggatagaaaatagattactcatggcataggtaggaatgcctagagcaggtcgtatccaattaatgtcccctagtaatttttgaaagtcctttaatgttttcaattgattcctatgtatggttgctttctgtggcacaatggtagtgtcatttactaaggtccccaagtaggagtaaggagtagtagtctgaattttgtcaggagctataattaaaccagcgcaagaaatcgaattttgtaagtgatcataacattggaataatacttctcgagtgggggcagcacaaagtatatcatccatataatgaataatgtaacactgtgaaaacttttaacgagtaggttcaattgcttgccctacataagtctggcaaattgttgggctgtttaacatgccttgtggcaatactttccagtgaaaacgcttagcaggctgcaggttgtttactgcaggaattgtaaatgcaaactgttcacagtcttgctcagctaaggggatagtaaagaaacagtcttttaaatctatgactattaaaggccaattttttggaatcatagcaggagaaggcaatcctggctgtaatgtacccatgggttgtataactgaattaatggctcttaagtcagttaacattctccgtttatctgattcttttcttaattacgaaaactggagaattccaaggggaaaatgttggagctatgtgtccgttttctaattattcagtaactaattcctctaaagccttcagtttctctttacttagcggccattgttctatccaaattggcttatctgttaaccattttaaaggtataggttctggaggcttaacaatggccgccatcaaaaataatatcctaaaccttggcggaaacttgtatttctgcttgaagcggttccttcaaaccttgtaaattttttcctagtcccatactagggacataccccatttcatgcatcatatgttgactttgagggctatataattgttctggaattagaacttgtgctccgcattgttgtaataaatatctt

SEQ ID NO: 96261 - DNA, 13235 bp, Homo sapiens
acagtaaagctgtgtaagtaacagagcgactcccttgaccaaaattttaaaaggatttggctaagtttcctgaaacagatcacatgtgacatcctgctatatacaggcaaccatttgcagctaaggaattgaagccagaagtgcacaaaatactgcaagatgtcatcagtttagttaattttatgttttaaaaaactttaaaatatagttaatttaattgtttaaaataaattgagagaataaattaacctctcaatttatatttacttatggatgtattttctacagcacagaggtttgcttgtggcaaagtattaaaacttagaactaaaaacatatatttacaaaatagacaagtgttccaaatatgctaaccttgtctgtgatgataagggggctatccatagcatgcatgctacctctcaagtatttttttaatattaataaacatggtggagcaactggcttgagcgattggaaacaagatgcaggaccccaacgcagacactgagtggaatgacatcttaccaaaaagggtatcttgccctccaaggaaagtctgaaagaattggaaaatgaggtggaagaggagaagcgcatcctccagcagtcagtggtgacaacatataaagatagggctttgaaagagctggaagatcatgaagatgagtttaatgaggaggacgaacgtgctattgaaatgtacacacggcagagactagttgagtggaaagcatctaaactgaagaatacatttggagaagttttggagatctcagggaaggattatgttcaagaagctaccaaagccggtgagggtttctgggtcatcttgcacctttaccaacaaggaattcccctcagtgccctgataaactagcacctcagcagacttgccaggaagtttcctgatgtcaaatttatcaaagccatttcaacaacctgcatacccaattatcctgataggaatctgcccacaatatttgttttcttggaaggagatatcaaggctcagtttatcggtcctctggtgtctggtggcatgcacctgacaagagataagttggagcggaaactgtctgaatctggagcaattaagatggacctggaggaaaaccctaagaagccgattgaacacatgttgctgtcctcagtgcggcgctctgtccccatggggagggactgcaattctgagggtgactgaggctgcagctgctatcacatgctgaactgtcctgtaacaaattgtctggatttttaaaaaaaaggaaaaagcaagaatgaatccttctggtttttagctttgtataaattatgtttcaaatctttacattttagaaataatcattgctggaactgttaacattttttggaactctttttttttttttttttgagacggagtctcgctctgtcgcccaggctggagtgcagtggcgggatctcggctcactgcaagctccgcctcccgggttcacgccattctcctgcctcagcctcccaagtagctgggactacaggcgcccgccactacgcccggctaattttttgtatttttagtagagacggggtttcaccgttttagccgggatggtctcgatctcctgacctcgtgatccgcccgcctcggcctcccaaagtgctgggattacaggcgtgagccaccgcgcccggcctggaactcttttaattatagtatttcctctaaaaaattaaaaacagctattggtatggcaagaataaaaaataaaaaaaacttatcccttcaaggtgaaagttaatgtttcaataatgaactagaaattttttttttttttttttttttttttttttgagacggagtctcgctctgtcgcccaggctggagtgcagtggcgcgatctcggctcactgcaaactccgtctcccgggttcacgccattctcctgcctcagcctcccgagtagctgggaatacagatgtgatttagatgcaaaaacaagataaatgcaatcatcatcaatttttttaaatctcctattagtacattctaaaaagttggaagcaagatttttaaaccagtttaaaattattctaaacaaaaaatttcagtggaatttgaacgcattttgataacaataaaacaacagtaatattgcctaattgtctgtaagaactactgattgacatcaaagaagatggaaatctactagccaaattttaacataagcattttcaaatttggtgaatgggaattacttaaaacagccagtaaggaaattcttccatttggatttatgcgtctttgtgagacatgttttttagttgcaaaaaccattacaacaaagtgctgaaaagctgaattgagaaacacatttgaatgttttaacaaaagccaaagaatttttttaacaaaagtttgtaaaatagtgatgcatactcaaatataattataattttagtgagagcaaaaacttctgtactattaataatttaaataaaaataaagctatgattaccattagcgtagctttttttttttttttttttgagactgagtctcactctgtcaccaggctggagtgcagtggcacgatctcggctcactgcaacctccgcctcccaggttccagcaattctcctgcctcagcctctcgagtagctgagattacaggtgcatgacaccacacccagctaatttttgtattttcagtagagacagggtttcaccgtggtggccaggatggtctcgatctcttgatctcatgatcggcccgcctcggcctcccaaagtgctgggattataggcatgaaccaccacacccagccagctcagcctttagggttataattggtataggttttatgatatacataatagatattgacatggtagtttgtctataacttacaaatgagtaaaaatacagtgaggatacacactcaaaattcttctactaatgggacatgcaaacaaaacttttggaaggcagtgctatttgtgatgtattttgtgaacccacagcatcagtgtaacatgtgacattgttggaaatgcaaattctggggcttcaccctaaacctactgaatcagaatctctgggagagggggacaggaatatgggttttaacaagatctcaaagtgattatctaaggcatgatacagatcaaatcaaaacactcctctttaaaagctgcctgctgcttatgaaattgaagcagccttctcaccatatcatttaaaggctttccaaatacagccaagcctcccttaatacagccaagcctcccttaatggcctgtgtccatgactcctcaccacgttggaagccccaggtattcttgggtgcacccttctcttctctcctcttcttcacctggaatttctccccagtacaattacgtctgcttaaccaaaacctttacaatatttgatgcctacctcaaaagttacctattctaagaaaacttgcagaatcttagtgaaaaaaaaaacctacgtatttttcccccattcttttttataatgcccatggcatcttttttgttcatttctccctggactgtattgcatcatgcattataaccatttgcgtacttatctaattccttctaaagattgtaggctcctagagagagacttgcttaatctttctttataccctagcttagcacgggcctggaaggctgtaattgctagatacagaattgaaataaaattccacaactgagctcagcccacactgtcttcttcctttatcattctattggggacactacctcatcatgaagaacctgaatttcttgagaactttccacatacttgggtcactcactggctttctcttcccctcagattgcatttctgagttgcacaatctcttctgatcacttagtcatgattgcaatttaaacactgaaagcaaatgatgatttaaaaaaaaaaagcttgccatgtttgaggtcttaccagagccagatactgtacaaagtgctttagatgattatctcattcagtcctgacaaaacctctatttgatggacatattaccactcccattttaccagatgaggaaactgaggtgcagaaagggctactagagtagtaaggccaggattggaatccaggctggctgactacagaacctgcaaaatcaacctctccattaccctgctaagaatagaagatactactccacagccatccttatattaaatccaatccctagccctcctaaccacatgaaaaagcacatgcattagagtcaatcttgatgacaatataaaaactatgattttactatgtaaattcaatttaaatctagatcaaagaaatctaaattactcttcatttaggctgtaatcttatattccaaagcttaaagcttataagaaagctttatctaatttaagattactagctcaaatataagtacagacttaatactacttttcctctaatcagtacaaagagttctattcttcccatagtaaaatatgtcatagaacttgaactactaggcaatcactatcttttctttataagaaaaaaaagcttttgaaatatgtaccataacctctgaaaaatacaattatcctcccaaagaaattaggcatttttttctgacaaaaactatgggcaattgatctatagttcttttcttcctcaaaaaattattgtatattgtgtaatgatcattataattaaaaattaagatggcttgcaataattccaccattatttgattcaaaatctttataaaatattggcattttccaacatttatttttcctgtctatgttccatttaaggccaaattttcaaacccagctgccaaattacacatataattactgcatttgcgcacaaaaatgtgataattgcttacacaatttcagaggccagcttgaggctcctttccaaatttgttttacatgtacagtgcggtgtatgtagttttatatgaaaattggaaaagtaaaattcatgatttgtctgggtgatgtgtgaaaatggatacaaaataaagcctttctataaatgcctgggcytgtcttcatattttctcccaatagacctttacaaaagtcttatagagcagctcaaacttcagctagtgttggagcaatggcaatgaaaggggatgatgcctggtataatgccttaaatagttcaggtgcccattttgttgatcgacatattgtcatgaggcattcttctgtctataaactgctcccatcaacctgggcaagaaagataaaggtaatataaggcccgcaatcatacagtcagccaagatgacgccagcctcaatagggcagagtagttgagcactggtggctggggatttacccttccaactttgcctgacagttgattttacagcttggcaagcatgcactatggatatagatcacagtgggtattcctagtggaagctttggttcaagaaaaggcaaagaaacaagacctagctagtcatacgcattagtgagatgatctaagatatttgtgtttcaaaacaaaagtgggtggaaaattatggccagttgcacatgaaccaatacctatcctcaaaagatctactttccaaactcaaggattatgaatctgatctctattaccaaatatctgactacagaactgaccagaagcaattaggtcagaagcctattaaatactgaaggaagttctatttgagaaatctccagctattttccatagaggttatactaatctacattcccaccaacagtgtagaagtattcccttttctcaaataactaacaacccccctcaacaacccccctactgggcatctacccaaaggaagagaaattgttatatcaaaaaaaaaaaccttcattcttatgtttattgtagcactattcacaatagcaaagtcatggcatcaacctatgtatccatcaacagatgattggatttaaaaaaaaaaaaaaggtgctatagagtgcttgcagcgcgcaggcgcagggctctctccttttgtcagtcggcaacgcctgcggggccagtggctctgtgacagcggcggtggctggactctggcgcaatgagcggcttcagcaccgaagtgcacaccgcacccttctccctgtagtaccgagtcttcctcaaaaatgagaaaggacaatatatatctccatttcataatattccaatttatgcagataaggatgtgttccacgtggtggttggaagtaccacgctgtctaatgcaaaaatggagattgctacaaaggaccctttaaaccccattaaacaagatgtgaaaaaagaaaaacttcgttatgttgcgaatttgttcccgtataaaggatatatctggaactatggtgccatccctcagacttggaaagacccagggcacaatgatgaacatactggctgttgtggtgacagtgacccaattgatgtgtgtgaaattggaagcaaggtatgtgcaagaggtgaaataattggcatgaaagttctaggcatattggctatgattgacaaaggggaaactaactggaaagtcattgccatcaatgtagatgatcctgatgcagccaattgtaatgatatcaatgatgtcaaacagctgaaacctggctacttagaagctactgtggactgggttagaaggtataaggttcctgatggaaaactagaaatgagtttgcttttaatgcagaatttaaagataaggactttgccattgatactattaaaaccactcatgaccattggaaagcattagtgactaagaaaatgaatgtaaaaggaatcagttgcatgaatacaactgtgtccaagagccccttcaagtgtgatcctgatgctgccagagccattgtggatgctttaccaccaccctgtgaatctgcctgcacggtaccaacagatgtggataagtggttccattaccagaaaaacttaatgagatttctctggaatacaagctgatattgctgcatcgtattcatctggatgggaaaagtagtagcttttcaaagctttaaatttgtagaactcatctaactaaagtaaattctgctgtgaccaatccaatatactcagaatgttatctgtttaaagcatttttcaaatctcaactaagataactttgagcacatgcttaaatatcaaagcagttgtcttttggaagtcatttgtgaatagatgtgcaaggtgagcacacattggatgtatatgttaccataagttaggaaataaaattattttgctggaaaaaaaaagtggcatatatacatcatggaatattatgcatccataaaaaagaataaaataatgtcttttgcagcaacatggatggagctggagaccattatcctaagtgaaataactcagaaacagaaaatcaagtaccacatgttctcacttataagtacctctgtaaacagagggtacacatgggcacaaagatggaaataatagacactggtgaatccaaaagaggggagactgggaggagggtgatggttgaaaaattacctatttgatataatgttcactgttcaggtaatggccacactagaagcccaaaccctaccatatgcaatacgtccatgcaacaaacatgcacatgtaccctctgaatctctgaaaacaaaaaataattgagggacattcttctgccaaaggcaccccgaaagtatcatattatcctcctcaatggctagttgaaataatcataactaacatttcctgagcactcaatatatgttaaataatgttctaagaattttgcatgcattcatttcctctttgcatgcttactaattttaagaggtaagtactattattgtctttgttttacatctgaggagactgaagcacaaagagtttaagaaacttgttgaatgtcatacaattaaaaagtcccaaatccagtattagaacccaggcatacaattaaaaagtagcaaatccagtattagaacccaagtatacaattaaaaagtagcaaatccagccgggcatggtggcttacgcctgtaatcccagcactttgggaggccaaggcgagtggatcacttgaggtcaggagtttgagaccagcctggccaatacggtgaaatcccgtctctactaaaaatacaaaactcagctggacatagtggcacgtgcctgtaatctcagctgctccggaggctgaggcaggggaatcacatgaacctgggaggcagaggctacagtgaaccgagtgtgtgccagtgcactccagcctgggtgacagagtgagactccgtctcaaaaaaaaaaaaaaaaaaaaaaaggtagcaaatccagcattagaacccaggcattctgactgcaaagcctttactcttaaccctaatagcatactgcctcccagatggagccaaggaaaagagtgggcaaagtatagcttcctaaatagaagaccttgagcagccagcatgaccatccaaagaattcactactggaatctagtccccattacttctgtccagcaggaatgatactgtcatagactaatggccactgtgggttgtttcccactcttctcttttccaaatgggattctttttttaattaaagttatcctgttctttcttcatcagtttatatggattgtgttatagatggataacatattattaacgaaagtccctagactatgagacgtttcagccagacatgaaggagaggatcccacatcacccagagaatcaaaaggaacttggagctaacatactaaatcttgagttgtttctagtaggaaaacatagatgtttctgagagtatggacaggaagaaggatttgtatgggtactggacagccagtacccattggtaaattggtaatttatccagcaacctattccccctttctaaaaatatctacctctttctcagatggttcattggctttgggcacctgaacctcatggccagtccaagaaatgaatgagtcctgattagtatgcgaatcagaataatcttaccttatcctcacatcgaccttgacatgacaactagcttaagaatggtcagtaacccaatcctacaccaatcagtacatagtacctattcaccatgattggttcagtttagtccaaacaatgcaatgaacaaggattttgttcactggttgggggaaaaggtaccacaaaatcagtcatggaatgaagctggacctgggtagtagagtgcaagaagaaaaaaatactaaaactcagtccttggtgatatcactgaactagatcaaccaatagtgaaactcttccaactcctggacttctgagccagtaagtctccttttctacttaagccagtctgagttttgctttctgttaattaatgggtccctgagttcagcagagggtctcaggggctgaaaccagactcttgagggagctccagcctcttcctagaggtgaatgtctctggagatggagcaatggagcactcctacaagtgctagagaaactataaactaaatttagtttctgctatagaaaggaatttctcctgctgagatgaagtagcatcattggagtgacattcaaaggaacaagcagcaaagctagaacagtaagaaacaaatccctttttcctcctccaaccttggagtcaccctgaagtgcctcctgttagcaaagcttaactgggatcagcttgcaaagcagaagtgtggtttgtagagtcccaattctaccatcacaaagcagggggcagatttggagcttagagataataacttaaatactatcacagagcagttcatttttactgtgtggaggaggaacgcatagtcagactgtcagagaagagaaaaataaaaataatccagttcctacatctcccatgcttcttacaccaccacctataaaagctttttgaacactgtgaagtatcatttaaggaaaggtgctacggttattatttcttctgggtgacagatttgaatagttcttccctaacagcttgggtgtgaagagctgacctgttgacatctcagcagccatatttgtatatgaactcttacttgccagaaatatcatagtatttctgttccgacagaaatgtgagaatgctttttcatcaagaaacatcctaggcattgtgatttttctccatagatatttatggagccatcatttgaacatctctattttctcagggtgctgaaggagaaaatgttgattatagaatattctgaaaatcacccagtgtgtataaagctaataaaaagacatattgtggtcatggtaggagtttcaaagaggtaataattgtggcttcactgtgcctatgtgtttggcagtctttcttttgtataaaatgtccgttcgttccattgtccacatctctgttgactgagttaggacagatttaataagaaaatttatattcttatgccaattttggcagctctaatgacataaaagtctttctgatgtttttcctagggcagtcaaaagcagtggtcaaccagaaacagcgtttagaaactttctttaactgccagattggaagatcgccttagaccagtgctttaaactccagtatttctaaatgagatctaaaggataggtatatcctttaggatataacttgatggcttattctggaaaacttcttcaggataattggggatgtgcaaatcagaggggaaaagtgacaatcatcttagcctctcacaagcctagaagtgacataaaagggagaaagaaaaagaaagaggcaaacctatttctagatctaagggttaacctaaacctctccccaaaaaggagagataatttaaagtggtaaatgcaactcagtcactaagcaaagtcatatcacatccattcaatgtcctcctacacatgtgtagttcacagaatggaaacatataataaacgcctgagaatttaaaatgcttacttcacaactattgcccaagtggcccatgtttggttgagaggtcattaaacagggagtaataattaaaagtgtgggctcttggactgagttgcataaatgcaaaactgggtgtttcttattaataaactctatgatattgggtaaattattcaactgtttgtgcctcagtttctaatttgtaaaatgggaggataatatgcctacctcaaattgattgggaaaaatagaatgccacaaaaatacagtggcttaaagatgatacaagtttttttctcatgtggcagcccccagtggatccagtagtggagaggttctgctctactcatccattcacacacccatgtgccctccatcttgttactctaccctcccctaggtcattgtcctcatcttctttgtggaggttgggtcatagaattccagctcaaaggaatggaaatagaacactggcccaggacaaagggattttcttttaaggaggtgacctatagttgcactcaccatttacactcacatattggccctaacatgttcatgtgcttcaaaggaagctgggaaatatagtggctagttggaaggccatgtgtccagctctattgttttgagaaaagggagaaatggattttaataggcaaggagagtctgtcatcctacctcataaggttgctgtgaagtaaatgagataatgcacttagaagaactgagacatttagtgactgttctataatagctaaatattggtattgccaggttaacaagctcctctttctccttgtttcaggtacaattccctttttaatgttagccatttgactttctttggccaatgaaatgttcatggcagtgacgagtatcgtttctagacagaaggattaatagtcggtatgccattcaccctgtttttgtgtttgtttttgtttttgttttgttttgctttcccctgccatggtaatcatggaagcacttgtcagcctggatccctgagtaaatatgatgagaagggccacctgaaaactcacagatatgtaacatgaacaagaagtcactgagattctaagattgtttgttactgcagtgtaacctagctcatcttgactaatacatgagggccctgggacatctgtcagagaaggaattttagaaggctccttcaccttagagttttggaatgtcaattaatatcattaaaagtaaacatgaaaactggctgataagcttatgcatcccttagctattgtgaaatcataactgattaaactgagataccataggtgttaatgactatgtatgcaagacaaaccaatctacgtgggcttgatattatactatagaaacacgttcattgattgcaaaggtcttccttccaagactgcatctgaaagcaaactgacatttagaatcttctgattcacctcccctgaaatagagaagattgccatctggccacagctgtgaaaatgccaacctcaagggataggtcctgaatggaaattcaggccctgtgaaattttttcatttccttaaatttagattttagtatttcttccagatgaatccaatattagcaattcaaagaatatcatgtagctgttaaaggttgtattcacctgcaagaacctagagagcagatagtgtaagtagcttgttaggatgatagacataaaaccattgcagctattacttatgatcgtttaccacattaattagcaaagtattaagtgttctacccacataacctcatttaatcttcacatcagtctttttaaggcagatactactagtagtcccactttacaattgaggaaacatgaacttagaaaagttacatagacatttattttcttgctcatgttacatgcccatgggttatgtaaaatgactaaagtcagcagtccatgaaagacgtaattggaatgtgaactcaagcatatgactccaaagcccgtttgttgagccaataagctgtacctccaagtgaacataacaagtgttagaactgagattcgtacaaagatctgtgggagcaaagaaacagcaaagtacatagattaatcaaggaaggattcattgagagttagattcctatttgataggaattggccacatagaaaaggggggagracattctagcaaaagaaaaaagttgtacttctcctaaacagctgatttattattagtattatagtcactgtgactcttaaaactaaccaaatttccacctttacattggctgccagggaactcacagtcacatttataatacttcttcagcaactatatggaacctaatgatgtaagcatttgtatagtgaccaaacctttatcagaatt

SEQ ID NO: 96262 - DNA, 22499 bp, Homo sapiens
  misc_feature (1)...(22499): n = A,T,C or G
cacctctgtctcccaaagtgctgggattacaggcatgagccaccgtacctggcctcctgcactttaaaagactgcactctggccaggcacggtgggtcatgcctgtaattccagcactttgggaggccgaggcgggtggatcacctgaggtcaggagtttgagaccagcctgaccaacatggagaaaccccatctccgctaaaaatacaaaattagccaggtgtggtggcacatgcctgtaatcccagctactagggaggctgaggcaggagaatctcttgaacctgggaggtgaaggttgcggtgagccgagatcatgccattgcactccagcctgggcaacaagagcgaaactccgtctcaaaaaaaaaaaaaaaaaagaaagaaagaaagaaagactgcactctggccttcctctgtctgttccttgtcctgtgaggcaaggagtccatagggaccaagtgccatgccccccagaagccacatctctcaccttctggattatgcatcaggcactcagaactctgcctgaacaatgcaagccctattccagtcctcctccccaggctggtcccccagagagaccctgctcccagcttgcaactctagtcccaaggagtggcttcaaggaggctgtttgaagggcctgggtacggatcctggactggagggctgagtatctacagcagtgtgcatgaggcccctccaggggtgggaaccaggagtgggaagagaaaggggaagccatgggccagggtccttacaaatgctcttgctccctgccacacaaatgctaggggcagctctgacaccagtgttcattttgcagcaattcatcaagtggaatgttagtgtcggcactttctggaatgtttgtttttgttattaatttaaaaatcatgaggccgggcacggtggctcatgtctgtaatcccagcagtttggaaggctgaggtgggtggatctctttaggtcaggagttcgagaccagcctggccaacatggtgaaaccctgtctctactaaaaaaatacaaaaattaggttggggatggtggtgggtgcctgtagtcccagctacttgggaggctgaggcaggagaatcacttgaacctgggaggaggaggttgcagtgaactgagattgtgctactgcactccagcctgggtgacagagcgaaacccctgtcgcaaaaaaaaaaaaaaaaaagtcgtacttctaaagatcaaagaaatactgagttttctgcctgggacatgataagtgcttgataaatattagagtagcagtatccaatgtagtgctcaccatagctcagatgagccagaacatcttgcttaatgcagggttggcaggggaaagtgctaattaatggaacatggtttcttcttcccatttaaaacagcctcttttggataaagcttcattccctcggatcttctcctgccccattctttttcccttcacctcaggaggcatctgagcgagggagaagctggcagacatcatggtgctggtggatgggagttctattccgcctgttctctgaggcttctgctgacgctgtggacacatggcccctcttgcctggcctttgagcaccagcctccaccctcgctgcctctgctgcagaggtgactgcagccaggcactcactgatgcttgggttgagtcctctcccgtggcccaggatggagccgctgactctgaaactcagtggcaagctccccccagctcccagcacagggcagtcccctcagaagacttgctaagtgtgttccccaccccctcgactccaaggcaacccctggcatttatgtaaacttttatttatttacttatttattctgagacagtgtctcgctctgttgcccaggctggagtgcagtggtgtgatcacagctcactgcaacctcgacagtgtctcgctctgttgcccaggctggagtgcagtggtgtgatcacagctcactgcaacctcgactgtgtcttgctctgttgcccaggctggagtgtagtggtgtgatcacagctcactgcaacctccactttcctgggttccagcgattctcctgcctcagcctccctaagtgctgggattacaggcctgaacactgtgctgggcccgttttaaactttttttttttttttttttaagagacggagtctcactctgtcacccaggctggagtgcagtggtgcattctcggctcattgcaacctctgcctcctaggttcaagcaattctcctgcctcagcctcccaagtagctgggactacaggtgcacgccgccatgcccagctaatttcttttctattttagtagagatggggttttattgtgttgcccaggctggtcttgaactcctgagcgcagacaatctgcccgtttcagcctcccaaagttgtaggattacaggggtgagccaccacgcccggtcttaaacttaattctcagccaccttattattctctattgacagtaagaggtggggggaaaaaaacaggcagagcacttagtgccaggctgttggcaggtattttcacattaaacactggtctcctcagccaaagctcacaatccagtaagacagtcattttagctgaacattctcatctaaccctagggttatgcaccgaattgtgtcccagaaaattcacaaattgaagccccaatccccagtgttactatatttggggatagggccctaaggaggtaattaaggttaaaagaggtcctaagagtaggatcctaatccagcaggattggtatccttctaaacaggggaagaaacaccaaagagctctctctttctcactgtgtgtgaacagaggaaaggccacatatatgacacagcaagaaggtggccgattacaagccaggaagagagtcctcaccagaaactgaattccagcaccttgatattggacttctagcctccatccagaatagtgagaaaatgagtatctgttgtttaagccacctagcatgtagtattttgttacaacagcctgagaagactaatatacctagagacccaaatgtaaaggcttcttggaacccaagctgatagtcactgaagcattcctggctctgagcaggtctgttaaccagggtcactgctacttctaggtttcttgggacccaaggcccactggagttacagtccgataatttttttttttttttttagacagagtctcgcagtgacatgatctcagctcactggaacctccacctcccaggttcaaacgattcttctgcctcggcctcccaagaagttaggattacagttgcccgccaccagctattttttgtatttttagtagagatggggtttcatatgttgaccaggctagtctcgactcaaggactcaagttatccatgtgccttggcctcccaaagtgctgggatcacaggcatgagccactgtgcccagactatagtcccattcttttccctgccatcatcctctaaaaccaggttccagctcccttcctgtattcccttggcccttattcctatatttttcctggtactcaccatgtcattccattggctcaggaactcatctgcaatgcagggaaattcttcaggagattgttttgttgccatttcctcatgaatggttccctctttgagaagcttcagacatgactttaaatttcacttgcggcaggaggggcagggaatgggagttcccatgccaaggaaggaggtagagtttcccctgcttcatcccccatgctggggggaaaaacctttaaggagcaatcaagagctcctttatggagcccatctggctctgaggaggggctgggtcatgggcctcagctgctgcagagcccctccctcctgagtacccagctgcttctgtcttcccctagtgaggaaacagttcctgttcccagggagtccaccccagcctcagggcttcatcacagcaactaataaattagcctaggattggagagagggcttttcaaggcaacagaaccagcacagacttcagtgaaaatgacataggttttggagtcagactaacaaagctgtgatttctggctgtgagcctttctgggggatcttaaaccaggcactttcatctctgaactgcagtgttcttatatgctaaataggaaaagtgatcctggctttgcagggttgtaatgaagatttccattgtttatggaaatagacatgtaccgcattcactctcttcttcctgagtcagtcttgctgatacatctgaactgtaattccctttctgaattttggggtggcgtaggatgggggagtggtgaaagagtggcagccttttcaaaagtctgatttggaccaggtgccatagctcacgcctctaatcccagtgtgggagtctgaggcaggaggatttcttgaagcaaggagttcaagaccagcctcggcaacaaagcgagacactgtttctccacaaacattttttttttaaattagccaggtgtggtaggctgaggcaggaagatcacttaagcctaggagttcaaggctgcagtgagccatgattgcgccactgcattccagccttggcgacagagcaagacctgtctcaaataaaataaataaaataaaacaaaaataaaaagtctgatttatcctttgttgttgttcaagaagtatgccctcagaaaaagcagactaaccacaattgctgcccaagcacatctttagaaaggcaaatccaccctccaaatgatacattagtgagcaatcattcaaagactaaatgttgatgtgggtctttttggcagttgggagtgtgtatgcatgcatgcatgaatgaatgaaaagtctggcttggagggatttactgggcctttggggcattctcagctttcctcggattacccactctcccttccctttgggctgctttggagagagactgcgaggtactgagaccagcaacttgggaagtgcaggacatgccttgcaaagacagatactttctgggagtaatttgtctgcctgttctgcagacacttggtgataccactttgggtatgttatgccctgtagtagagacagtctgctagctagacccacatctgccccgcatcttgttttgctattgtgaaaccaaacaaaggggtagcccgggggggacaggggagggcgaaagaacacaataaggtcacagggccctgctctaagtgtgtccctgtgcacatgccataggggttggggaccagagacaagatccccctggtgctgaggaaacagcaatggatttagagccccgaagactggcatttaagttctacctccttactggctatgtacgtttgggcaaaatagtttaccttcagaagccctgttgcttcacatgtaatatgcaagtgctaacaaagccatctcagggctggtgtgaggaataaatttaacatttatttattattcactttaacagtgaatgcaaaagggcttagttgaagagtaaaatactaaaaacctattgtggttaagactttggctgtgagtcagatgattggtgtgtttgactatattattgtccaccaacattcagtgtttttcccgagtcaggctgggtcatgtgacttggccaaatgtgagcagaagtgccccatcagttccaaggggacatttaaaagcttttattagcaattccgcagctctctttcctctgccctagggatggggggagcatgtgtgaaaatggggccctggggagttggagacctgagtgattagaatgagcacagctcccaggctactgctggatgggccccttataccagccggtttaggccactgggatttgggggttgattgttactgcagcaaaacctagcctggcatcaccatacagataggtgccgtttctttatgcagtttaatagaaaaacaacaaaacaaaacactcacaaagaaaacacacagaaaataatagcaaacacaacgcagccttggggagatggcaggcgagcctgagctgggtgctatttgctgctgctcttgggaagaggtcggtagaccccgaccaccacagcgtggtcccgctcatagggctccagggtcagctgctcttgaggcttcaagttctcctgctgcaacttcctcacctcagaagcaaacacagcctcggcggatgcggtggagtcgatgcagttggccttgatggagatgagaaagtggcccccattgcgcaggaaggtgtgggcgttcagggccacgatgcgggactggtccggctgggccacgtcggcgaagatcacgtccaccatcccgatgagcatgcggtacttgagcgggtgccgcgcgtcctccaggaccggaatgatgttggtgcgcttcttggccacgttgaccagatcgcggccggcgcggtgggagaactcgacggcgtagaccaggccgtctgggccaatgatgtcggagacatgggagacggtggtgcccgacgcggcgcccaggtacagcaccttggacttgggcttgatgtggatctggtccaccccgcccaggatggccgcggccagcttagagcggaacgggttccacgtgcggtactcctgcttcacgccgccctcggtcaccgtgacgcgcctctcgccgtacacagactggcccggcaccatgttcagcgtgaccagcgcgtcctccgccccgcggtagatgaagacgccctcgtgccggtgcggctccaccgacaccaccatggcgcccttcctgcggcggctcttgctcttggcacgccgcccgccgctgtccannnnnnnnnnnnnnnnnnnnnnnnnnnnnnnnnnnnnnnnnnnnnnnnnnnnnnnnnnnnnnnnnnncgcccgcgccccgaagccgcccttgcccccctggccgccgccgtcgcccccgccgcccttgcccgcgcctccgccgccgcctcggcccccgccccagtctgccccagccgccgcccccgcggccgcccccaccgcccccgcgcgagctcgcggccgacttcatggcacgcaccggggcgggtgccgtgggttaccggtgcctcggggcgggtgtcagggggctctggtggctctgggtggtcgtcccggcggttgtccgcgggtttagcagcggaggcgggcggcgggcggcgggcggsgggggcaggacsggctctaccgcagtgcccgcatcccggagccgccccttgacgcagcggctgtggcgcgattgcatcacacccgtccccgcgaccctgcggcccggaagycccgcttcccagcccgcgtgcagacgcagcctgctcctcttcrctcaccctgccccttccccatctcccgccttcccagggatccctggcacttccctgggccacagggacgggggcgtctctgctgcaggagagggggaggtaagcatcagcgtcggtcctggctgtgccaccagttctgggactattgatcagcaaggaagtgttgttgattcttcagtgtgaatggggatacacagagagccaaaatgtcatgttcatcctcgaagtctagtctatgcttcaaagtcactctctaaatctgcagcattttcttgaggaaagaaagaaaaagagaaaaagaaagaaagagagagaaagaaaagagagagagggagaggagaagaaaagaaaagaataattgggcagcaccaagggcagcaacgagaagaaaagaaaaaaagaaaagaacagaaagaaaataaaagaataactcggcaccaccaatggccccaaggccgcaacgcagaggctttagggtttagtcagcaccagggacagcgacagcagttggggcccccgttttggctactgctagggrctttgggaaccacacaagagctggggaaagtaggataggtggtgaaacaactggccagcctcccgttagttgaattaagtgtctactcgagagagagagagagagagacaacgcgcacctgaagatcggagcatttactgaacacctggtatgtgcagtatgacttccgttccatcctggaccacagctcttcccgtctcatactcatggacgacagtgccaggtctgattttccctgaggactggagtgtctccttaatggggaccagagttttatacactggaatgtgaacaagggatcagtgagtgaaatgtatgattcctgaggttgaatggttcacataaaatactctacttagaggtttccattcttgctataaggtgaatattttccaaaatgatgaactacacttggtgtctgtgagggttaattttatgtgtcaactttactgggccatgggatgcccagatatttggtcaaatagtattctgagtgtttctgtgagggtgttttttgatgagattaacatttaaattggtatattgagtaaagctgattgccgtctacgatgtggctgggcctcatctaatcagttgaaggcagaaataaagcaaaatgctgaccttccccacggaagagagaattctcctgcccaagggcctttcaactggcacatcagctctttctgcctgacaacctttggactgggacattggccctgcggattttggacctgctggtctccacaatcacatgagccaatatatatcctatatatacacacatatatatatcctacaggcctgtgtctttggagaaccttgaataatagagatcctgagacaaagccttgagtccaattggtttgtgaggtgatcccaggaagcacatgttggggaggcaaaaatgagatagagaagatagaaaggttaagaaagaactgggcacagtgcctcacacctgtaatcccagcactttgggaggccaaggtgggaggattgattgagcccacgagttcaagaccagtcctagcatgatagcaagaccctgtctctacaaaaataaacaagacttagccaggtgtcatggtgtgtacctgtagtcactgtagtacctgtagtcactgtagtacctgtagtacctcagctactgaggaggctgagctggaggggtcgcttgagcctgggagatcaaggctgcagtgagctgaactcacaccactacactccagcttaggtgacagagggagaccctgtctcaaaaaaaaaaaaaaaaaaaaaaagagggtagattaatgagtagatgaccacagtggacaatgggagctcaaytgctgtgagtattctgagaaactgtgtggaaggcatctcagaattgttctactgcaggttggaggctggggcattaatccactgtcttaatttgtttctatacctgagactgggtaatttataaagaaaagggctttattttttctttttttattctaagatagggtatcactctgtcacccaagctgagtgcagtggcacaatcatggctattgcagccttgatctcccaggctcaagcaatcctcccacctcagcctcctgagtagttgggactacaggtgtgtgccaccacaccaggctaaaattttattctttatagagatggagcctcactatgttgcccaggcttgtctcaaactcctggactcaagcagttctcctgtttcagtctcctaaagtgctgggattacaggtgtgagccacagtggccagccaggtttctttctatataggtataaaccatcatgcctggcaattttttttttttttttttttttactttttgtagagatgagacctcattatgttgcccaagctggtctccaactcctggcctcaagccatcctcctgcctcagcctcctgagttgctggaattctaggcacaagcctccacacttggcaccatgtatacttttgtttacaattgacttgttattccagaagatgtgccctaaagtaatgatcataattacatctgtgactaggcctcagtagtagacatagtgcacatcaatcattcccatagacttaaaaaatgcatgaggaattttgcttattttctcacagaaccattccaacaaattgcccaaggagtaactagccatgattgacatgaaaccagaggtaatactctataaccccatctccattctyattatactttaagcatccatgcatgaagaaacttgttttctctaagccatggtccacctccaaaggtgactgactgtagggatctgatctccaccccagtgacaggtgcagctatatttgctcaagaggagttgggctatgatgcagtaacatagaactccaaaatctcaatgtattaatacagctatgtttagatttcttatgttttatgtccactgagagtcagcgggaggtttgcaccacacagccactgaagaactcaggccccaacatcttgtggctgcaacatgagaaaaaagagggcctccactgtactgctgaagaatagagtgcagagaactcacaacctttttgtatgtttagtctggactttgacacaatcatttctactcaccacggattgcagccttgatctcccaggctcaagcaattctcccacttcagcctcctggctgatgactggccaaagccagtcacatgccctgcctagctgaaaggcagctgagatatgtgggtgccataactggggaacagtaaatgtttttacctaggtgtctactgcataatgccagctggcacacctggatcagtgcaccaaacacaaacacctcaggtgaaatttactgtttggcgtgcatatatttaaatttactcgtcaagacaaaatataatacctccttcctaacacgactaaaactcacaatcttagtcaactcccaataatatatctaatatagctggttaattaattagaaaaagagaatcttctccctttttgtagcctctgggacttggaaagtagctaaaatcccttatttgggatgtcattattgtttggccattacttctgctgggggacacttcgtctcttggtggctcagactcttactccattccccactgtagaattagtggctgccattcaggaaatgctcaaaaagcttagctggcctacttttgcaaaggtcttctttccacaagacaccttagaaattctctgtaattcttcattttatagaataagaatctgaaatttgggctgggcgtagtggctcatgcctgtaatcctagcactttgggaggctgaggtgggtggatcacttgagctcaggagttcgagaccaacctggaaaacatagtgagaccccatctcaatacataaaaaaaaaattctggccgggcgtggtggctcacacctgtaatcccagcactttgggaagccgaggcgggcggatcacaaggtcaggagatcgagaccatcctggctaacacggtgaaaccccgtctctactaaaaataccaaaaaattagctgggcgtggcggcgtgcagctgtagtcccagctgctggggagggtgaggcaggagaatggtgtgaacctgggaggtggagcttgcagtgagccaagatcgtgccactgcactccagcctgggtgacagagtgagactccatctcaaaaaaaaaaaaaaaaaaaaaaaaaaaaaaaaaatatatatatatatatatatatatatatacaagctatcaaactcctacaatctaaaatccccacaaaaattacagtgagtttaactgtgctccccttcaatccattacattttataagcaccatgtatatttatgtaattaaactggtatgaaaatgcaaagcaaaccaagcaacaaaacaaagcaaaaaattgttttacttagatgaccccatgtactctcattaaccagtgaaatttctataatgcgaccaagtatttttttgatttgtacaaatgtatggggtacatgagaagttttgtgacatgtataaggcacagtgatcaagtcggtatttaaagtatccatcatgggagtacagtacatttttattaagtatcatcaccctgctcagctatcaagcattgaatttgttcctcctatcttactgtatgtttgtacctttttctttctcttttttttttgagatggagtccccctctgtcacccaggctggagtgcagtggtgtgatttcagctcactgcaacctcctcctcccaagttcaagtgattcttgtgcctcaggctccacgagtagctgggattaaaggcacatgccaccatgcctggctgtgtgtgtgtgtgtgtgtgtgtgtgtgtgtgtgcgcgcgcgcgcacgcgtgtgtgtgtgtgttcaggagagacggggttttgccatgttgtccaggctggtctcgaactcctgacctcaggtgatttgcccatctcagcctcccaaagtgctgggattacaggtgtgagccacctcaccaggcctgtatgtttgtaccttttaacccacttctcttcatcttccctcctgcccccattcacccttcccagtctctgttatctgtttttccactctctacctccatgtgatcaaattttttagcttccagccaggtgcggtggctcacgcctgtaatctcagcagtttgggaggctgaagcaggtgatcacttgagcccaggagttcaagaccagcctgggcaacatggcaaaaccccatctctgccaaaaatacaaaaattaaccaggcatggtggcatatgcctgtagccccagctactcaggaggctgagctgggaggatcgcttgagcccgagaggtggaggttgcagtgagctgtgatgatcatgccactgcactccagcctgggcaacagagctagaccctgtctcaaaaaaaaaattgttttttagctcccacatataagtgagaacatgtgatatttgcctgtttgtgcctggctcattgcacttaagataattacctccatcaactgaatattatttagccgattttctagaaaggttaatactggccattttgggctgacattggccaagaagcaaagtcaaaaatgatgagaaaattagcataaaattgtagatgcatattaacttctctgtaccatttatgccctagtttaaatctgcttttaaaatttatttgaataagtgtgggctgggtgcagtgtggtggttcacgcctgtaatctcagcactttgggaggctgaggtgggcagatcacttgaggtcaggagttcaagaccagcctggccaacgtggtgaaaccctgtctctacaatacaaaaattagttgggcatactcacttttgtcacccaggctagggtgcaccggcatgatcacggctcactgtgacctctgcctcccaggctcaagcaatcctcccaccttagcctccagagtagctgggactamaggcatcttgaataggtagatgtggcaagagtggacaactttgtttctgatctattgagatgttcatgtggggtatttatttccctcttcagtttattaatacrcagttgcyttttaagaaaaaagttaaaaacaaaaaatgcattactattgatttttatacttctacatacttgattttataatcttttacacttttaaaatatattttgtactatgtacttacctttactggtgttgtgtgattttgttagtctagggtccttacatttcaacatttagcatttcttgtaacgatggtcttctagtgacaaactttttgtttattgagaaacatcttaataccattttcctttctgaagaatagctttgctgaatatagaggtcttgattgacagtttcccccccttttggcactttaaatgtcattccactggccctgtgaagtgccagtggaaggtaggactggcactagaattctcagtggggggggtgggattggggagagtaactgaattccagcaaaccagattatctttggatgacggaagtcttcaggcagccctgtgtttggaaaagcactgagtagagacctaggtaatggatcttagctcagcaaacaggtccctgcaaattaaagaatggaatgaggagaatttatatttacgtggagacactggtccataccaagtcaaacgttttctgaccaacttaattttcctcattcctcacactatggtgtttaatcaattttgggatgtacatttgaacatttctgaaattgcgatgcatctcacagtcattattagtcagatgacggttgtgacatagtcatcgccgccttcacatgaatatcaggactcagataataatcctgggaactatagtggaacatcaaagcgctgcatcatcaatgtttttggtagcatagaggatgatattgtctagaaaagacagatgttaatgactgcatcaaaaagtgtctcaaaagagtgggactctgaagttttaggagtattttaaccaatttagttcagttgtattttcctgtgctaagtttgtacataagtgatacatgacacaaacaaaagtctaaaagactcttttcagtatgaaaattctaacttacgaaagttctatcagtttaaaagtttgtcaaaattttttagtagtgcaaaacaatagtatcttgcaatctatagtgtttagagctattgatatatagtattgtaatttcctagaatgcagtaaataagcttgaggtcacagaaagatcatcccatttgttaggataaatgagtgaacatctgaaaattgtgtttttctccttttctttctttttttttttttttttttttgagatggagtcttgctctgtctcccaggctggagtgcagtggtgctgtctcggctcactgcaacctccatctcctgggttcaagcaagcgatcctcctgcctcagccacccgagtggctgggactacaggtgtgtgccaccacgcccagctgatttttgtatttttagtagagatggggtttcatcacgttggccaggatggtcttcatctyttgacctcgtgatccgcctgcctcagcctcccaaagtgctgggattacaggcgtgagccaccacgcctggcaaaaattgtgttttgtctattaaccaataaaaaattattttgactttttttagaggtcaaatgaaggcaaatttgagggtcacaaaggcccaccgacttacatgagattaaggattatctgaagtcaaactggctttgcttttccaaaggctagcacattaaaaacaggctaatcagcacaaccgtagtcatagctactacagactcaggcaggaggatcacttgagcccatgagttcaaggttacagtgaatggccaggcacagtggctcacacctgtaatcccagcactttgggaggctgagccaggcagatcacccggaggtcaggagttcgagaccagcctggccaaaatggtgaaaccctgtctctactacaaatacaaaaaattagcagggtatggtggtgcatgcctgcagtcccagctacctgagaggctgaggcatgagaattgtttgaacccgggagatggaggttgcagtgagccgagatcgcaccactgcactccagcctgggtgacagagtgagactctgtctcaaaaaaaaaaaaaaaaaaaaagtcacagtgaactacaatggcaccattgcactccagcctggaaaacagaagaggacctcgtctctataaacaaaaacaggagaatcagaactatactattcctaaggaaaggtttctgatattatctgtattattaaatggtatttatatatctataaactatggtaagacagtgttttaaagatatagttatggcctggggtatccgagatgatgttccagtatacgaacttatcatgacctttggttaatttaacatactcctgtagtctttcattattttctcctccacctcactgaatcctgttttttcttttttcttttttttgagacggagtcttgctttgtctcccaggctggagtgcaatggtgcgatctcagctcatcgcaacctctgactcctgggttcaagcaattctcttgcctcagtctcctcagtggctgggattacaggcgcccgccactacgtctggctattttttgtatttttagtagagacagggtttccccatgttrgtcaggctggtctcgaactcccaacctcaggtgatctgcccaccccggcctcccaaagtgctggcattacaggcgtgagccaccatgcccggctgaatcttgtttttaattcctaaagtctcctgagtcttcggacccaagggctcagtagtctaggtgaactgtctttgcagttagtagagtgagaggaaactgcttagcctccccatgtttgttggagggagcagcgatctaatgtggacatgttagacttatacataccagtttgtgaatggaagctattattatagctcattaagatcctctctaaggttcctctaagcttggagacttttagaaacagcatggtatgatacaattcatgctcattaaacattcatttttctattgtgttggctttacatggaatctcatttcagttttgtgttggcagattccattaactgctgactcaataatcagtgtgcggagctgtaccccaaaacctctcgctgccactgccaatctccatattctgtgctgctacaaagattccaatttcatgaaatgagacaatatgccctgcccgggggatgaattgtgactggtctagggaaatcacagcaatcctcttcttagcttggacattcactctaggtttctaccttcctttgcaactgggattggcatctggccaatgagatgttaagagttaatcttgagcttcaggaaaattgccagtctacatttccttgcccccttcccccgaacccaagtctgttatattgccaatgtcaccttctcttaaaatggaaatagcctgaatttgggattttaaacatgcacgggtgtgaatcttaattttgttcctgaggattccagggcaaattacttatctctgtgcagtctcaagttttgttacttgtaaaacaggctaagtatctctcacagaacaatgaaatgagacatgaatgggacaatgaagaggcgtaaattcttggggccctttcagggtcaacaaatgggattccttatctaattaaaattaataaaccacattcctgcaaagtcaatacactctcactgtggtgcataaatcctgttatttcatggcctccactaagtcattttggtttaatgctcagcaagatataagcatatttgtggaagtgatttttttctttttagaattctagctgttaaagaaccacattttgcctggttgacaaattttctttacttatgcttgtgtccacatgattgtaaaaaagcaaacagtgccaatggccactttggtaaaaacacacagtgttcaaacctatgaaggattacatcctttggacaggttttattcccaggatatcaaaccccttggccatgacagcagctactgcttcacatagcagcatacgccacatgttcaccttcaatatttttcctgaaaagatagaaaaaagttgttaattaacttgttttcctttttgaaaatcattattaaagaatctatgttacttgcaaattttagttagaagtgcatagtccaacccacagatgtttttgggttttaactagaatcttctttaccttaaactatgaagacaaacaatttaaaaaataaaggcatttctgttaagaaatgtgtttttaactattaagagatataaggtctgcaatgatgagaacagtaaattttacctttcttttaaaaaattttcctagtcctcacggtctgaaataactataaacctcattatcacagtggtgatttttttccctaataaagtttcagtcctcaggcatgactttaacaaatgcctacttgccttataatacattaattctggctacttcattaactatgtaatatgacagagggaagacagcctaaggtaagaaaagataacaagtgttttccaagaagtttccattatcaaaaacacccaaagattcctcctgggacccacaaacacattgtgtttgttggaaaaatcctactctcagtcatcttccaattgttttctttggagtcctaaggttccatctcatgtgcctaattgtagaaaagtagactgattgggcagagttccatttctggtttaaagtgctacttcacattttgtcttttatatatgatatggttcactgtgcaactgttagggaaaaagtggaagtttccatgaataaaataaatctgaaaaccactcccacacaattcaaatgctttaatggcaccccatccctaatatggctactaaatgagacacttggagctgggtgcagtggctcacacgtgtgtaagtccagccattcgggaggctcaagtgggagaatcacttgaggccagaagtttgaggcttcagtgacctatgatttcaccaccgtactccagcccaagggacagagcaagatccgtgtctctcactaaaaaaaaaaaaaaaaaaaaaaaaaaaaaaaaaaaaaaaaaaaaaaaaaaaaaaagacactcaccagtctgtctatctttctccacacagtagcagctatcatagaactctgtgaaagcagttgccagctcatatatataatcacagagagtgtggagaaataagtcatctaaaatcttttgcagaatctcagggaaccgtaaaatgcaccggcctagtttccattccttctcatgatccaaaagaatcttggtttctcgagcagctttttggagcatttcttcatcaatattggccagacgtgcaatagaccttaaaaaaaacaaaaaaatcatcaggcaatcaccactgttccctttttttaggcacactcattctccactcgaaattatcaccgattaaaaagaagttcctataaaatgaagtattttattatacgatatactattaggcaaaactaatagccagatctaaagcatttcataatactaaaaatggaaatataattcttttaggggatcaggtgacactttctaggtatttaaacatagagcatctagaagagtatcggcaagtgcagttaaggccaggtttagggattctgggataacttgcaatactaaaagaggacgtatttccaaagatgcttgtaggcagaaaaataagtctgaaaagaacactttaggctgagcgtgatggctcatgcctgtaatccgagcactttgggaggccgaggcgggtgaatcacttgaggtccagagttccagacctgcctggccaacatggtgaaaccccgtctccactaaaaatacaaaatttagctgggcatggtggtgagtgcctgtaatccctcctactggggaggctgaggcaggagaatcacctgaacccgggaggtggaggttgcagtgagccgagatcgcgccactgcactccagcgtgggcaacagagtgagactccgtctcaaaaataaacaaacaaacaaaaaaaaacactttagaagtcaggtgtaatggtggtatgtcagtaatcccagctactcaggaggctgaggtgggaggatcatttgagcccaagaccccgtctcatttcaaaaaaaaaaaaagaaaatatttttgagtaactaaatatgctttcatttgattcacaataaaacaatgcctacccacaattacctgattctagtgaaggcatacaacaagtaagcagctgtatttcctctgtcatctagcattttgtcaaaggagaagatgtagtcattcaaccggttatgggaaaggtcagcatatttgatgcagccatatgcaacggatgtctgagcagcattcaattcctctgcagttaagacctttgggaaaaacaaaacagtatttcatagcttactgactgctgcttctgccctggtgtctcataggcataagactggggtagggaacatctaatggtattcttttaccaataaactttaataaacactgacactgaggcagaaggacatgggccaatgtacaaacaaaataatgaaaatataaaatgcgttatgcacaatgaagaatgtgtctatgagaaactgaatttgtaaaatgtaaaatgtcagcatgaatacctttttccagtgtattcagtagatatgaaaccagaagcatcaattattagtttatatccacttcatactatgaacattgtgaggttataggaaacagagtaacaccaaaaaatacaaacaaaaagttagcgttaaataattaattgaaatcaagggtgtattaagagtagataaaagaacccattcactgttttgctaatatttgctcaagtattctaaagcattattaggccacaagtaagtaattaaggatttttgcttctggccatgacagaataccttgcagcagactaaccattctaccaaaagcaactatttaaaagctgggttaaacatatgaaacaactggttgaagtcactagagagcatcaacacaagcaaagttgaagggactatagttcttagaagaatgaaaacattgggaaggagtccatcatcacttggctttttccccaagggcatttttcaaatcactacatagtggacaaaggggacagaacccaagcagaaagaagtggtcttgctgaggtgagaagacaagagtttagagtacggggctgccaaagaagcaaggacacaatccccaaaaagaaggagccacagaggagtcaaagactctgtgaacacatttctttcaaatgtcatatggctggcatgcacaaggcaagactccaaaaaatctatcaggaaagagcaaatggtaattaaagagctgagcagtgatttcagcagctgtgtgacacaaggcagttctgcagcggcaaaatggaagggcattagcacacacgccattgaagtatggccagagggccatatttcaggagtaaggacctcaccctagtcatacaggtaaaatttaaatagttcagccctaaagaagcataaggccaatacaaacagggtcaagataatcagctggtatgctacctgtgggctagaagaaaacataacggtctctggagggaaataacctcagccataatctttataattttctcttcataatgccgagcacccaacaacaaataaatctttctaaaaaagcaagatgagccatgcctgtaatgctcatgcctgtaattggctcatgcctgtaacgcagctacttgggagtctgaggtggaaggatcacttgaggccaggagtttcaaaccagcctggacaacatagacccctatctcttgtggggggaaaaagataaaagagcaagatgaaataactaaatactaaggagggggactacaaagaaagggctaggagagaatcaagacaacagaaacaaaagaaaaaagataatagcaactttaaaatctgaaattgtttaagatgaagctacttaaaaaatacttattaatgacaaagggggaaaatactaactttacaggggagaaaactgatactatcaccttaccaaagagatcaaaattattattattaattatgaagcttatcaatatcatgtgcctcctgatatgaactgataagaactctacatctattcttgtaagactgtataacctggaaacagagtacagcttataagacttataagactgtataacctggaaacagaattaacagaacaggagccaatatcagacaaatccaactaagtgatattccaaaaaaactaactgaccagcagacttcagaagtgttgaggtcatgaaagtcaaagacagaccaaggaactaactgcccagattaaagagaaggagacatgataactaaatgtaacatgttatcctggactggatcttagactagaaaaaggtcattagtgagaccaactgtacaaccagaataaggactgcagattagttaatggtattgtatcaatgttaatttcctgattttgataatcatactatatagctatgaaagatattagtatctggggatactaaatgaaagatacaaaattctttgtactatcttgcaacttttttatgtctaaaaccgttttaaaatgtttaaagaaaactatgattaacatgttcaaaaaattaaaaggaaaacagtaagaaaactggaagaaaagatgaaaaatttcaagaaataccttaaacacagaataccaaaatattctctgaagtagaaaatattcaaaataaagcaaaaagaaaaaaatgaattagagcataagaaacacgtgagatacaaagttctaacatatgtacttggagtaccaaaaataacagaatgcggaaaagtagtagcatttgaagagatagggccaagaattctcctaacctgatgaaagaactcaacccacagatttaggaagtttggcagcccccaaagggtaaaaacaaaaatgactccccaaaccacacttaggcatttcttagtcaaagtactaaaaataaagcctaagaaaaatactaaaaaaagtctgagaaaaagatacatactttcaaaggagaaacaatgaaacttacaactgattttcaaaggaaactatggtagctggaagacaatggagtataatttttatttattt

SEQ ID NO: 96263 - DNA, 89548 bp, Homo sapiens
  misc_feature (1)...(89548): n = A,T,C or G
aactggactctctgaaatccatccatggagtagaacaagttaggaactgctgtgctataataatctttctaaaatataaatccagtcacttcatttccctgcttaaaatccatcaatggctctcctttgccttcaggataaagcccaaacctcttagacaaacatgtacacaaataataaataattccagttataaatataaatgctgtgaagtatatgaaatgagaaatgtggtaggaactagtgtaggagtgggcaatggtgcttgaagtctatgaaaacagcatttaagatagaaatgataaaaacagagaccactacatgaagatctggggacaaacatttgaagccggagccaaagtctaaagaccagaaagagtttgacatgtttaagagataaagtcagtagagggaacacagtgagtaagatggagacggggcagaggtgaggttgaagagccctgtctccagcagatcatacgaagacctagatcacgtaaggcttcctagcccgtaccttggatttcttctaaaagtaaaggaaagctattaaaggagtctaatcagtggatgtgttgttttgttttgaacaacttagaaagtcattttggctactaagtaggtaagaatgcagctagggagaccattaacgaaagcgtttgcaaagagttgagagatggcagtgaaaagatgagaaatggttggatttgaggtaattttggaaactgggctgatatgttttactgtgagattagagggttccaaggattttggcttaagcagaaatggtggtgtcctaggcggctggcctacgtggtagtgtcttttactaagatgaggaagtttatgagggagcaagatatttgggaggaggaatcaattattctgttttggccacactaaatttgagatgcttactgacatctttataggtacgctaagaaggcatttgaatatgagttcaggcctatgtatagtttttagacccatttttcatcactggcccctgtaggtctttaggttctcgccatattgagcaacctaaactttttctaggcccctttttacataagctgttacctctgttcaatgaaagaattaagttaaggctcagaagggagacagtaatggttcattctttgttagtctattcctaatatttaatgaggttcataatcctactgcttcttagctcaggaagctttaagctctcttggggcttgttatctgagtgctctttctggcctgcttcagggtgaggacttctaatcaagaagccccattacctccttgttatctgtagtatattttggtctcttggccttgggctccccagcagcatcttcatcagatgatctcctccttttacctttccctgccaaacaaacaattaaacacttagactatatctcatatgatgacaggaaatgaccaaacatgagagcaggtgtctttcattccaaagacatctgtagctgcctctagatcagagttgcttagggggctgaagagctataagaaactcaagtaactgatgaaataatctgaaactcaacatgttcaaaaagagtcttatagtctttctcctccaatgctctctttcatggccagtgatatcatcctcccacatgtgcaagtcagacacacagatgtcactcttagtacttgtttccttcaccctctctctttcattttccaccagtctgtcaacatttacctttgccccattctcccatcctttctgtagacaaaaaatcttttgaaagtgcaaattagatcatgtcatttccttaaaaatccttcagtggtcttcctttgctcttagcataaagaacagatgctctataaggtcttacttgattcagcccctgcctgtctcccatccaagtactaagcaggttgatcctgattagcttctgagatcagacccctgcctagctatgtctctaaccttacctcatgcctctcttgctttgcttacaatgctttagctatactgacattctttcatttcctcaaatgctatttttttactacatactattccctctgccaaaaatgcttttcctgttacctcactgttagcttctacttcaaatcttagctcaaatgccaccttctcaaagaaacatgaggcctaaactcccagatgaatcccgtctctcgttatatattttcttttcttttttttttcccgagacagagtctcactctgtcacccaggctggagtacagtggtgcaatcttggctcactgcaatcgctgtctcctgggttcaagcaattctcctgccccagcctcccgagtagctgggattacaggcgtatgccaccatacctggctatttttttttttttttttttttgagacggagtctggctctgttgcccaggctggagtgcagtggcacgatctcggctcactgcaacctccgcttcccgggttcatgccattttcctgcctcagcctcccaagtagctgggactacagatgcccgccaccacacccagctaattttttgtatttttagtatagacggggtttcccggtattagccaggatggtctcgatctcctgacctcgtgatccgcccaccttggcctcccaaagtgctgggattacaggcgtgaaccaccatgcccggctacctggctaatttttataattttagtagagatggggtttcaacatgttgcccaggctggtctcgaactcctggcctcatgcaattcgcctgcctcagtctcccaaagtctccattatatattttcataacacctcatacttttccttcatggcacttattacagtttaattatatactgatgtgattttctgattaatgcatgtctcataatactatgacagttccttcataggaatatttccttcatagtacttatcaccgtttaatgatatatcgatgtgattttccgattaatgtatgtctcctatactaaagccccatggcagagaccatgattttttcattgttatacaccacgatgtctggcacatagcaaatacttggtaaatacaatcacatttcatacacttgacaatcaagaagaatccacaattaaggcaagtcacagttccaggggttaaaattccttacctatcaagctgagtttaggaaccaggtacatgtccttttcattaatgacaagtgtgggggcaggtggtggtggcccagggtctgaattctcagtggtaggtaccgaagggcagcgttgtacaaagtgtgtgtctgccagtcgcacaaatgtgtttgatacttcagcatagtccatggtcttgccatctgtataacaggaggaaaaaggcagatgagatggcctaagatagctcagggttcactcccatagccagctgatctatgcttttgttaacagctatggataccatactgaccctccatggtctctgtgagccggtctgccactttcttcacaacagctgacattgtcagtttgccgttcaacagaagctcctcaacaatcagctctccagtgtcactgtacagagttttggtagtatagatgtaccggggatatctaagcattcgcaatacccggctgcactgggcttcatactccaccacaccacgtttgtgcacttgataactcaccaggttatgttggacgaggacacacagggctttcttcacctaaatggaacataaagagaagaaagagaggaaagacctgaagatatagctcattactgctggcaattttttgtccaacagcttagtaagcatcagaaaatggctagataatttctgcacttatttcctctctccactggaggagctaataagaatcacacatcaatacaataaatcaggaagattccttgctatatttcctctgatccttatctctcaaaacacaatttactttcatcattctcattccttaaaggcagtactgagattaatagacttattgtgaataaatgaggtacggcatgggaagagcaaagatttgcctaaaagctgtgatgaactaggaacactttgagaaacaaaatgttgatgtctaagtctcatccttttctccccgaaataacattgttctgctccaagggcaggctttcttcatttttccttttctggggtgagaagaacaatattcaaaggtgggtgaaataaattagtgaaagaaatgagagaaaatgaatgtcatttagacatacctgatccagtgatgttcctgtgtcatgggcaattactcttagtggctggctgccggttcttatcagatggactccaattttttctacaatctctccaaaatgctcttgcagcaacaaagaacagagcttaatttctgcttgagtcattgtactggggagtctgagagctagggaaaaaacaccaaaatggtacaatagaaagtctttcacgctggaagcagagctgctgagtgtaaattcatgtattctttctggagggcaatttgacaatacatatcaaaaagccttaaaaatcttgcatatctttgaaacaacaatttctttttggatattgtgtccaaagaaagaaaaagctaataataatgaagtcattagttctctttataataccgacttagtggaaacaatctaacgtctaacaataaatgatgccatacccatacaatggcatactacaccaacatttaaagttatttagtacgatgcgtattcatgtagaaaattattcataataggctggcgcggtggctcaggcctgtaatcctagcactttgggagaccgaggtgggcgtatcatgaggtcaggagtttgagaccagcctggccaatatagtgaaaccccttctctactaaaaacacacaaaaaaattagctgggcgtggtggcgggtgcctgtaatcccagctactagggaggctgagacaggagaatcgcttgaagccgggaggcagaggttgcagtgagccgagatcgcgccactgcactccaacccgggcgacagtgcgagattctgtctccaaaacaaaaaaaaacaaaaaaaattactcataatatattaagtgacagaagcaagctgaaaaaatataaaaattcaattattgtaaaaaaaaaggaaaaatgtatgcataggaaaagactatgcatcaaatttatctctatgggattatgcgtgattctgattttccttaaagattgggagatgattttgcggtctgtcacagaccttagtttctacacttcactgcttggaagaattaaggtcactgttcacagctcggtgggagtgaacaggcagtgttattctcagtccataaaggaaatgataatttcgaaaaagaaatttaggaggtaaaggactgcttctcaacagggtgtgtcaaacaggagatgaggttacgttgtttgcaggacagtattcaattcttaaacttctactccttgacaaagttgacacaatcagaaacggacgtagttaattttatgattacttccttattacaaattgctaccaaacattgtttacttatttcttccaattcctaagaagccaagtctttgcctccccgtccccaccccgcctcagtatcaccagagacctatttcgtccatccacatatctttggagaagcattcccagatcctttgccatcctcggaaagggcttccaaggcgcttggctcctagctctacacttcctttacacaggttcccgtttcggacgtggtctcttggtccagtcagtgccgccacgttcagacagcattttccactaacctcagggtcagcgcaatccgggggctccaactccaattcggctgagcttcccgcgacggcttcctacggctcccgctggccttctaggccgaggtggagcccaccgccctttctaggacgcggatcgccaccgaagaagacgcggaaaagcaaaaagcgcgtgccactctaccccagagtttcggcggcttccggggacgctctttctttcttctcgctggaagactggaggaccagcgaggggctgtttgtggagccggcgggcgggccgtttgtctctccttcctgcgcctctttggtgctgggaggcgggccgcagggtagctgttggcgccgccgcgtttctgggcctggccaactcacgtgaccgacgcgggctctgaagcggtgggccgcaccgaggcggcggcggcggcgacgactgcagctcgggaggtagcggcctggcgagggacgggccggctgccctctsggacggccgcggcggagggcaaaaatggcggaggcttcggcggccggggcggactcgggcgccgctgtagccgcccaccggtttttctgccacttttgcaagggcgaggtcagccccaaactaccggtaagagcgctgtgttctctatacttgggaacctcatagattcctggccccgatttcycggaactgggtctggagctttctgcacatcattgactcsccsgacatcggtctgccgaatacctgctgcccacttctaagccgccggccctaaaccctgggcatcacggcctcggccccgtacctcctgcccacctcttaattcatcctgggctgctccacctgacctcacctcttyacctcccgtgtccttaatttttttttttcttagcaagtttccctctgataactctcccctcaattttcttgcattcttttatacctggtctttttcctacgatgacctccccccacacttcttccactgtgtcttctcaccttcctctgtgttcttttccacttttcaccccccaccgcccccgccacctcccttgtcagtgaagcgaaatagcggattgctgaggattgtcactcttcggttttttctagggaaggaagcacagaaagggggttggaaggtatctgtggggcgaaaagggggattttgctcttcagtggtttccagggtccttgtgacagtgaagacagcagcgtactaatgacttgcagacggtctgcactcctatcrctgttgaaggaaatggctttaggaagaaggcaggacgtactgtttcaacttcgtttattttggttgtcatgctgccagtgtctttaatatcattgttccgccccccgccctgtccctttcttcacctaagaaaaagagccgggacagaatgttggggatgcttcctctgacgtgaaattggttttcacgagtttctgccagagtgttagccccttgagaggcagtgctgtggttgggaagaaaacacttttgtaggtcaggcgcggtggcttaggtctgtaatcccagtgctttgggaggacgaggcaggaggattgcttgaggccaggagtttgagaccagcctgggcaacagagtgagacccctctctacaaaaacaaacaacatttatgcagcatactagccagcaccagcatcacaaacccagaagctgttttgggttggsttgtagctactacgaggagctcccccagrgtgaatgtcaatcctgtccttggccaactgtctttatggttgttcctttccttacaagtgtccaggttcagtcttgtgatagagtggcaacataatgtatgtttctatttatggtgtctcagatacagtgtaggagaaaaccttctgaagtgagtctgtatatcttatttcttagaaacacaaatggagtccagtgaataagtgcttaaagggtgttttatagtcttctctcactcaaaagttttgtttaaggcattatgatacattctttcctctctacttgccgcaccccctacttcagagtcatagtttcatctaaatgctacttagctgtttttcttttttcttttttttttttgagacagcctctgtctatcacccaggagcatgatttcggctgactgcaacctccacctgccgggttcaagagagtctcctgcctcggcctccgggtagctgggactataggtgcacgaccaccgcaccctggctaatttttgtgtttttagtagagatgcagtttcaccatgttggccaggctggtctcgaactcttgacctcaagtgatccacccgactcgggctcccagagtgctgggattacaggcgtgagccactgctccccgcctaaatgctacttagytttgtttgctgattttgctgtgtgtttatgttttttttttttttggccatatttcagtgctgggaagagcaggtgtctagtttttttccagccaacatcagagcctgcagaactcttttaccatagagagggagtctggaattcagccagtatgtgtgtgaccagtggtgtgttgttgaatgtgatgccttgttgaatattccatccttagcttttttgatctttaagttgctgttcactattttgcctttaagagtgagaagttggccaggcgtggtggctcaggcctgtaatcccaatactttgggagtccaaggcaggcagatcgcttgagctcaggagttcgagactagcctgggcaacatggagaaaccccgtctctaccaaaaaataaaaaaatttgccgtgtgtgtggtggcatgcacctgtagtcccagctattcaggaggctgaggtaggaggattgcctgaccccaggaagcagaggttgcagtgagctgagatcgcaccattgcactccagcctgggcaatagagccagaccctgtctcaaaaaaaaaaaaaaaaaaaaaagagtgagaagacagtctaaacttccccaattgattatatcttttcttctcacctttaagtccttacttcaaagggataatttgaaargctgaataggtgtttttctaagccttagttaatgcctggagaagtttcttgatctttttggtgtgatatattatttgtcatrtctgatttgtaaattgaggcctaacacaattgagtataaccggattcttcctaaatatatccaaggttctctgctgagtgtcctggaggtgatagggagtgatatgtggctcctgcccttaaggatcttacagcttttggggaaagacaaggcaaacatagaaaaagtaacagcataaagggaatgaggatatgtgctttaggattcagagaggggaatttcatagcrttggtgtggccagtgggatttaaattgagttttgagggatgggtrcatttcagattgagaattccaaagactgtgaggtagcaaaaggaagagggagttgatgaagaagggagaaatatttaataaatcatgtttttttcacaactaaaagttgtatactatattttttatagtgttcagcatgatttgatatatgtatacactgaatggttaaatcaagctatttaacatgcattacctcacatacttatttttgcgtggtgagaacacttaaaatctgtcttagcaattttcaaatatacagtatattcccttttatttttttttgagactgagtctcgctctgtcaccaggctggagtgcagtggtgcgatctcggttcactacaacctccacctcctgggttcaagcagttctcctgcctcggcctcccaagtagtggggactacaggcacgtgccaccatgcccagctaaattttgtatttttagtagagacggggtttcaccatgttggccaggatggtctccatctcgaccttgtgatatgcccaccttggcctcccaaagtggtgggattacaggtgtgagccactgcacccggcctctttttttctttttaaatagagacagaatttattctgtcttgttgcccaggctgttcttgaatttgtgggctcaatgtgtcctcccactatatcctcctgagtagtagtagataggtgygttccaccatgcctggctaatttttttttcttttttgtagagatgggattttgccatgttgccccggctggtctcaaatttctgggcttaagcaatctgcctgcctcagcctcccaaagtgctggggttacaggcatgagctattgcggctggcctgatatgtggtatttgtttttaattctgtttatgtgatgaatcacatttattgatttgcctatgttgaactaaccttgcatcccaggagtaaagactacttgattgtggtagattagcttttaatttttatttatttatttttttgagacggagtcttgctctttagcccaggctggagtgcagtggaacgagctcagctcactgcaacctctgcctcctgggttcaagcgattctcgtgcctcagcctcccagatacctgggattacaggtttgcaccactagacctgtctaatttttgtatttttggtagagatggggtttccccgtgttggccgggttggctttgaaatcctgacctcaagtgatctgcctgccttggccccacaaagtgctgagattacaggtgtgagccaccacactggcctgcattagctttttaatgtgctgctggttcagtttgttagtattttatttagaatttttgtgtctgtgttcattagggatattggcccggggttttcttttttcattgtgtctttgccaggttttggtatcagaatgctgctggcctcatggaatgggttagggaagagtccctcttcgattttttggaataatttcagtaggattggtactagctcttcttcgtgtctggtggggtttggctgtgagtccrtctggtccagggccttttctgattggtaagttttttatttttcattattttttgagacagggtctcactgtgtcrcccatactggagttcagtggcatgatcacggctcactgctgcagcctcgacttcccagactcaggtgatcctcccaccttagcctcctgagtagctggacctacgggtatgtgctaccacacctggctgttttttttttttttttgagagataaggtttcgtcatgttgcccagcctggtcttgaactcctaggctcaagcgatccgcctgcctttgcctcccaaagtgctgggattgtaggcatgagccatggccctggccaggttttttattactgattcaattttggaactcgtcattggtctgttcagaatttcagtttcttcctggttcagtcttgtgaggttgtatgtttccaggaatttatctggaattttaggttttctagtttgtgtgcataaaggtgtttgtaatagtctctgagggttctttgtatttctgtgggattggtggtaatgtcagttttgtcatttctgatggtgtttatttagatcgtctctctttttttctttattaatctagctagtggtctatcaattttattttttgaaagaaccaacttttggtttcgtttatcatttatttgtatggattttcacatctcaatttcattcagttcagcactgattttggttatttcttctgctggctttggggttggtttgttcttgtttttctagtttctctaggtgtgatgttaggttgttaatttgagatctttctagctttttgatggaagtgtttagtgctataaactttcctcttaatactgctttaactgtatcctagtgattctggtatgctgtatctttgttttcattagtttcaaagaactttctgatttctcccttaatttcattttttactgaaaagtcattcaggaacaagttgtctcatttccatgtaattgtatagttttgagagacctttttagtattgatttctattttaattgcactataatccgagagtgtggttggtatgattttggtttttttgcctacgcacttctcaaaagaagacatatatgcagcccaataagcatatgaaaaaatgctcaggattactaatcgtcagagaaatgcaaaccaaaaccacagcgagataccatctcacaccagtcagaatagctattattagaaagtyaaagaataacagttgttggcaaggttgtggagaaaagggaatgcctatacactgccggtgagaatgtaaattagttcagccactgtggaaggcagtttgatttcccagagaacttaaaacggaactaccattctgcccagcaatccattactgggtatatacccagaggaatataaatcgttttaccaaaaagacacatgcacttgtatgtttattgtggcactrttcacaagagcaaagacatggaatcaacctagatgcccatcagtggtggacttaataaagaaaatgtggtacatatacatcatgggatactatacagctatttaaaaaaaacaaaaccgaaatcatgtcctttgcagcaacatggatgcagctggaggtcattatcctaagtgaattaaagcaggaacagaaagccaagtaccacgtgttctcacttaaaagtgggagctaaacattgagtacacatgggcataaacatggacacgagggcttacttgaggtggtgagggtaagaggaggatgagggtcaaaaaactgcctatcttgtactatggtcagttgctgggtgaygaaataatcagtacaccaaattccagtgacacagtttatccrtgtaacaaatgtacatatgtgcccccaaacctaaaatcaaaaaaaatatgtrtagaaaacaaagagcaaaatgaaggacctaaaacctaaaaaccatttatagtcaatatataaaaaggcttaataccccagtyaaaatcagatatggataaattttataaaaacaaagtaaacaaagagggtactgactcttgtgatagttggataccaagaaccatccctcactggggcatgctgtggctcacacctgttataccaacactttgggaacccaaggcaggagaggattgcttgagcccaggagtttggcactagcctgggcaacaaagtgagaccctatctctacaaaaattaaaaaaattagccaggggtggtggtgtgtgtctgtggtcctagctactcaggaggctgagtcggggaagattgctcaagcccgggaggtcgaggctgcagtgagctgtgattgtgccattacactccagtctgggtgacagagcaagagcttatctcaaaaaagaaaaagactccatgatttaatctaatcaacttcaaaaacccaactcattcctccacacgccctgtgccttggccatagcatttacctcaccattctcctatgcattatctatttttagacctctgtctccctttgtttaaaatgttctcccagcctggataacatagcaagaccctgtctcaacaaaaaaaataaaaattagctgggtatggtggcatgtgcttgtagtcctagctacttgggaggctgaggtggaagaattacttgagcccaggatatttgaggttacagtgagctatggttgtgccactgtactccagcctgggcaacagagacccagtctggatgagagagaagagagaggggagagaggagagaaaaaagaaaagaaaagaaaaagaaagaaagaacccatcatctatgagtgctgtcctcactgaacaccagaggctgggtattgagtttacatcagcttttaatgagctctcactaggtttcttcacccattcaatgggaaggtctgcttcagagccataattgtgttcaacgggactaggttgcaaggtttaataactcttctcttctttttaaaatttaattactttattatttcacctttttttttaaagccacatgtaggctgaattcatttaatttgacagaataacactccttactgctaatcctgatcaattttagctttgtgtgtctttgggttggatccactcagataagaggacaaaagagggccgggcatggtgactagtgcctgtaatcctagcactttgggaggccaaggtgggcggatcacctgaggtcaggacttcaaaaccagcctggccaacatggtgaaacccctgtctctactaaaaatacaaaaattagcctggcgtggtggtgggcgcctctaatctaagcaatttagtgatttgagctgggctcgggaggctgaggcaggagaatcgcttgaaaacccaggaggcggagcttgcagtgagctgagatcgtgccattgcactcgcaaaaagagcgagactccatctcaaaaaaaaaaaaaaaccattcaaaaagaggacaaaaggttcatttggaaagaggayattaagaaataaggagaaatcatgaagggaattttaaaatgaaaacatatttagtggcattgttttctgttaggtttcaaaaaagtctccattccaagtgagtattggtttaggaatttctttctccttattaaaagtgttttcctatttacagtgaaaataactttagtaaaattttgtgagtactaaacttggattttaaaatcagagatttcgattatatagtctggagcctcaggattttaagtttctgtaggattgggtaaaatgccattgtagattttttggtcatcagattatagaataaatacttaaagtaacttcagattattattttcaaaaccatarcagaaactcytaccttacctatcttattgagagacaatgtgaagccaagactaatggagttagtrtgcyacattgatgatgaatgactgggtagtacaccacagagggctgtgtcatggagygtaaaggtgttattccattcctacaccctaccatccgtctttccccattaaatcaaggtcagggaatgttaccttatgtgattaaatctggtagagtcatcattaaacaggtgagataaatcatatgcagagtaacctacttttggtattgatgagactagggtggttcttaagtattttatggagatcagggtatcttcctaaatccagatgaagagatcaggttaagractgctcgctttcaggctccacctgaagaaactatgtagtaggcttctctccctctacttattttatcatcttctttgatctaataaaatgttttccttatcaataagtaatgttatctagtttggctctaccaggtgctagagaaggcattcatcattgtattgtacttgcaataactctaatacaggaaaatgttcaaaccacccataataaaagtagctaaaaagcagatttcttaaagactttgtgaccgtttaagctcarctgacctttctaagttgcatgattcttagaaaggtcccagagagatgtctatctggtgctatatagcagttgctaattaaatrttttttaattgaatgattkatatgarttgaacacccagtaattatatttaaaaagtgatgacttcagtgttttgacgcctttaaaaggctacagtggtacaaaatgtaggtgctaccatgtgaaatttgaaygtacagtgaagtacrtatattcactgcaatatctagaaataaatatgtattcttataggtagaggctagtttatccttgtaattctactgataaatataaatgtatatattggggaaatttgtgggactttttcagtataaggaagaaaaaaatctgaaaattgaactcactgcagaagaaatttttttgtattttcgggggaagtaccaactagatgtgctaacactttgtatttctttatgtttagttgcctcttttttttttttttaaacggagtttccctctttcacccaggctggagtgcagtagcacaatctcggctcactgcatcctctgccttacagtttcaagtgattctcctgcctcagcctcccgagtagctgggattacaggcgcctgccaccatgcctggctaatttttgtatttttagtagagacgagggtttcaccatgttggccaggttggatctcttcacakcctrctgagcaataaatgagatagcctagagcagtggttttcaatttcaggtagttttgtttcccrgggaacatttggcaaagtctgtagacaattttttatcttttttttggagacagagtctgactttgttgcccaggttggagtgcagtggcgtgatcacggctcactgcggcttccacctcctgggctcaagcaatcctcccacctcagcctcccaactagctgtaccaccacacccggctaattttttaattttttgtagagacagagtctcactgtgttgcctaggctggtgtcaaactcctggcctcaagcagtcctgcttcggcctcccaaagtaytgggatggtaggtgtgagccaccacacccagcctgtagacatttttgatttttgtaactaggggctrgaggagggttgctactgtcatgcagtgggtggaggccagagatgctgctgaacatgctgcagtgcacaggatagacccctcaaaacaaagaattatattgggcccaaaaaggtaagagggctgaggttgagaaaccctgggatagatagagggatagtcrgtgtcatcttgtgctrattgtgtttaaggttttgttttggtgtaggtttgatttttaattttgggatcccagtgaattttcagtaagaaaattgagaccgtataattttaggcaaacctctgatgggagagagkgtttagaacaggaactagggctcagttagtggctgcaattccattatagcagtatctattggagttactttctgtctttggarttactgagaccagaggaattggattacccctctcaagttacatactgtaagrgcaacttataaaagaaaactatccacatttttttgtcagttgggaattaattgagatagaaacactgcatgtaatttagtaagacagctggaaatcccagtttgaaaacaaaatgaaaagcagacaacaagcctaacttttagttttrctttctgtgtttctcttatacctctcagaagtttcataagctccagaaattttgtgtttaaccttttagtttcttcaaattcttggttgagagggtatattggagttattaatctttgttctaaaattcttcgggtgacttctcgctgagtcatctgaccgtctcagtttacctaagtatatcccattgtaaaatgatacttaggtgcacgtatkggaagcttgaatgaggaatggagctgtataatcctaattgaaaggcagtgtaagaatcrtgagcaatccttatttgcagagaaatagggccattaccgtattagaagcattttaggttgttgttatagtttcacatacagaagtttaggtgctgaaaaattattcttttttagaaatttcttttttcaattgtttgctgttcagagtttctcagaggtccccagatgcatgtatatcagttagaagtaggacaggtatggtggctaacacctgtaatcccagcactttgggaggctgaggtgggtgggtaacttgagctcaggagtttgagaccagcctgggtgatatggcgaaaccccatctcttaaaaaaaaattaaaaaagatagaagtgagttggcgccagtgatttttaaaccaggcatacttttcttgtatgataagtagactgttggtgactcttttcccaaaacagaccagttagattttgttttttgtttttttttgagacctgaagcctcactctgtcacccaggctggagtgcagtggtgcgatcttggctcactgcaacctccgcctcccacgttcaagcaattcttgtgcctcagcctcccgagtaactgagattatgggtgtgcgccaccacacctggctaatttttgtatttttagtagaggcggggtttcaccatgttggccaggctggtctcaaactcctgaccttgcaagtgatgcrcctgcctcggccttccaaagtgctgggattacaggtgttagccaccacgcctggccagaccagttagttttgtcttccttgaaaatctgttargacagattaatctctctccttgataatttgaacaagtgtcacaggaaacttcttagtagacaaggtaatgtttacctccttgccactcactttgatgttgtacagatttgratagacttttaacccatagtaccatcttccagaagtttcatyttgcttacctttcaccatgcttagaatttacattctcaaaagaaaaaacarttatagttacatgctctttcttaccttttgctggattaactgagacctgcaggtatcctacaatgatgctgatcttctagcccgttaattctcagacctctcagattcagtgccctcttcttataagtattttgaaatactctctttagtgaaatgaaatccacaggtaatacagcttttctacatatatgtgtgtgtgtgtgtatatatatatatatatatatatatttatttttattttttttgtgagacagaatctctgtcaaccaggctgcagtgcagtggcgtgatcttggctcactgtatcctctgcctcctgggtgcttcaagcgatgctcgtgcctcagccttccaagtagctgagattacaagcgtgcatcaccacrcctggctaatttttttgtattattatttattctttgtagagacagggtttcaccatgttggccaggctggtctcgaactcctggcctcaagtgcgcccacctcggcctcccaaagtgctggggttataggcgtgagccaccacacccggccctacatatataattaaaaaaattatcttgcagtaagataaaggataaatagaaaatatttctgacagattagcttgacatgacagctacctgagtagactgctatragggtatttgcaacttaaataccaggagaagcaaaccagtacagtgaacaattctttgcaaatgtacaaataaaactcaagtacaacttctttcttcttcttcttttttttttttttttttttttttttttggtagtgatggggtctcacttagttgcccaggctggttttgagttaggctcaagctgtcctcctccttggcctcccaaagtgctgagattacaaacgtgagccactgcatctgccccaaagtacagttttctcttactttattcagcagttgcttttctggacatttagtrcatrttaaaattatggactgggcacggtggcttacgcctgtaatcccagcactttgggataccaaggcggttggatcacttgagcccaggagttggagaacagcctgggcaacatggtaaaaccctgtctctacaaaaaatttttttaaaaattagccgggcttggtggcacgtgcctgaagtcccagctacctgggaggctgaggtgggaggattacctgagcccaagaggtcaaggctgtagtgaaccgtgatcacaccgctgcactccagcctgggtgacagagtgagaccctgtctcaaaaaaaaataaataaataaataaaattatgcagaaggacttggtgcttatacgtagaatgtaattaggttctaggctttggtaattatacagattttwaaaatccagttaactattcataaggaagtttgagaataaagacattttttctttgtgctggacttgcctatgctttcctggcctctgccaantgaatgtcagtaacactttttttttttttctgcaacttttattttaagtcccggggcacatgtgcaggatgtgcaggttttgttatgtaggcaaacctgtgccatggtggttggctgcacagatcaactcatcacctagctattaagcccagcatccattagatattcttcctgaggctccctcaacaggccccagtgtgtgttgttccccaccatgtgtcctcctcatttagcccctacttacaaatgagaacgtgtgatgtgtggttttctgttcctatgttagtttgctgaggataacggcttccagctccatccacatccctgcaaagtaatcactcgtcctttttatggctgaatggtattccatggtgtatatgtaccacattttctttatctagtctctcactgatgggcatttgggtttattccatgtctttgctattgtgaatagtgagaagcacttcttaactgctgtgacaaccaaagcacttccatagatgtcccaactatcccctagatgattgtrttgtcctcattaagaatgacctctagtcatacaggaaaacatttttctgttttatcattcactcttcttttttttttcttgcttattattcactactttagcacagccttttagtctaaaagacaaagatttacttggcctttagacaattcctatatgtctttaaatttcttatttcctcaccactcttattattgatgttttcttttycataagtgttaggacagtgccttggtacatagtagatactcaattagtatttgttgaatgaaggaaacttaactgtaggctttttcttcttgccactttctgctttttgtacctgttgaaaatgatggaggtaccagtgttcataaaaaccttgaaaacaggctgggtgcagtggctcatgcctgtaatcccagcactttgggaggccgaggcaggcagatcactcgaggtcaggagttcaagaccaacctgatcaacatggtgaaaccccgtctgtactaaaaatacaaaattagccaggtatggtggcgcatgcctgtaatcccagctactcgggaggctgacgcagaagaattgcttgaacctggaaggtggagattgcagtgagccaagatcgcactactgcactccagcctgggcaacaagagtgaaagtcttgtctccaaaaaaaaaaaaaaaaaaaaaaattagctgggtctgggtgcagtggcgcacacctataatctcagcactttgggaggctgaagcgggcagatcacctgaggtcgggagtttgagaccagccagcatagtgaaatctgcatctactaaaagtacaaaaattagctgggtgtggtggcacatgcctgtaatcccagctacttgggaggctgagggaggataaccacttgaacccaggaggtggaggttgcagtgagctgaaattgcaccactgcactccagcctgggcaacagagtgagactctgtctcaaaaaaaaaaaaaaaaaatccttgaaaacaaagcacagacctgtagactaatgactaaagggttggctcaaagcagcagtttgatggaccacttgccattagttagtggccagtagagtggagcctcttgtggaatacggctttatttctgcatatgagagcttataagaagaggagtcatcccataattacatgcctttcagataaacagctgatgggctttgtaggcagagttaytttaatgaagtcattaatagctgaatttgttgaatgaaagcttcttctagagaatcttttctaatttaggtactactgtgaggtatttttgctctcaaacttattaaactgttggttccctgattttgaatttatggtgccagttattagatcctgatctcttaatatggtcactgctaaatgtttacaggtattagcatacctagttaagacaagttaggttggggaacagaaatttttatatcttagcctcgttggtttgaaaaaaaattagttatttggattgctgatatagtgcaaaaactatttataatggtacatttactttctgtttaataacatgtaaaaggcaaacagcaaattaattttcactgctagtcttgatttgtatgttttagattaawgggttgttgaaactataataaaaaaccaaataatggttgggcaaaggaggacatgattagacatttctcaaaagaaggcatataaatggccaacaggtatatgaaacagtgcttaacatcactaatcatcagagaaatgcaaaccaaaaccagaatgagataccattataccccagttagaatggccattattaaaaagacaaaaataacagatgctgaccagaatgtggaagaaagggaactcttaaacactgttgwtgagaatgtaaattagtatggtcactatggaaaacagaatggatatatttcaaaaaaaactgaaaactaccatacaatccagcaatcccgctactgggtagttatccagaggaaaagaaatcagtatatcaaagggatacttgcacttccatgttcattgtagtactattcacagcagcaaagacggaatcagagtatccatcagtggatgaatggataaagaaaatgtggwatatatatatatgcaagagaatagtgtttggccataagaaagaatsaagtcgtgccatttgtagcaacatggatggaactggaggttattatgttaagtgagataagccaggcacagaaagacaaatattgcatattcccactcatatgtgggagctaaaaaagttgatttcatgcaggtagagaatggaatgatatctgaggctgggaagggtgtgtgaaggcagagggggtgaggtatgtggataaagagaggttgattaatgggtataaacataaaattagatagaaggaataagttctgatgtttgatagcagagtagagtgactaaagttaacaacaatgtatatttcaaaatagctagatgagaggatttcagatattcccagcacatagaaatgataaatatttaaggtgatagatgccctaaatgccctgacttgatatgcatgtaccaaaatatcacatgtaccccatgaatatttacagatatctgtagcaataaaaaagtggttgaaagtaatattaataagtgagaatcataaaaatgtttaatttgctgaatttttcaaccttagtttactaatctttaaaattgttggtttattattctctatcaagtgcaggtgctgattgaatggatagggagaagttgttttaatattatattagcatcctattttaatatgcaatcagtattagatggacagattcagagttcctaaggtttttaataagattagcagtataatataggtctatctcgtcctgtaacactagtactgtaaaaggtttccagaagtatatctatttctattcctgagtgtgattgattctggatattttctttgaggacacacacatatactctatttgtgaagtacagcacttcgaatttagtttgtatttgataataacattaaaataacaggcactagattatgcaacagtaacagcagtccatttttatttattcagtaactgtattggtaccttctatattccaggagctgttctaggtacttgggctgttgtcttagtccattttgtgttgcttataaaggaataactgaagctgggtaacttaaaagaggtttacggctgggcgcagtggcgcgtacctgtaatcccagctgctcaggaggctgaggcaggagaattcttgaacccaggaggtggaggttgcagtgagccgagatcctgccactgcactccagcctgggcgacagaaaaagactctgtctcaacaaaaaataaacaaaagaagtttacttagctcattactctgcagacagtacaagaagcttcgcaccagcatctgcttctggtgggacctcaggaagcttccagtcatagtggaaggccaaggggaagcaggtgttccgcaaggcaagagagaaaggggaggggtaccacactcttttaaacaaccacatcactcattcctgtaaggactgcaccaagacattcatgagggatctgcgtccatgacctaaatacctcccactaggccctacctccaacattggggatcaaatttcaacatgagatttagaggggacacatatccaaactatatcagctatattcaggaagaagtacggagattaataaaatgttgagaaaaatgggtagtaaaatcaggatttaaatattttcttctccttttggctttctttaaatttaatatttatttatttatttatctattttatttttttgagatggagtcttcctctgttgcccaggctggagtgcagtggcacgatctcagctcactgaaacctctgcctcccgggttcaagcgattctcctgcttcagcttcctgagcagctgggattacaggtgtgggccacaatgcccagctaatttttgtatttttagtagagacggggtttcaccctgttggccaggctggtcttgaacacctgacctcaagtgatccacccgcctcagcttcccaaagtgctgggattatagtcgtgagccactgtgcctggacttaaatttaatatctcatttaaacattaaattaatgtagctatctctggattagagcaaatgcctttttgcccatttcaggtctgagatattgttgttgtaagaactaacaactagccctcattttgcaactgttgtcagccctttttatagctgattttatttattttaattaattatatataaattgtattctagtactgtgggaaaaaatgttttattttagctgttaaattattgaacctttcagggtcttcattttccttgtctgtaaaatgagatagttgtgtttattcctgctagctacggtttagtgatttgagctctggggtatttttggattttgtgtaagggaattttcttctgtagtttttccacatagatcatgtggtagccactgacatactaggatttaaattttacccctgaaataatctcctttatgagttacaaactattagtgcatattttatcttataatgatgaacagtcttgaaaatgttaggatggaggacataatgcaaagcaatgtcaaaattttccttttataaatcaaacaaagcaataatgctggtaatgttgactgaataaattaaaacttcattttttttttttttgaagacttgggattcagtaacaggtaaacttggcctggataattttttttttagaactattttataaatattctttgtttgctttgaggttgcatttacattgcttttgtttttaaagttgtattcagttaactrattgttttcttaatccaatggtcagtggctactgttaacaaccagtttgtatgtgatctttcctgacttgaatgttcctgctgtgagttgaattagatcatacttgtgaaattctcctatgtcattgatggcaagtcaatgctagaattccaagtattacttttatttcgatgaagagttctcagtcagaagctctgattgctctgtgggtacatggtaaaatagtactttttaaaatgaaatggtgatggtagatggtttttttttaaatatttatacttggcaaaataaaaaagctggcaatccttgcaggtttccaattttttaatttgaaaattgaactgctttatgggaaccaaaagtatggaaatcagtagtctagatcagtgtttctcaaactgtgtgccaggagatttaataggagttcagaattatggtaaaatattgcataccaaattgttgccctatctccatccctccacttccccttttatgacatggaatggcatattaatggttctgaaaaatcattcattaaagcagcatgtttgatatttagttcaggcttttctaaatctagtttttctccccaccttaaccactggttaatatcctgtgaaacgtggtttgagaaatattccatatccaaatcactcagaataatttattagaacctacagtttgttgagaatttagtatattcccggtactatctcatttagatgaagtgagctacccagtgtcacacaactggttggttattctgtgtttccagtccgattgtgtgtgtgtgtgtgtgtgtgtgtgtgtgcatgcatgcatgcatttaaggtggacaacatgatgttttgaagtgcacatacatagttgaaatgattaccagtccagctttgttttgcttcacattcattactctaaccacttaggctgttctgaagcattgcttagttctcatttcgaggctaagtacctaagactaggatattcagaagttcattttatatgccttttgacttccctaactactagaatgtggttaagggaagtatgattttatcagagcatatactttgtaggtgattttagtgacttttaatcccaggttatttttctttctacacaatgcttggaatgtagagcttagaatttttgctgagtgaatgaatgttgtcactttgtcaaagaagattctgtcagcctaagctaaaagcaagaaagtacattttacttctaaactattgtggtacacatcagagctaaacatctatactttttggctcatttatcattttatatttatgccactgggttgttccctttcttgctgcctttagtgtgagcaagccaaaaacactataaatcttttctgctatattatgttgtctgaggttaattaacattttctctggtaattcttgtagtcctgtgtgtttcttccttagaaaatttggcttcttgaccatctgatcaagcttgtatcaagtaacactttgtcttgtgacctgattttctgccttggtacacaatgagctaaagaagcttggttgattatgcactcctgtttggaatctgtaatgtcagtgttcaatcatggcctgaattaaggaacaaaatgataaaggtggctgggtgcggtggctcacgcctctaatcccagcactttgggaggctgaggcaggtggatcacttgaggtcaggagttcaacaccagcctggccaatgtggtgaaacccatctctactaaaaatacaaaaattagctgggcataatggcgggcacctgtattcccacctactgggaagctgaggtgggagaattgcttcagcctgggaggcagagtttgcagtgagccaagatcacgccactgcattccagcctgggcaacagagtgagactcagtctcaaaataaataaataaataaaggttgtgaatgtgaatgttactattcttagggggatgaaaccataaatcaaggtagttttattggcctggaactgaatcacagcccttcaaacagtatttaaattgtataggtatccttgtgtaacactgaaactgtggcctattgttttcctttttagtaaactgattttctttattaatagccaagtgaacaattgcttacaactccttgagctcagagaactaatttcaaaatgtttagactggaaactttctctttcttgtaatgaatgagaggtatgtcttccttaatttcttgaaggagagttgagagaaagaagtcagtgaggacagtatttgtactctagaaagagattttcacagagaccttgaggataatggtggaactgggaacagaactcagaagttctgttgtctttgttttggggttcacttgatgcttttgaaaagggaggaggatgtataacctggcttgaaaagggaaccagtctctttgacctagtgacgagacttagcatcagagtaaaagtatagtgggtactggcctaggagctgtgatgtgtggcaaacattttgtgttcttaatccttctaattagaaatttctgactgtcttgccatgtgatactcaaagagagtataaacaatagaatgtgactaacttaaaattgtggctgtcagactagacagaaaatgggcttcttttttttgacactttaatcaccattggaacttctgttttagataaaataaacactttaagttgataacgaagaggtagaaaaacatagctgtgaaattaggaaaaaagtagtaagtctttatattacatttgatgtactgaataagtattggatacaaacttgtataggtttcaagagtatttaaatttcacattatgtgacctgatataaataggtctgaatttgtagctccttgtcctctaaggtgtcacgtattgtgataactaatcctttgaaatacgggaggcaaaagaaataatgcattaaaaccacccttttcctttccttcctatatttctagtgctttgtgtcctcttgggctgttcttttaagtgggtaagcatcagggctaagctatgcttagggagttgttctcgattcagaacctgccactgagtatcttcactagagttgtttacagtaatcttttagagcctagggggaaagcagcttagtttggtggaaacagttgggttcctgtttccagtgattctaggtaagtaacttaggttttttgttatgcttttcttttacagatgggatgatagaaatgactcggctgggcgtggtggctcacgcctgtaatcccagcactttgggaggctaacatgagaggattgcttgagctcaggagttcgagactagcttgggcaacatggcaaaactccgtctctacaaaaaatataaaaattagctgggcgtaatggtatacacctgtagtcccagctactcgggaggctgaggtgggagaatctctggagcctgggaggcagaggttgcagtgagccgagatggtgccactgcactccagcctgggcaacagagcgagaccctgtctcagtttaaaaaaaaagagagaaatgagttactgaattagaaatgagttactgaaaaagagagaaatgagttactgaggggtaagatttcgtgactgcatacattggaaatattttggggagaggtttgttgtgaagacttgacgtattaataggtaagcgtaggatagatttccatagtgcctgacatataattggcatttgattattattcttgatttagtgttcctccctttaaaagcatagttattttctttctttctttctttttttttgacatggagtctcactctttcactcactgcaacctctgcctcctgggttcaagcaattctcctgcctcagcctgcacagtagctgggattacaggcatgtgccaccacgcctggctaatttttgtatttttagtagagacggggttttgccatgttgggccaggctcgaactcctggcctcaagtgatcctccctccgtggccttccaaagtgctgagattataggctgagccactgtgcctggcctaaaagcatagttattttcaatcagcatggtataatgaaaagaagatggaattttggattcaagaaagaccaaggtttaaagctccttttctttttctttttttttgagacggagtcttgctgtgcgctctgcgctgtgcccaggctggagtgcggtgtcgtaatcttggctcactgcaagccctgcctcttgggttcatgccattctcctgcctcagcctcttgagtagctgggactacaggctcccaacaccacgcccagctaatttttatgtatttttagtagagatggggtttcaccgtgttagccaggatggtctcgatctcctgactttgtgatctgcccgccttggccctcccaaagtgctgggattacaggcatgagccactgcgcccgtcctaaagctccttttcatcccttgggcaatgttctgattttctattattgcctaacaagtctatccaaaatgtagtggcttaatacaataacttattattatctctcatgtttctgtggattgacagggttcagctggacacttctcccgttaaggtctttcatgtggttgtggtcagatagtacctggagatggggccatctgaagactctgccctaggctggatccaagatggtgttttycttttacttgtctgatgtctcagtgctctttgagatggcctctttatccagcagagtagcctaaacttatgtggctgctcagggttccaagagttaggaagtagaagttgccaggcagttaagggctttggaactggcatagtattgtatctattaaagaagtcacagggcctcccagattcaaggggcttgagaaataaactgcatgtctttaaaggragtgggaaggtcacattgcagaagaatatatgggctgagaggtcttattggggctgtctctggaaggccatctgggcacaattttttttcattttcttgtttgtaaaatagcaataacaatatttacctcacagagtggttaagtggaatagcacagtgtcaagcacatcatgtgtttagtaaatataagtagacttccccccttaattctctaatgtaacaaattacttctgatctacttttattttaaatggccgcaagtttgctcagtatatggtttggttaactgtttcttcacccgactatgtttctcagactgttgtaacttaaaacaaactttatcatggaaaatttcaaacacatcaaagtaaagagaataccacattaacagaataagggacaaaaactgcatcatcatctcaattcatgcagaaaaagcatttgatagatccagcatactttcatgataaaaacactcaactaggaatagaaggaaactcagcatatcaaagtgtatttatgaaaagcccacagtggctgggcctgttggctcatgcctgtaattccagcactctgggaggccaaggtgggaggatcacttgagtccaggagtttgagaccagcctgggcaacaaagtgagacctaatctctgcaaaaaataaacacaattagccaggcatggtgatgtacgcctatagtcctagctacttgggacgctttggtgggaggattggttgagtctgcagtgagcaaagatcgtaccatatcacttcagaatgggcaacagagcaagacccttcccaccctcacccaccccctccccccaacaaaaaaaagcccacagtgaacatctcattcagtggtgaaagaccgaaagctttccccctaacatcaggaacatggcaaagatgcccattcttgccactgctatttcaacatagtattaagagtcctggccagagccaatttaggcaagaaaaagaaaagcacccaaattagaaaggaagaagtaaaattatctctgttcacagatgatatgatcttatttgttgaaaacccggaagctggctgcagtggctcatgcctgtaatcccagcactttgggaggccgaggcaggcggatcacgaggtcaagagatcgagaccatcctggccaacatggtgaaaccccgtctttactaaaaatacaaaaattagctgggcatgatggcaggcatttgtagtcccagctactcgggaggctgaggcaggagatttgcttgaacccaggaggcagaggttgcagtgagccgagattgcgccactgcaccccagcctggtgacagagcgacactccatctaaaaaaaaaaaaaaagaaaaccctaaacattccacaaaaaaccctgttataactaataaatgaattcagcaaagttgcaggatacaaaatcaacacacaaaaattagttatgtttccatacacagtgaacaacttgaaaaattaagaaaacaattccattaacagtagcatcagaaagaatgaaagttaggaatgaccctaaccaaagaagtgaaaaatttgaatattaaaaaccgtaaaatactgctgaaaagaattaaagagcatacaaataaatagaaagacatcctgtgttcatggattggaagacttaatattgttaagatatgaattcttcccaaagcgatctacagattcaacagaatacctatcaaaatcccaacagcattttttttgcaaatagaagtttcatcccaaaattaatttggaatctcacgttacccctaatagccagaacagttttcaaaaagaaaaacaaagctggaggactcaaactttctgatttcaaaatatattactaagctatggtaataaaactagtgtggtactggcataacaacagacatatagacaatggaatagagactccagaaataaacccttgcatatgtggtcagatgatcttggacagaggtgctaggacccctctgtggagcaaggacagtctcttcagcaaacagtgttgggaaaactggactttcacatacaaaacaaaaatttggactcatattttacactatatataaaaataaactcaaagtggattaaagacctaaatataagacctaaaactgtaaaactcctaaaagaaaacttagaggaaaggcttataacttaaaacttagaggaaaggctttataactttggatttggcagtgatttctggcatatgacaccataagcacaggcaacaaaagsaaaaataggcaaatgggactgcatcaaacttaaaaactttggtgcatcaatgaacacaatcaacttgaaaaggcaacctgtggaatgggagaaaatgtttgtaaattgtgtatctgttaaagtattaatatccagaatgtagaaagaacaacaactcaacaacaaaaaatcaaataaacagattaaaaaataggcaaatgacttgaatagtcatttctccaaagatgataaaccaatggtcaagacacatttgaaaagatgttcaacatcactaatcatcagagagatccaaatcaaaaccacaatgagatatcacctcacatccattaggatggctactattaaaaaacaaacagggaattacgagtgttagtgaagattatgagaaattggaactattcttgtgcactgttgggactgtaaaatggtgcaactgtgatggaaaacagcatggcagttcctcaaaaaattaaaaatagaattactatgtaatccatcaaactcatttctggatatgtatccagaagtattcaatgcaggacctcagagagatatttgcacacctatgctcatagcacattcaggatagctaagaggtgaaaacaacgcagatgtccttgatgaataaataaaatatggtatatacacacaatggaatattatttagctttaaaaaggaaataaatcctgtcatatgcgacagtgtgggtgaaccttgaggatattgtgttaagtgaaataagccagtcaaagacgaatactgtatgctttcacttatattaggtattattactgaaacaccagggatgtgttctaggttatgctgcttgctgcacagaaagccagttgctgagacgatgagttttgccagagaaggaggttttaattgggtgctgtagctgaggagagggtaactcagtctcaaatccatctccctggctgactacaattaagggcttatatagcagggaagaactgtaactacatgcaggaaaataggaattagggagagataaggaagagaagttggtcaacaggaagcaggaggtcacttaggcaatcatgatgggttgaggggtttgaggtttcattgtttagatgcagtgatctggtacgtttcagttccttgatatcatctgggagacctgatggttggtttcctgagaaaggaactcagataagacaaatgtaactttttcaagttttaagactgggagggtcaatttctatctttattcaaaagaaactataatggtcagttctatgggacagttaggttgttggtgtcagtatcaaaaattataaattcatagaaacagaggtagaatggtggttaccagggaatgaaggggagaaatgggttgttgttgtttaatgggtatagagtttcagttttgcaagatgagaaggttctggagatgtttcacagcagtgtgaatatacttaacacttctgaactgtacacttaaaaatggttaatatgggctgagtgtggtggctcatgcctgtaatcctagtattttgggaggctgaggcaggcagattgcttgagcttaggagttcaagaccagcctgggcaacrtggtgaagcctcatgtctacaaaaaatacaaaaattagccaggtgcagtggsatgcacctgtagtctcaggaggcggaagttacaatgagttgagatcatgccactgcgctccagcttgggtgacagagggagaccctgtctcagaaaaaaaaaaaaagttaagatgggaaatttttatgtattttctaccacaaaatgtgtagacagaataatacaacaaatctacatgtatacagcttcaacaattatcaacttataaacaatcttattttatttctgtcctcatctaacaccttgtctcttgattagttggaagcaattgatagagtttttgagctcttagagtgaaggggtggacccttaacatagctggaaatcatgggaaagctagtgacttgtgtgaatccagaagaaaagtggtactagtaagtggagtgatatgaagtctttataaggaaaatctagaaacaggaaatataataactttagagtatcattttggggtttccaagtatctaagaggcagattaaagaaatggaagtgagatagttttttgagaccagactttgttctgaaatcagacttaagatacaaatgtgcattttttactttgataattagagaatgaagatcttgtgtattctaaaaagttctctgtttttcctgtaatgttgattgcaggaggatagtccagggctgtgtggtttgttttataagtagctacttttatcaagaataattagcagagcatttgggaagagttttggcttttcttccctgaaatcaaaatataactatttagaaagcttttattgtcgcttataaatggaatgagtacttgtcacttccaaatgacaggaagaaccatagagcacttctacagtttgatttatatctcttaagtgtcatgttcctgtgcgggagctgtagtggttgacagcctggttcctagaactgagaggtgaagcccgctgagcttctggattgggtggggacttggagaacttttgtgtctagctaaagcattgtaaatgcaccaatcagtgccctgtgtctagctaaaggattgtaaacacactaatcagcactctgtaaaaatgtaccaatcagcactctgtaaaatggaccaatcagcgctctgtaaaatggaccaatcaagcaggacgtgggcggggacaaataagggaataaaagctggccgtaccagccagcagcagcaagcagcttgggtcccttccgcgctgtggaagctttgttcttggctcttctcagtaaaacttgctgctgctcactctttgggtctgcactacttttatgagctgtaacactcacctggagggtctgtggcttcattcctgaagtcagtgagaccgtgaacccaccgggaggatcaaacaattccggacgtgccaactttaagagctgtaacactccctgcgaaggtctgcggcttcactcctgaagtcagcgagaccacgaaccaaccagaatgaagaaaccccagacacatctgaacatctgaaggaacaaactccggacacactatctttttttttttttttttttttgaaatggagtctcgctctgtcacccaggctggagtgcggtggcgcgatctaggctcacggcaagctccgcctcccgggttcacaccattctcctgcttcagccttcccagtagctgggactacaggcgcccgccaccacgcacggctaattttttgtatttttagtagagacagggtttcaccgtgttagccaggatagtctcaatctcctgactttgtgatccaccctcctcggcctcccaaagtgctagaattacaggcgtgagctactgcgcctggtcaggacacaccatctttaagaagtgtaacactcaccgggagggtccgcgcttcatttttgaagtcagtgagaccaagaacccacgggaaggaataaattccggacacagaaccgtgactgggaccatgtgaagtggggacttcacatgatcccaataggagatcgcaccactgcactccagcctgtgygtcagagtgagactctgtctcaaaaaaaaaaaaaaaaaaaaaaaaaaagaaagagattagatgscccttgccatgcagaaagttagggaaatagtgttctagttacaggaagcttttaggcagtgctgagcttgatgagttcaaagaatcaaaagaagtccagtgtgtggctggaacacactgaaggaggggaggggtgacaatgagattgtcaagttgagcacagaccagccttgtaaatcatgttaaagaatttaactttaagtgtttttgtaaataattgaaatattttaagctgggtaatgacatggtctgttttatgctttaaaaaagatggttcttttttgatttcagattggaaaggactaaaagagaagcaggacacgacttaagagggaagatattcgggctgggcgtggtggctcacgcctgtaattccagcactttgggaggctgaggcaggcggatcactcgaggtcaggagttcgagaccagcctggccatcgtggcgaaacaccgtctctactagaaatacaaaaattagccgggtgtggtggcacatgcctgtaatcccagccactctggaggctgaggtgggagaattgcttgaacccaggaggcagaggttgcagtgagccaagattgtgccattgcactccagcctgagtgacagagcgagacttcgtctcaaaaaaaaaaaaaaaaaaaagaaagagggtaagatatttagtgctcagaaccagtgctggcttgggttaaggtagcagcagcggcacaaggagtatgtagatgtgggaaatgtgtttgtgtttggagtaccaggacttagtggtgggaggtgaaagagaggcgttatgaatgacccctgggtttctagtatgagcaaactgatatgccacctctcgagggtgtgtgtgtgtgtgtgagaaaaagcatgtgagagagcatacatataagagtaattgagtctggaattcagaagactggcctgggatagagatacacatttggggggagttggcatgtagagagatttaaagcaataggaatgagtgagagagggagagagaagaaagagggcctagcactgtgatttcatttttctattgactctgttttttgaatttaattttagacattagaatagataaggttagctttccaaaatcagtctcatttgtattcggcattcagataaactcatatatttgcatatattattgttattattttttgatacagggtctcgctgtgttacccagactgcagtgcagttgcaccatcacagcttactgcagcctcaacttcctgggctcaagtgatcctttggcctcagcctccaagtagctgggactacaggcatgcgccaccatacctggctaatttttaaatttttgtagagacaaggtctcactatgttgcccaggctgatctcaaactcctgagctctagcaatcttcctgcctcagcctcccaaagtattaagattataggcgtgagccaccacgcctgaccagataaattttcagaatgggaaagggatggagttgcagctttctgggagggtaggggatgaaggagtagaggaggactcagggatttatgtggtctccagattacttcatttctggagtagtttacagtatgcccattatgaatgtgtctcatcctttatgtgtgtagtggagaaaaaaggttgagtttctgatcctcaaggtaaagtcgatattaatagttaactaaagtttcctacattctggcccctatctgcctgtctgcatatccacattcataccattcccttccaacctccatgcatgctgttttctatcatcatggtcctagacctagaatttcctttttcattggacaaatattttaggtctctgtttcagtcagagctttccctagttcccccaggcaaactctgtatttgtttctgtttctagtgttcattggttatagcaattattgtattaaatttgctgtttcttggtttgactgtctcctcaagaaactaatctttttgacatgagggattttttttttcttttaaaaaagcacttgagggccaggcatggtgggttttgcctgtaatcccagcactttgggaggatgacttgagcacaggagttcgaggctgccttgagccgtgattgtgccactgcactccagtctaggtgacagaatgagaccccatctctttagaaaaaaagtgtttcagtgtttgaattaccatcctgtctttctttgaagagccaaatacagcttacatcatcttcaggtaaaacaaaatttagggttcagaaactatatggcataagaaaatagttgaactgggcacagtgtttcatgcctgtaattccagcactttgggaggccaaggtgggcagattgcttgagctcaggagttctttcagaccagccagggcaacgtggcaagaccttatctctaccaaaaatacaaatagctggtcatggtatgtgcctgtggtcccagctgaggccggcaggattgcctgagccctggaggtcaaggctacagtgagccaaaactgtgccactgcactccagcctgggcaacagagtgagatcctgtctcaaaaaaataaataaataaaataaaataaaaaataaaaaagaaacaaaatggttgaaaatgtctttcccatgcctttggagtctaggatgaggtttaaaaaaaaatgtgtttctcaggtctattttaataggtagttaaaatatactttaaaaaattattataaggcagtctctaaagtgtattcttatccccaaagcttgatattacttaaaagaaagatgtattactgaaggaaatagaaattgaattaatggaattgttttggttatttgaattgccatttctgtagggtatttgagaattgttaggtcttgtttggaaccattgataaacagaagatagaatagaaatattgtactgcctcattgttcctagtctacaaattgatttatgctgttattcagtttatgtctctctttctctttttttttttttttgagatggagtttcgctcttgttgcccaggctggagtgcaatggcatgatcttggctcactccaaccttgacctcctgggttcaagcgattctcctgccttagcctctcgagtagctgggattacaggcatgtgccaccatggctaatttttttttttttttttaagtagagatggggtttctccatgttggtcaggctgatctcgaattcccgacctcaggtgatctgcctgcctggcctccgaaagtgctgggattacaggcatgagccaccacacctggcccagtttatgtcttttgtatgtacacagtaaaaagtagtagtctctttctttacatagtaaaaagtagcagtttcttactttttttttttgagacrgagtctcgatctgtcgcccaggctgaagtgcaatggcactatctgggctcactgcgacctctgcctcctgggttcaagcagttctcctgcctcagcctcccaagtaactgggactacaggcacacgccaccacaccccagctaattttacatttttagtagagatggagtttcaccatgttggcaagggtggtcttgaactcctgacctcaagtgatctgcccaccttggcctcccaaagtgttaggattgcaggcrtgagccacygcgcccagactaaaaagtagcagtttctatacccatcattattataatgttttactgcgttgatatgtatatagtggagcttttttgttagatttgaagaaaaaattggacgatgaattcattctaattaaaaaaataggccaggcacggtggctcacacctgtaatcccaccactttaggaggccaaggcaggcagatcacctgaggtcaggagttcgagaccagcctgaccaacatggtaaaaccccgtctctactaaaaatacaaaattagctgggcatggtggcaggtgcctataatcccagctacttgggaggctgaggcaggagaatggcttgagcctgggaagcagagattgcagtgagccaagaccgtgccattgcactccagcttgggcagcaagagcgaaactctgtcttaaaaaaaaaaggccgggcgcagtggctcatgcctataatcccagtactttgggaggctgaggcagggggatcacctgaggtcgggagttcaagaccagcctgaccaacatggagaaaccccgtctctaataaaaatacaaaattagccaggcgtggtgttgcatgcctgtaatcccagctactcgggagactgaggcaggagaatctcttgaacctgggaggcagaggttgtggtgagccaagatcgcaccattgcactccagcctgggcaacaagagtgaaactccgtctctaaataaacaaataaataacctaaattttaaaataaaaaaatctttgacactctacctttyagctgtcagtggaaaccacttaggtagctatgaagcaattctgcaaatattttatggaattctatatttgccagagtataatagaaaaaactaggccgggactgggcgtggtggctcgtgcctgtaatcccagcactttcggaggccgaggcgggtggatcgcctgaggtcaggagtttgagaccagcctgaccaacatggtgaaaccctgtctctactaaaaatacaaaaattagccaggggcttgtaatcccacctacctgggaggctgaggcaggagaatcacttaaacccaggaggtggaggttgcagtgagctgagatcacaccattgcactctagctcctgggcaagagagcgagactccatctcaaaaaaaaaaaaaaaaaaaaaaaaagaagtccgggtgtggtggctcacacctgtaatcccagcactttgggaggctgaggcaggtagttcagctgaggtcgggagttcgagactagcctgaccaacatggaaaaacctcgtctctcctaaaaatacaaaattagccaggcgtgttgtcgcatgcctgtaatcctagctacttgggaggctgaggcaggagaatcatttgaacccaggaggtggaggttgccgtgagccgagatcatgccattgcactccagcctgggcaacaaaaagaaaaacaaaaaaaaaagaaaaaaaactaggctgggctcagtggcttatgcctgtaattccagcactttgggaggctgaggcaggaagatcacttcagttcaggagtttgagatcagcttgggcaacatagcaagacctcatcctctacaaaaaataaaaaaaattaggtatgttggcatgtgcctgtggtcctagctactctgaaggctaaggcaggaggatctcttgagcctgggagatggaggctgcagtgagccatgatcataccactgcagtccagcctgggtgacagagtgagaccctgtctcacaaaagaaaaaaaaaaacaaaaactacttgagtcagcgagtacatagaacatttcagagcctcagcttgtatactgcatgttattctgaaactacagataccacgtagctttctaatgaaaaagttttatttgtttcttcctttcttttataggaatatatatgtcccagatgtgaatcaggctttattgaagaagtgacagatgattccaggtattgtacaagctcatgaataaatcagacattctattatcaaaactattttctctcagcatggactgagtaagttgaatttgttttacaacttacactctacagagagagcgagagtgagagagagagagtgagtgcatgagcttgcacaagagagggcagaagaatgggagaggaaaaagaaagaaaaatgggaaaatttggaaagtgatatcatagcagatgtggtgatacgcactgctcctgattgtatgtggcattccatgtacatctgtacgcatgtcagagtaaatctggtaagttttcatttattatctgagacttggggcttctcttagattattagttggtttttagtgaccactstgctgtctgaaggtaaactgctgttatacctctttggcgggttagggagtgacttctgacaaagatacctaatcaggtaaacaggctgttctagccaggaaaaccrattgttactctgctttgaggaggccttgaatctcttgttcttattaaggttatttggccagtgtggtggctcacgcctgtaatcccaacactttgggaggctgaggtgggtggatcacctgaggtcaggagctcaagaccagcgtggtcaacatggtgaaaccccgtctccattaaaaacacaaaaattagctgggtatagtggcgggcgcctgtaattccagttacttgggaggctgaggcaggagaatcacttgaaaccgggaggtggaggttgcagtgagccaagactccagcctgggcaacaagagtgaaactgtgtctcaaaaaaaagaaaaaagaaaagattattgctgtcaaacttaggccatctttccagggtgatattaatatatgggtttgtaatgcttggaatttgttcttattggccttcataaaggtatacagctgataaaaaggggaaatatttctgaaagtgactattacatattccttttttgtttatgtgaacaaaactataaaatcttttttcttttttcttttttttttgagacagagtcttgctctgttgccagattggagtgcagtggttcgatctcggctcactgcaacctctgcctcccaggttcaaatgattcttgggcctcagcttgcccagtagctgggactacaggtgtctgacactatgccctgctaatttttgtgtatttttagtagagatggggttttgccgtgttggccaggctggtcttgaactcctgacctcaagtgatccgcctgccttggcctcccaaagtgctgggattacaggcatgagccaccgtgcccaacctaaaatctttttcttttttttttttttttttgtgacggagtctcactcttttgcccaggctggagtgcaagggcacgatcttggctcactgcaatctctgcctcccaggttcaagtgattctcctgcctcagcctcccaagtagctgagattacaggcatgcaccaccacgcttggctaatttttgtattcttagtagagatggggtttcaccgtgtttgccaggctggtcttgaagtcctgacctcgtgatccgcccatcttggcctcccaaagtgttgggattacaagygtgagccactgcacctggcctaacttaaaattttaataaattttagaatagcattgataggatggcctcttttggctaaacaaaatggcacatttgttcttttggggctatttggttaaacattcgtctgaaaattgaagaagtaccgactggtcaaaaagaatctgtaatctgaagcctcttaatcttggagtgactttggagattttaatggcagtaggtaattcctttactgttactgttggcagaatctaaagttgaaggtcccttccacaaccaggaaaaactacacattttacagtatgtactattagttttactttactaatgattggtgattatatgtgtaaataagctggagcttctggggcaatatgtggcatgggatctattttgatacagttaaatgtcatcttggttttaaatagtacaataccaacactaaacgtgtaagattagcatgactgcaaaattagcaattttgtgtggatggcatgctaacttgggatagctttttgtttgtgccattataattgcatcaaataacttatttcaggcacttatgctctgcatgtgctaattaaaagatatattggttgtgggagaacaattaatgggcttatcttttgccaacttttcaagtagtaaccctggtttctttaggcagatagtacttttatgcaaatacagttataaatgagaatgattaactgtaggatgaatctttgtctagcagggaactgtggattctgtggtttttgttcttaattcttttatgtgtctttgtagatcaaaggttgtcttatataggtgctattggtagcaatttactcaaatacaaagactctgtggtttgaaagagattagtgttttaaatgaaagaagaaatctttttcttagaatccttgtcttagaggcagtatgatatttccttctataaagttcataaacatttgctgatttaaatacttagcaattgcagtggtaagtagtggagggtaaaaaccagtaagaggagggccttgcatgtaaatattagataatgggctccatctgctcttaaacttccatgtagaggagcaccttgtaagttttcttaagctttgtaacatttctcagaacaatgtggtggtttttattatcccttctctatgattagctctattattctttaaaggaattttaaggaaagggaacggtgaggtagcttcagggagagcagaaccccagaaaataagagttgcggtttcaattaccaaggatgtttgaatccctgaaactgtgtagtaaaggcaggaaggaagagtcttggaagcctgtctgggcttgagcaatcaaatggatacatagccactcaatgtagttttttatggtatgtggtagttcaattagctgtttatttagcatagatgtacaagtacttttgggcttgttatacatttggagtgatttttacaaaagcgtttttctgaaattaatgcaggtattaaatggtttcttatcagggaataaggcttgagaatggttgcataaagagtggcattagctttgctttttcacttttggtttcagactaactagggtgtgtttgtttcctcagtgagctcagcacaatgcctggattggtattgtaatcctacaaatgaaaactatttgtagtagtttgtgaacttaccattggggtgagtgtttgtatgtttgtgtgcttaagtgtgtctcttgaagtaaaagtggtatccagcagttcctgtgattctttccatcccctcttcccggatgtgttaacttgttttctttgttctttgcaaatttcatggggacaatgggatttaatatttctctccactcttcagggtctttgggaatagatagttattttatcattttcacatgtgattaattcaacaacttttgagtgtcaatataggatattgacattgcaggattttaaaaggtgatagtactgtgtaatgtctgacacttaaacactctacatgtatttgaggcattaataaattgcagtctttgccttctgaatttatattaatgaaggagggaaatgggttgaaatggatgtggcaaatcctagatatttataatacaaggtaggttttagaatcaaagtgagagtgcagaagggtgtggaagagtcttatttggttggtgagttcagaagggcttgatggaggaggtagcatttgagatgggtcctgaaaggtgggtagggggagaaatatttattgaatccttttataatgttttaaatacagtaccaggccccttacattactacatttaatcattcctaagaaatattaactattgtagcctcaaatgttgtgttcatctggtggttgaatggttttttagtgaaacattttgttttgttagcgttcttgaggataaatatttgtcttttgataggtcaaatccgaattgcattgctgcctgtgggtcctccttccttctctatggtggcttctccaatttttcactggatttagccttgaaaaccacttgattttgtggtttatgatacttttcatagattaattcacatgccagttattcataatttcctttaataggtgttgtgttgggatgagttatttttccttattgggctttgttctcattatgccattctatatttagcttctgggaggggagcttgttcctgggaatagaatcaccactcattccttttctctttagttttttaggtggtggcggcagtcggatagacaataccacaacaacacattttgcagaggtaagttttcctttagctgtaggaattctttaagaagtggttaggtgttaaaatcatggcagatactaactttccagtgtggcacaacatcagagtttaactgaatgtataagaaaaaatgtgggccgtagtaacccttgggaagatttgtgttttcagtagctggggcttgggcgtgttacctttgataaacccttgattaggagaaagtaatagcctcaaactgtattcttttaaactggtagtgtttttaattcttgttttctactttgttattgtatatacagtgtgagaataagaagcttttgctgtttttgaaataacagtgttgcagactctgctttagtggtgtgacaaccaggtaaagtgcaggccaggataagttgtcgaagtcacaatgaaatagtcttcaaccttgtacagaggtactgatttccagggcttacctctagtcaacacagtagtttggtgtagattaaggatgtttacttgcctttcagatcccaagatggggtctgtaaataawttctatatcttcttataatgtggcgtccatattttttgggaaaaacaaatcttaactgtgatttgaaaacagggcattagtcttcattcttgaataccattttatattgaatccagagtaattttcttttttcacttcgtccattgacctaaagtctctttagttgtgtttttttttttaaaaaaaagaaaccattgtaactgttcttaagtgtataattcagtggcattaatactctttgtttttaatcatttagagactacaacccagaaggtaccagtcagcctataaaaaacactgacgtttttcttttgcttgtttgtatgtgtaccctatattgccrtacaacttgttcagctctagaaagctgacagatgctaaaaggaagaaataagttaaatcccataatcaggatttctttatgttttaggatcacattagccttttccagagatagccgaagtgcctagagagatagcaaaatatttcactgttttgtatgtaaattgaaattgtactagtagtatatttgaaaagtgatatttaataagaagcctgtaaaaccctaagcttctctcccttattatttgaaaattattttaagacctgtagcccccacattttgatgttgttagatttatcaacattgtctgggtaatggtcctgttctatttagggtggtttttctgcttatggtctgtgctacttcttaatatacagtattaagagttttggttaactctgaactgcccgggttgattagagtgattccagacagatcgtgttttgaacttrcatttttattttccmattttaatggattgaaaaacattatttaatatgtgttctgggccaggcacagtggctcacgcctgtaatcgcaacactttgggaggcygaggtgagcagatcacctgaggtctggagttcgagaccagcctagccaacatggtgaaaccccatctctactaaaaatacaataaattagctgggcatggtggcatgagcctgtaatcctagctacatggtaggctgagacacgagaatcgcttgaacccgggaggcagaggttgaagtgagtcgagatcgcactactgcactccagcctgggtgacagagcgagactccatctcaaaaaagtaaaatacaataaaatgtattctgtttgccagtcctggaagcctttatgatttcagtattctttcctcttgtgtgtgctatttgtgataacacagattgtcacttactgattaggcatatgcagaagaagaaatttcatttgatttttctttagtgttctcttttaggtaatggaaatagatcggtctgccaattttgtaggtatgactcaccagaaagagatgcattgagtaagaagaaaaacaaatatatgtagtcagtttcctaactttagtaatgctaaatccaacactgatggcatgagttatccttcaggtgttaaagtatttttgctgattcatagcttgtaacttcgtgttctttagatgttgccagggatttttaataaattagctaagaagtgtgtgtgtgtgtgtttttaagagatggggccttattgcccaggctggactcgaacttctgagcttaagtgatcctcccacctcaggttccctagtagctgggattacaggcaggtgtcactgtgcctggctgaaagtatatactgaatgtttcatacatagcactctcctagaaataggggcaggaagtaaatgtcatggttgccttgcctgaaaggaacttaattttgttgtggagcaagtgcaaacacttaagaaaacaaggaaggctgggcgtggtggcttacgcttgtaatcccagcactttgggaggccgaggcaggtggatcacgggaggttgggagttcaagaccagcctggccaacatggtgaaaccccatctctactaaaaaatacaaaaaattagccaggcatggtggtgggcgcctgtaattccagctacttgggaggctgaggcaggagaattgcttgaacccagaaggcggaggttgcagtgagcggagattgcaccactggactccagcctgggcaataagagtgaaactcttatctccaaaaaaaaaaaaaaaaaggaaaagtgtacagagtataataaatttattctggggtatatgtaacaagtatagtagaaggaagagttaaggtgggccagggtcttgaggagaggtcatataacagtgattaagaacacagcctctggaaccagattgcctgagctcaaatcctgtgtctgccacttattggctgtgtaatctgggcaaagttacttaraatctctcagtgcctctcttgtccttgtctgtaaattgggaaataatcatccttccctcatagggatgttacgaggattaaatgagttaatacatgctaggtgtgtagaccgcaatgtgcctaccatctagtgagtgcttgatacattttagccattattaagacttcatagtgaagttagaacttgcactggagccttgaagagtaggtggaatttagataagcaaagatgtgaaaattatctcaaaatagtattcataagctataaggttttatgctcatgtccctgaagaaaaaacttagaaataaaattatatatagaaactaaagttgtttttcttttccctgctttagttggtaatttcggcaaagacttatgctcagttttgctctatttttctttagctggagctgcttgtacaatgaagtggttattttctataagtaacatttactgatagctgaattcttaaaatactgtctatattagaagaggcttattccaagaaaatttctgtcaaaatcagtattgacttttttttaaaaaaatgagactggggtaggagataagagactaatgggatagagagaaggtaggggagggttgccagttacatgggagcagtgtttgaataatgtgtgagggccggtggagagtgaatctgaaaatattgctagcagtttgtagagagaagacattgctatactaagcttcctggtggtaatctagaaagtgagccccatagctacctgaaggtttcattgattacttgcaaacttctgaccacgacctggtgccagtgggtcatctgatcttagagtctcagcttacctgaatggattgcttcagtgcaagagtggctctggctgctgcctcagattgggagaaaataagatacatggctttctggaaaaaagagctctcaggtatgcacaagagggcagggtgctctgagctgatttatatgtatttaaataaaatttgttatttgtttttgttacataagcagcattatagtggcagtaaaaaatttaaaaatatgtatcttgagtttcacttttttttttttttttttttttttagacggagtctcactctgttgcccaggctggggtgcagtggcgcaatctcggctcactgcaacctccgccttctgggttcaagcgattatcctgcctcagcctcctgagtagctgggaccacaggcgcgtgccaccacgcctggctaattttttatatttttagtagagacggggtttcaccgtgttagccaggatggtctcgatctcctgacctcgtgatctgcccgccttggtctcccaaagtgctgggattacaggtgtgagccactgcgcccggccgagtttcactattctaagagctcccttttccatacatttcctttcagattttgtcctaaggcatagttactgaaaaataacaaccttaagctcttttttgtttgtttttttgagacggggtctcgctctgttgcccaggctggagtgcaatggcacgatctcggcttactgcaacctctgcctcctgggttctagtgattctctcacctcagcctcccgagtagcttggattacaggcccccgccgccaaacctggctaatttttgtatttttggtagagatggggttttaccacgttggccaggctggtctggaactcctgacctacagtcatcctctcgtcttggcctcccagagtgctgggattacgggcttgagtcaccgtgcctgggcctaagcttttttaaaaatgagaaatattggccgggcatgcagatcacttgaggtcaggagttccagaccagcctgtccaatgtgatgaaaccctgtctttactaaaaatacaaaaattagccgggtgtggtggcgggcacctgtaatcccagctattcgggaggctgaggcaggagaatcgcttgaacccaggaggcggaggttgcagtgggctgagattgtgccactgcactctagcctgagcaacagagcgagactccgtttcaaaaaataaagaaatatcccatattgtcattacttgattatagctttatgcattttttagcaaaatacttctcatttctcatgtgcatacctcataactgtttagagttgctgtcataagagtatattgtatttctgcctctaaaaatttacttggtattatgtcataaaccttttacttgtctctctatagttattagaattatagctggacgtggtggctcatgcctgtaatcctagcactttgggagggcggaggcaggcggattgtttgagcccaggagttcaagaccagcctgggcaacatggtaaaaccctgtgtctacaaaaataaaaataaaaagccaggtgtagtggcatatgtgtgtagtcccagctactcgagaagcggaggtgggagaatctcttgagcctgggaggcagaggttgcagtgagctgagctcgtgccactgcaccccagcctgggtgtcagagtgagaccctgtctccaaaaaaaaaaaaaaaattaggacttcatattctttaatggctacattatatttattaaactattatcctgtgttaggcatgtctagttatatatgatggttgatcatcgatcatacttcctttacctgagtctagaacatactgagaaaacatagaacaccagacagatggatataaaaatttaatttttattcagctgaattggaacacaaagttgaactgtggtcaaatggacatcctaagtttatacaggatgacctacctgagaattagaggctgcaaagcaggcacacataatcagaacaatgtactttgcatttgtgcaacttcctaatacatgaactccacttgctggagaaatgcgaaatcactagagattagactttgctattcactaatcagctacatcattcctctgttgaaaagtacatacaatatgatgccctttacataaaattctagaaaatgcaaaccacagaaagatcaggggttgcttggggatgggaaggggcaggagggaaggattacaaaggcacacgaggaaacatttcggggtgatgagtatcttccttactttgctttaatgttttcacaaaatcgcctgtgaactttttcaagattacatttctaaggttaataattataaaattatttacccttaattgactcatctttatacactctaatrttattttttgagatataattcatatactacgtaattcaccctgttaaagtgtacagctaagtggttttagtatattcacagagttatacaactattaccactgatttagaactttttcatcatccccaaaagaatccccatacacattagtagtcactacatatttctccacagttctctcagccctaggcaaccaccaatctattttctgtctctatggatttgcctatataggatatttgttataaatgaaatcatgcaatatgtgaacctttgtgactgactcttttctaattagaatactgttttcaaggttcatccatgctgtagcatgtatcagtacttcatttttatggctggataatactacatggtatggatattccacattttatttattcatcagttgatggacatttaggttgtttacactttttgcctgttatggataataatgctgctgtaaatatttttgtacaagtttttgtgtgatcatatgtttttaattttcttggttatataactaggagtgaaattgctgcgtcatatggtaactgttcaactcattgaggaacagaccataatattttaagaagtgctgatgtgatcatggttagtgtagagcaagttctgccaaatggaagatattgtccatcctgttttttattttgaatgtgtaaatagttcaccccaaatattttcagaaatactgtcattatacttacattcagagtaatgttttcagtttttcaaggcaaaacttgtcaaactgtctctgtgattctttagactgttttagcaaaactctatgatagtgttccctattagtttttacttatgtaagctgtgtcctgaatacccagttttgttgtatgagctattttttttttcttttatgcttatctaagtctactcagagacaaatgacctgaagctatttttatccttagtgctgatttggtataaatttgtgaggtgtgcttttccatcctgtgttctttggtcagggtacactattattttgagattaaaataggccacaaatacattgactgttactattaatttgcactaatttgcactttgtatactagtaggaaaatgcctcatgctgatgttgaagctgtttttargcatggatcctttagaaattttgtatattattaggtgtggtaacaatttatagtcatctaaagtatgttagtatcaaagcagagtattatgaacttggtgcttgacttttctgccagtcaagattttaaatatttcatttttatattataatgaaactaatggttactttgagagttgtcttctgtgagcaaatgttgtggaattgtatatagtaagggaatcatagatttcttataattcaccttagtgagatagatgattgagaacatggaggagtctgctcgtactttttcacttattgaagacaagtatagttttaggtttttaaatgtcgtgtttactttggaattttgggtcaagagaattcttgtgttctagaccgtttttcagactagaaaccagtgatctctaatagatgaagactataattagaaagtaaagggaaataaggcagatttgataagaagcgcaaatggcagttaaaatgaaaaggtgttttatgtcaccagtatttagagaaatctttttgtttggagacagagtttcactcttgttgcccaggctggagtgcaatggcgcgatcttagatcactgcaacctctgcctcccgggttcaagcaattctcctgcctcagcttcccgagtagctgggattacaggcatgctccaccacgcccagctaactttttgtatttttagtagagacggggtttcaccatgctaggctggtcttgaactcctcacctcaggtgatccacccgcctcagcctcccagagtgctgggattacagatgtgagccactgtgcctggctgagaaatctaattgatgtttttactctgcatattactctttgttcttcagcttatatattagaatttttaaaactttaaaaaaatgttggtcaggctgggtgcagtggctaatgcctgtaattgcagcattctgggaggccgaggcaggtggatctcctgaggtcaggagttcaagaccagtctggccaacatggtgaaaccccatctctactgaaaataaaaaattagtcgggcatggtggcagacacctgtaatcccagctactctggaggctgaggcagcagaatggcttgaacctgggaggcggagtatgcggtgagccaggatggtgccactgcactccagcctgggtgacagagcgagactccttctcaaaaaaaaaaaaaaaaaaaatgttggtcagagtaggggtaaatgtaagcatttatactctggtaggagtctgaattggtacagtagcccccccccttaccctgtggtcaaccatggcctgaaaacaggtgagtatagtacaataagatattttattttatttatttttatttttatttttatttttttgagacagggtcttgctctgttgcccaggctgaagtgccatggagtgatctcggctcactgcaacctctgcctcctgggtttgagtgattctcatgcctcagcctcctgagtagctgggactacaggcatatgccaccatgcccggctaattttttaatttttttagtagagacaaggtttcaccatgttggccaggctgatctcgaacttctggcctcagtgatcccccccaccgccttagcctctcaaagggctgggattataggcttgagctactgcgcccggttacaataagatattttaaagtggggcacagaggctcatggttcaatcccagtactttgggaggccgaggcaggaggattactttaagccagatgtttgagaccagccacaaaattagaccttatctctaaaaagaatttttttttttaattagctgagtgtgatggtacatccctgtagtcctagctacttgggagattgaggtgggaggatcacttgagcctaggagattgaggctgcagtgaaccatgatcacggcgttgcactccagcctgagcgaccgagttgagaccttgtctcaaaaaaaaaaaaaaaaggccacattcacaaaacttttattattatatattgttataactgttctattttattattagttattgttgttaatttcttactatgtctaagttataaattaagttataagttataaattaaactttactgtaggtatgtgtgtataggaaaaaacatagcatataattagggttctgtatagctcactgtaaccttgacctcatgagcttgagctcaagatcctgggttcaagtgatcctccccactcagcctcccgagtagctggaacatcaggtgcttgctaccacacttagctaatgtttaaattttttgtagagacaggatctcactctgttgcccagactggtcttgaactcctgggctcaagygatcctcctgccttggcctcccaaagtgctaggattacaggcataagccactgtgcccagcctgtttttgggttttctaggtacacaaattattaagagttcagcaaattttctgtatactaaggtcaatatacaaaaatcagttgcgtttctgttagcaggaattaactattaaaatatagaattttaaaaaaaagatactaaggcaattagaaagtcagttcaataggaaaatggacaaaagacatgaaacaagataagacataaaagagaaagaatagagatttaaaactgatttaattgaaacaactgatgagtactgaaaaagtaaactcagtgtgatttaacactgagtttaaatttaagaaataaatgtggctgggcgccatggctcacgcctgtwatcccagcactttgggaggccgaggtgggcggatcacttgaggtcaggagtttgagaccagcctggccaacatggtgaaaccccatctctactgcaaatataaaaaattagcggggcgtggtgtcacatgcctgtaatcccagcttctcgggaggctgaggcaggagaatggcttgaacccaggaggtggaggttgcagtgagccgagatcrtgccactgcaccccagcctgggcaacagagcaagactccatctcaaaaaggaaaaaaagaaaaaaaaagaaagaaatgtctggatttctaaaacaccaaaaaaaaaaaaaatgttgggggaaagagaagacatatgaatggctggtaaatattacatgacaagatgtttagccttattggtatattcgtatcagggaaagcaaactaaaaccacaatgacagggtgatgtcagcgaaaatggtagagtaggacttctgtgggtcatccctctgcagaaacaccaaacaccttgacagaaaagtcagaatttagcttatcaaaactctggaaaggtaatcaaaggtttacagcagccaagcaaatacttcgccagaagaaagggcactgaaacaaggtaagagatctttgtggcattttagcttaccctagcctcacctcccttcctggtatggctgcagtcttgaagatgacagcctgtgttccccatgctggtgcctgattccagagagtggacactcttcctcctgagggattctgtgttctgttttgtcctttctccaaaggactgccaccaggggcaaaaaacaaacaaaaaaaccaaaaaaagaaaaaaaaaaaacagggcaaacaataagatattgaaagyctgagaggaaaagctgtagagtgagtttttgtagaggaataggagctttgaaaagctattgtggatgagaaactagaaagccaagtgcacagctcagggcagtatgtgtgctcagaaaagacctgagaargccattagctttcacctctggcttgtctttaggttcaacacaaacaggaagtgaatattaaggtagatttataaaggccctgggtaagttttgaaggagtgccccaacagctaatcagtagagacctggcgagcattttacttttctttttctttcttttttttttctttttggtttatttgttttgaaatgtggtcttgccttgctcaggctaatcttgaactcgttggttcaagcgatccttccacttcagcttcctgagtagctggaattacaggcacacaccactgtacccatctatttttgtttttattttttacacattataaatgttcagtttttttaaaaaaaattacgaagcatgtgaagaatctagaaaatatgcttcattcacaagaaaaaagaaatgaacagaaactaccccgaggaagcactaatactagaattactagacaaaaactttaaatcagctgtcttaagtatactcaragagctaaaggacaccatggacaaagaagtaaaggaattcaagataataatgtctcaacaaatagagaatatcaataaagagaaatttttaaaagtaggcaaagagaaattttggagctgaaggttacaataattgaaatgaaaattcactaggggagctcaacaaaagatatgagcagacagaagaatcagcaaacttggagataggtccactgaaattatatagtttgaagagcacacatttaaaagactgaagaaaaatgaacagagtccaggagatgtgtgggataccaacatatatatcatggtaaggagagggagaaaggtgcagaaaacatgtttaagaagtaattgccaaaaccatttcaaatttgacaagacatgaatatacacatcaagaagctcagctaacacccaagaaggataaactcaaagacatccatacaagacacattataattaaaatttccgaagccagagataaagagagaatcttggaagcagcaagagagaagcaacttgtaaaatataagggatcttaaataagatgaatttctgttgatttcttagcggaaaccatggaggctagaaggcagtgggataacatatttaaagtgatgaaagacagacctgccaaccaagaattctaaatctggcaaaactatccttcaggaattaagaagaaatcatgacatacccagataaacaatagctgagggggcttcattgttaayagacctgccctgtaagaaatgctaaaaggagtcttcaggctcaccacagatctattaaattttctttttggcataggaccgaaacatgcattttaattaaacattcgtaatttttcttacacagcaaaaccaaaagccccacaatggaaaatcattttctgttcactgattgttaaaaacttttttwaaaaaaagtcctgtgacatcaagtgcttgccaggatgtggcacagtagaaactcttaaacacttggtgggtgtttaaattgctacaaccagtttggaaaacaatttgtcattacccagtaaagttgaagatgtatagatcatgtaatagttttacagaccaaaaatatagaaactctggtacctctgcagaagaagacatacagtaatattcacagtggccatttgtaatataaaaaactgtaaacaatccaggtgtttattgattgatttttctaacatgtgacttatttctggtctttactagctttggggccatttggatcacacgatgttttttcaagattttagaccctttctaagtagcagtccactggaccaagataatagagccaatgaaaggggtcaccagactcacactgacttctggggagcaagacctccacggttgccattgggtcggagatacagatctcgaggaagttctcgtcctgacagatctccagctattgaagggtgagttgttttattttaagttctttttaaggtagtttcaatgaaggacaaattggtataatctaatctttataagggtctcatacttattacctttgtggacaagatggacatatgtagaaaggatgaaagtgaagctaaattgaatgttagtactcacccgatgataaaccagagagtgagaaatgctatgtctctgattaacatttttattaatggctcagattaatttatagatgatatgtgtctcagtccattttgtgcagctatagcagaatacctgagactgggtgatttataaagaacagagattcatttcttatatttctggaggctgggaagtccaaggttgagggatccacatctggcgagggccttcttgctgtgtcattccatgttggaaggcagaagggcaagagagcatgcatgagcaagaaagaaaggtgccaaactcatccttttattaggaactcactcaacaataactaatccacttccaggataaaggcatttaatccactcacaggagattcatctcttaaagtctccacctttcaacactgctccactggggattaagtttccaacacrtgaatttttgaggagggcacattcaaactatagcagtatatttatcaaaatttcaaaagggtatcaaatatattaggcattaggattaaatatttcaacagattggaacagtggacttaacatgaaatttaatcaagtatctgctttttgtgaagaaaggaaaaaaatttaataggataaatatgaagtcttgtgactgtaaaaacattcatgtaataaatgtttgttgagtgtcttttgtatgggacactgtactagacactaggaacacaatgatgagtcaaatagatggttttgctcatggatctcatttagttggaataataaacgttaattttaagtgtttaccatatgcagaggactgtgcttcatgctttatctgctttatgttgtttaatttgtgtgaagtaataggtgctattgctgttttcattttataaaataattaactgagtctcagagaaataaagtaacagccattggtggatctaagacttgaatctagggctatatgaatctagtgcgacattgtcttatatggtagctgctagccacatgtagctatatgtttacatttaagttaaccaaaagttaataaaactcaaaattcaaagtacctcaatcccaaatagctatattttgagtgctcattggccacatgtagctaatacttatcatatttgacagaacatattatagaaaatttccattatcttagttctattgaacagtgctgttctagagcctacactccccctttcccccaacacacaccttctaggctttattaacattttactatacttgcgttattacatatctatccattagtgtttctttgttaaacttgtttgcttttggttcctaatatatgcactatcatactaagaaagtttaattttattcataatttattaggggcttttaattaagaatgactaatgattttgtcacatgccctttgcagtcctatcaaaatgaccttagagtttttctcccttaaacagttaatgcattttattaacaagtaggttttctaatgttttctagtgtttttattcaagctgctttgtcaaggagcactaaaacctcttttttaggggtcggggttggggaaacagggtctcactttgtttcccaggctagaatgcagtagcaagatcatgtttcactacaacctcaaactcggtgggctcaagcaatcctcccacttcagcctatgaactaggtaggactacaagcatgtgccaccacgcctggctaatttttcaatttttggtagagactaggttgcccargctggagtctcttaacacattattggagttgatttgttccttatctttttttttttttttttttaaggatttttacatttattcaaaagaggatgagtctctttatcaagttttggtgtcaggattatattagtttcataaaaggaactgggaaaacttgctgtattcttatgcttggaaatagtttacataacacaggaattacctattatttaaaggtttaatgcaagttacctgtaattccatctggacctggtatctttttgggaactagatctattacagtcttttcagttacttctgtggttgatagtatagggtagtgttttatttatctctgtattctcagcttctagtgcagtatcggttttatagtggctactaaacatgtttgttttgaataagtggataattgtaattatgtctctaaaaagtataaaaaacatatgaattaatagtaataatagctaagagtatgtgccagaaactagtctaaatgctttacaggtattcatttgtttaatcctcactataaccatgtgaagaaggtattgtgaatatctccattttactggagaaactgaggcacagagagtttaggtaaattgtctaagagtataaaggcagttaaatattggagccaggatagtgcaaaaatcaaagtatttgtatttggtgagatttttaactgttyacttatactaaaaaattttagtataactatttagtataagtcaaaaatttaaaattaagtagccttctcacttattttttaaccaaagatttaagcatttccctaattttctcagaaactttccttccaaggcaccagtatatcagtaaatagaacttgaaagtttttaattcagtttcttttctcttttctttcatagaagtataaataaacacagtatatctttggggcctattactatacccagctagcaggcctgcctagattgttccatatggttgttactttacagtaattgtcattatgatgtcactgtatgttttgaaagtacaatttcatgttttatacatttttaaaaattgattgaattttagcatggcttcttcctgataacagttttgtcctcttgctttgagaaggagcatatgggcattccacttatggtttccatgggctgcatctcagattcctgttcattctacgggtttcactgtagacagagtactttgtatttaatggccgggtgcggtggctcacacctgtaatcagcactttgggaggccgaggcaggtggatcacttgaggtcaggagttccagatcagcctggccaacatgatgaaatcccatctctactaaaaatccaaaaattaaccaggcatggtggcggttgcctgttatygcagctactcaggaagctgaggcaggagaatcacttgaacctgggaggtggaggttgcagtgagccgagattgcgccactgtactccarcctgggcgacagagcaagacctcatttcaagaaaaagagtactttggctggcgccaacagggtccaggtctgtgcctgccattggagaggatgccacagccacaggggtgggcgctggcctggaggcctccaaggggcatctcctgtgagcccaggggatgggcaggatctgagcggagaagagtgaaagtggaggagtgaggccagaacaaaggctttgccgtgaaagaggtggtttcccgcctaggctctgaccttcactcactgtgtggcccaggccaagggcaagcgtctgacctcgctgggcctttgtttctcaggggtaagatgaaacaatggctccctctccctctccctctccctctccccacggtctccctctccctctcttgccatggtctctctctgatgccgagccgaagctggactgtgctgctgccatctcggctcactgcaacctccctgcctgattctcctgcctcagcctgccgagtgcctgcgattgcgggcgcgcgccgccacgcctgactggtttttgtatttttatggtggagacggggtttcgctgtgttggccgggctggtctccagctgctaaccgcgagtgatccgccagcctcggcctcccgaggtgccgggatggcagacggagttgcgttcactcagtgctcaatggtgcccaggctggagtgcagtggcgtgatctcggctcgctacaacctccacctcccagccgcctgccttggccccccaaagtgccgagattgcagcctctgcccggccaccaccccttctgggaagtgaggagcgtctctgcctggccgcccatcgtctgggatgtgaggagcctctctgcctggctgcccagtctggaaagtgaggagcgtctctgcccggccgccatcccatctaggaagtgaggagcgtctctgcccggccgcccatcatctgagatgtggggagcgcctctgccctgccaccccgtctgggatgtgaggagcgtctctgcccggccgccccgtctgggaagtgaggagaccctctgcctggcaactgccctgagaagtgagaagctcctccgccgggcagccacaccgtctgagaagtgaggagcccctccgcccggcagccaccccgtctgggaagtgaggagcgtctccgcccggcagccaccccgtccgggaggtgaggagcccctccgcccggcagccgccccgtctgagaagtgaggagcccctctgccgggccagccgccccgtccgggaaggaggtgggggggtcagccccctgccctgccagccgccccgtccgggaggtgaggggcgcctctgcccggacacccctactgggaagtgaggagcccctctgcccggccagccaccccgaccgggagggaggtgggggggtcaggtcagccccccgcccggccagccgccccgtccgggaggtgaggggcgcctctgcctggccgcccctactgggaagtgaggagcccctctgcccggccaccaccccgtctgggaggtgtactcaacagctcattgagaacaggccatgatgacaatggcggttttgtggaatagaaagcggggaaaggtgaggaaaagattgagaaatcagatggttgccgtgtctgtgtagaaagaggtagacatgggagacttttcattttgttctgtactaagaaaaattcttctgcyttaggatcctgttgatctgtgaccttacccccaaccctgtgctctctgaaacatgtgctgtgtccactcagggttaaatggattaagggcggtgcaagatgtgctktgttaaacagatgcttgaaggcagcatgcttgttaagagtcatcgccactccctaatttcaagtacccagggacacaaacactgcggaaggccgcagggtcctctgcctaggaaaaccagagacctttgttcacttatctgctgaccttccctccactattgtcctatgaccctgccaaatctccctctgcgagaaacacccaagaatgatcaattaaaaaaaaaaaaaagaaaaagagtactttgtatttgtatttaagaaatcagatgtcagagattagcctttgtgggattattagtgtgttcctcacaccaacttaataagtttccctgaaatgaggtccattttctttgactttttcattggcatgagtaaaacttttttactaacacagagacagggaactctcacattgttcattcattctgcaaatatttattcagtgtccctaaagtatgtgctttatcctctaatctgcagcttttgaatgatagttaattaggtcttgaatagactagctcatcttatctgactttaagtgcatctgacctgtgccagcagattaatttataaatttataactgagggtattctgtttcagtgactataaaactcatttgtttgttagcatactcttgtctttgaatttctcaagtatcaagaaatcaaaagcaatcagatggttgtttagtacatatagaatcagcaaggaaattgcatgatctttaagagaaattccatccagattgtgataaatgctaaggaattactcatatttcacttcaaataatttttttttaattttttttttttttattgatcattcttgggtgtttctcgcagagggggatttggcagggtcataggacaatagtggagggaaggtcagcagataagcaagtgaacaaaggtctctggttttcctaggcagagggccctgcggccttccacagtgtttgtgtccctgggtacttgagattagggagtggtgatgactcttaacaagcatgctgccttcaagcatctgtttaacaaagcacatcttgcaccgcccttaatccatttaaccctgagtggacacagcacatgtttcagagagcacagggttgggggtaaggtcatagatcaacagcatcccaaggcagaagaatttttcttagtacagaacaaaatgaagtctcccatgtctacttctttctacacagacacaacaacaatccgatttctctatcccttccccacctttcccccttctctgttccacaaaaccgccatcgtcatcatggcccgttctcaatgagctgttgggtacacctcctagacggggtggtggccgggcagaggggctcatcacttcccaraaggggcggccgggcagaggcaccccccacctcccggacggggcggctggccgggcggaggcaccccccatctccctcccggatggggcggctggcygggcgggggctggcccccacctccctcctggatggggcagctggccgggcgggggctgaccccccacctccctcccggaccgagtggctgctgggcagagacgctcctcacttcccagacggggcggctgccgggtggaggggctcctcacttcccagacggggcggctgccgggcggaggggatcctcacttctcagacggggcggctgccgggcggaggggctcctcacttctcagacggggcggctgccgggcggaggggctcctcacctcccagacggggtcgcggccgggcagaggcgctcctcacatcccagacagggcggtggggccgaggcgctccccacatctcagacgatgggcggccggcagagacgctcctcacttcctagatgggatggcggccgggcagagacgctcctcacttcccagacggggtgtcggccaggcagaggctgcaatctcagcactttaggaggccaaggcaggcggctgggaggtggaggttgtagcgagccgagatcaagccactgcactccagcctgggcaacattgagcactgagtgaacaagactccgtctgcaatcccggcacctcgggaggccgaggctggcggatcactcgcggttaggagctggagaccagcccggccaacacagcgaaacccagtctccaccaaaaaaatacgaaaaccagtcaggcgtggtggcgcgcgcctgcaatagcaggcacttggcaggctgaggcaggagaatcaggcagggaggttgcagtgagccgagatggcagcagtacagtccagcttcggctcggcatcagagggagaccatggaaagagagggagagggagaccatggggagagggagagggggagggggagggggagggccaaatawttttttaagacggtaaaatattaatgcttgttaggttttttcctttgtgttaggtcaacaccagcacattcatgttttccagacaagtaatagagattaccacccattagtctgcacttactacattaaaacccatctttattttattttgttgtttttgttttgttttgtttttttgagagggagtctcactctgtcacccaggctgcagtgcagtggtgtgatctcggctcactgcaacctctgcttcccaggttcaagcaattctgctgcctcagcctcccaagtagctgggactacaggcatgagccaccatgcctggaaaattttttgtatttttagtagagatggggttttgccatgttggccaggctggtctcgaactcctgatctcaagtgatctgcctgctttggcctcccaaggtgttgggattacaggcgtgagccactgcgcccagccccatttttattttattgtgctttactcttttgtttttttgttacactttagcttggtagtttagtctccttcctggttatataaaggaagcctctttgattttagcagtaagctgtttctgattcgctttgtagggtacattacttctaagaaggtgtcccacctaaataatacgttcttttaaaaatttattatttttattttagattcgggggtacgtgtacaggtttggtttttattttttaatttttaaaaatttgctttcctggtaactcacaaaacagcaggtttattacacgggtatattgtgtgatgctggggtttgggcttctaatgatcccatggcctaagcagtgaacatagtacctataggtagtttctcaacctttgcccttctccctccctctcccttttgtgatctccagtgtttattattccttactttgtgtccttgtgtacccaatgtttagttcccatgtataagtgagaacatgtggtatttctgttttctgtgttaagttgcttaggctaatgacctccagctatattcatgttgctgcaaaggacatgatttcgttcttttttatggctatgtaaagaatatgttttaagatttcccacctagagaatatgttcttctgaaattaaccctaggttcttggaccatagatttctgaccactgatcacatctcagattttgagaactgactttttttggttaacttttttttttcttattaaaaaaaatttgttttggtatggaataaaaagacagccttatccagaaatagccatagttacaccttgatgtataatcttgtagacctttttaaatacatatatatgataattacatctatataattgaaattgaattgattatactacacatattttataatcttttttatcttaatagattgtatatatctttcaagatacatttgattggggcctgtattagtctgttttcacactactgataaagacatacctgagactgggaagaaaaagaggtttaattggatttaatagttccacatggctgagaaggcctcagaatcatggtgggaggctaaggcacttctaacatggcagcagccaaaccatgtcattctgcccctggcccctccaaatctcatgtcttcacatttcaaaaccagtcatgcattcccagcagtcccccaaagtcttaattcrtttaggcattaacccaaaagtctgaagtccaaagtctcatctgagataaggcaagtcccttctgcctgtgagcctgtaaaatcaaaagcaagctagttacttcctagatacaatggaggtacaggtatttcgtaaatacggccattccaaatgggagaaattggccagaacaaaggggttacaggtcccatgcatgtccaaaatccagcaggacagtcaaattttgaagctccaaaatcatctcctttgagtccaagtctcacatccaggtcatgctgatgcaaaaggtgggttcccgtggtcttgggcagctccacccctgtagctttgcggggtccaacctccctcccggctgctttcactggctggtgttgagtgtctgtggcttttccaggcgcattggtgcargctgtcagtggatctaccattctgggatctggaagatggtggcccacttctcacagatccgctaggcagttccccagtagggactctgtgtgggggctcccaccccacattttccttccgcaccgccctagcagaggttctccatgagggctccgcccctgcagcaaacttttgcctgggcatccgggtgtttccatacatcttctgaaatctaggcggaggttcccaaacctcagttcttgtcttcagtgcactcgcaggctcagcaccacatggacgctgccaaggctttgggcttgcactctctgaagccacaacccaagctctatgttggcccctttcagccatggctggagcaactgggacacagggcaccaagtccctaggctgcacacagcacggggaccctgggcccagcccacaaaaccactttttcctcttgggtctctgggcctgtgatgggaggggctgctgtgaaggtctctaacagggcctggagacattttgcctgtggtcttggggattaacattaggctccttgctacttatgcaaatttctgcagctggcttgaatttcccctcaaaaaatgggtttttcttttttgtcacataggctacaaattttccaaatttttatgctctgcttcccttataaaactggttaacagcacccaagttacctcctgaatgctttgctgcttagaagtttcttccaccagatattctgaatcatctctctcaagttcaaagttccacaaatctgtagggcaggggcaaaatgctgccagtctctttgttaaaacataacaagagtcttctttgctccagttcccaacaagtttcttatctccatctgagaccacctcagcctggaccttattgtccatatcacwattagcattttgggcaaagccattgaacaagtctctaggaagttccaaattttcccacattttcttgtcttcttctgagcccttcaaactgttccaacttctgcctgttccttagttccaaagtcaattccacatttttggtatctcttcagcaatgccccactcctggcaccaatttactatattagtccattttcacgctgctgataaagacatacccaagactgggaagaaaaagagctttaattggacttacagttccacatgrctggggaggcctcttaatcatggtgggaggtgaaaggcacttcttacatggcggcggcaagagaaatgaggaagaagcaaaagcagaaacccctgataaacccatcagatctcatgagacttactgtcatgagaatagcatgggaaagatcggcctccatgattcaattacctcccccagggtccctctcacagcatgtgggaattctgggagatacaattcaagctgagatttgggtggagacacagccaaaccatatcagagcccatctaggggaggtttcttaattaattttttcctgggctcaagtgatcttcccatctcagcttcctaagcatctaggaccacaggtgtgcagcactaggcccagctaatttttaaattttttttgtagagatggggtctccttatgttgtccaggctagtcttgtattcctgtcttggcctyccaatgtgctgggattacaggtgtgagccactctgcctggccccataagaggtctcttaatttattcagcagacattgtgtattactgtgtgccagatgttgggcatacagtagtcaataaatagtcaagaatgactgccctcgtggagcttaagtactaatggagaaagatagatgatcaaaataaatagaattttaagcagtagtaagtgctatggtggaagaaaagcagggatgggagatagggaatatggttgaagtgaagtttcaaaaagagcatagtcagcaaatgtcttattgagaaagtatctgaatagacaccaaggaagtgtagggatggacaaacaaggagagaccaatgtagggcagagaaggtgaggggaatggtaggagaagttgatgggagtgggaatggggaggtgggtattagattatatgaagcctagttggcaattataagagcttctgttccaatggagagttaggtgtcatttatatcttgaaatgattgctctaactgctgtgctgaaaatagaatggggggctgcgaggtgtgcgaggcaaagacacagcagagaaaccatttaagaggctattgcattaatataagctagagatgccagtggtttgggtgagagcagtgaaaaatggtttggtttcagatgcagtttggcaatattcatgataggagttactgacagattggatgtggggtgtaacagaaagaagagttatgacaccaaggtttttggcctgaaaacaagaagaatggagccaccatccactgacatggggaacattaggaggagtaagtttggaggaaaatatttaagagttcattcagtttgggacataataagtttgaggtgcttattatacaagtggaaatgttgaataggcagaggtcttggctggagataatatttggaagttgtggcctatatatgatatttaaaattataaagctggataaagtggtcaaagaagtcaagataggaaatagcagagctcagagaattgaggcctgggccctcgatggttagaagtttggaagataaggaagaayaagcaaaggagactgagaagaaacagccagggaagtacaaggaaaacctagagaggctacagctctggaaactatgtgaagactcttacctggttttagcatgtgacttcccttccagacccagtgggttgatttttctcgtctgtgagtttctaaaattaaatgtatacactatcttccttccctccacatcttccccagacatttagctttaacaagaaaagatttttttttaataaacaaaattcattgtaaatactctgtcaactattgttctccgagcaacagctcttatgcattggggccaccctcagcagtctctgttactgctacaraaacatgggactaacatctgacttccagagagtaagtagccaagaaagagaaatcatcagctgatcagctgctggtgagttgtccctcgtaattccaagcattcatataggattgacttttacagcttcaagaactaggctatctctcaaacttgattattaccatttacttattggtcagtgtaagcataagataatttgcccttcttgtcactgacaaataggtgggtatatattagttacctattgctgtgtaacactttaccccagaatttaacagcttatgacaatatttattatctcaatatttttgagggtcaggaatttgggagcaatttagctagatggttctggtgaagggcttcatgaggttataatcaacatgtcagctgtggctacagtcaaccgaacacttaactggacctggaacatccacttccaagatggctcactcacatgactgttggcaggaggccttagttcctcaccatctgggcctctccatagggctccttgaatgtccatattacttggcagctagcttctcttggagttagtgatccaagagaatgatagaggaagcaggaaaaaaacccataatatctttttatatcctaattttggaagtcacacactgtcattcctgctacattttgtctgtaagaggtgaatcactaaatctagcctacattcaaggagaagagaattagctccacctctagagaatttatggatgtattttaaaatcaccacagtttgccctctagccacaaattatttacacttcttctatgtgcaaaatgcactcacttcctcccraaatctatcaaaaaagtctccttcttctatagcatcagcttgaaatataggtagctgtccttttaactaggtccaagtgtgggtgtggctccttgggtatagttcctcaggtatagttccttttgttgtgaagacctgtaaactaaagagacaggttaactacctatcacacacccaacatacagtgatatggacaggcagtgattctgaacaggtatagagatttcctgttccaaaagggaaaatgatggcacaaagaagttgctggttcacagcaattctgatagttgtctagacaaatgtcagaagttccttgactaggacttctacttctgcccaggagttcttctctgtgactctggaatccaccctgttagtcatcctttcttttccattaaaagtagttcatatttgtagctgcatagctttcttagcttgcttcttgccagtagaaatttcagggcccagagaccggttttcattttgtactatttttccacctttcagtttaagctggcagtgtttctttttaaaacttcgagtatcctgtgaatctcactgggattcatgccattaggcaaaagccacatccaccaatctcttctaaataggctttttccaccttgggtttctgctgggattgctgagagataccacttgtaatgggtagaattgtgtcccccaaaaagctgtgttcaagtcctaaccctgataaggtcaccgtgaatatgaccttatttggaaatagggtcattacagatgtagtcaagttatagtaagatcacactggatcaggaagggccctaatccaacggttgatagtcttataaggagagaaatttggctgggtgcggtggcttactcctgtaatctcagcactttgggaggccaaggtgggaggatcacctgaggtcagaagttcgagaccagcctggccaatgtggtaaaaccccgtgtctactaaaaatacaaaaattagccaggcgtggtggcccatgcctgtaatcccagctactcaggaggccgaggcgtgagaattgcttaaacctggaggcagaggttgcagtgagctgagatcgcaccactgcactctggcctgggcgagagtgagactctgcctcaaaaaaaaaaaaaaaaaaaaaaaaagaagctagaaatttggacatgaacacatgaacacagaagacagaagaaagccatgtgatgacagaggcagaggttgtggggggcatacatctacaaatcaaggaatggcaaagattgctgtcaaacatcaccagaagccagagagaatcatggaattgatctccctcagaacttcctgaaggaactaaccctactgacacccacatcagtgaacgaataaattccttttgttttaagctacccagtttgtggtagtttgttatagcagccctaggaaactaacataacacccttaagcttcttagtccgattttctaattgaatgattctttaggtaccattctagatctttgtgaggttgtgttttttttgttttttttttgagacagtctcactctgtcacccaggctggagtgcagtggtgcaatctcggctcagtgcaacgtccgtgtcctgggttcaagtgattctcatgtttcagcctcccgagcagctggcattacaggtgtgtgccaccatgcccggctaatttttgtatttttagtagagacaggtttctccatgttggccaggctggtctcaaattcctggcctcaagtgatcctcctgccttgacctcccaaagtgctgggattataggcgtgagctaccgtgcctggccctttctgaggtcttaacaaagaagtgttatagtctgatccttggcttcatctgaaatcagtcttttggcagtgccttggattcgatctttgcttgaaatctcttaattttagtgtcatttactaatctggagatgctgggaattctcagaattatataattctgtcctttttgtttaactgttcttcctttaattcatccctcttttgcattttaaagtaagcagcaagaagccaggaggtactttcaaaagtgaaatcactttagctagattatcaaccagtttttggaccacaacatctactttccatgttatggtaaggccacagctttgccattatataacaaggatccttttccctccagtttctaatcagattttttctgccttttcttaatctctcacctttaacttcctcaaaggccatagtgcttctgtttttttttaaggctcttcaaacttcactgatgctctcctcaaagtccttttaacttctgccccactgctgggttccaaagatactctcaagttttgggtctttattgtggcggcaccggtatccagatatcgaaatctgtatattatctattgccatataacaaattatctcagagcttagtggcttaaaacaacaaatatttattatctcacagattcactgggtcaggaacaggttcagttgggagtagcatggctgagtggttctggcccaggatttcatgagcttatagtcaagatgttggccattgctgcagtataggattgactaggctttacacatattctggcaggtttgttctggctgttggcagtactcagttcctcatcacatggacctttctataggactgcttgatatggcactctcccagagcaagtgattgatccgacagaagtacaaggagaaagcactgccccccgccccccacctttttttttttgaggcaaagtctctgtcacccaggctggagtgtaatggcacaatcttggctcactgcaacctcctcctcctgggttcaagtgattctcctgccttatcctcctgagtagctgagactataggcacgtgccactaatgcctggttaatttttgtatttttagtagagatggggtcatgttggccaggctggtctcgaactcctgacctcaagtgatccacccacctcagcctcccaaagttctgggattataggcaagagccaccacacccggccatttcccccacttttttttaccttgtcttggaagtcacagattatcaattctgccatattctattgttaagtgagtcactaagtccagcccacactgaagggaagattatcaaataatttttggacatatttttaaaacaacacgaagcattctaaaaaaaagaaaacacaatgaattcatagaagcagagaatagaatggtagttactaggagctgtggggcagagggggtggattagagagatgttgaaggatacaaaattttagttaaaagttcaagagatctgttgtacaacgtgggtgacagtagttaataacaatgttttcagccaggtggggtggctcatgcctataatcccagcactttgggaggccaaggcgggcggattacttgacagcccggccaacatggtgaaaccccatctctactaaaaatacaaaaattagccaggcgtggtggtgtgcatctgtaatcccagctacttgggaggctgaagcacaagaattgcttgaacctgggatatggaggttgcagtgagctgagatggtgcctctgcactccatcctaggtgacagagcaagacttcatctcaaaaaaagaaaaaaaaaaacaaccagtgttttgtacatctgaaaattgctgagagagtagattttaagggttattgttgcaaataagtttgtgaggtaatgcatatgttgatagtttgatgtagtcattccacaatgcawacatatttcaaaatatgttatataccataatatatgcaatttttgtcagttaaaaataaataatgaaaaataatacaaaaaagcaagcaaacaaacggaatagtgtagttagctgctgttgaactttagtagcagggaaagtctaatgttggctattgccattgttatattaattggcctaataagtaaagtgggaaccagggacttaaaattgcatatcattgctgggcgtggtggctcacacctgtaatcccagcactttgggaggctgaggtcaggaggtcaagatcagctttgtcaacatggtgaaaccccatctctactaaatctactaagtatacaaaaaattagccgggtgtggtggcaggtgcctataatcccagctactcgggaggctaaggcaggagaattgcctgaacctgggaggcagaggttgcagtgagccgagatcgctccactgcactccagcctgggcggcagagcgagactctgtctcaaaaaagaaaaaaaattgcatatcatccagaacacagaagatccagtgaaacaatttcttcaggtttttcttttgctgaggcatcactccagtatctctttgggtaacaaagactcattcgtgtaaagaactgtgtacctgtgccaycttaagtattcagagtgacaaatgctaagcatgtgtgtgtttatatgtgtttgtgttataatcatctgaaacaaccttaacatagaattattgcttaaacttttttttaaaggactctttaaatgatatcttattcagaaacccaatgtgtacaacatacaaaaatggaactacccttgttaaagggaggtgggtccagagttccactggctcggcatcccttttaacccttccttatgttgatgtcagatattcagggaacatagtttgaaaaactataccataccatcagatccctttccagcttaattcacaaaaatctattaatctgtaagatagcagagctcaggaagatagccataatagcaaaatagcacaccgctgtgtggcaggctgatttctgatgctgtctcttgtgtactagccaatgaaaagccattttggtttagggaattagttggtgattaggcagccatggatatctgtagagtacttttcattagtctgttgtcttatctaattttttcttctgtaacagaatactacaacacatctttgcaggattctttgcaaattctgccattcctggatctccacaccctttttcctggtaagtaactaattgttttctatcttactctattggagtgacatattttaggtgctgtcatttctgtgcagtagagaaaaagagctgcataggccgggtgcggtggctcatgcctctaatcccagcactttgggaggccgaggctggcggatcacgaggtcaggagatcgaggccatcctggctaacatggtgaaaccccgtctctactaaaaatataaaaaattagccaggcgtggtggcatgcttctgtagtcccagctactcggaggctgaggcaggagaatcacttgaacccgggaggtggaggttgcagtgagccgagatcgcgccactgtactccagcttgggcgacagaaagagaccctgtctcaaaaaaaaaaaaaaaaaaaagagctgcataggtgagtatgtagatgtaactggaggctgctacactgccattatctgctaagcccaaacttaatcagaacttttttttttattattattcaggctcaggaaggccgtcctggtcccccaggatgtttgggtgctagaaatgtcttgattccttttatattcaggtctgagagttgtattgaggtagagaatgagatggtccctgccaggcttggtatctgatttgtgggtttccccagtagactacacaggaatattttactccttaagaatttctgaaattgaaaacattatgctgaacttcatttttttcaaagtaagaggatttgtcagaagaaacaataggctgtaattcagtatcagagtgacacttatgtatgatgggattaaagatggaatttcttcttgtctgagaaattatttgctgcttctaactgtggcccagaaggtttctttgctcaaaggaacctcagtccttttaggacctctgtcatccagtagtctggacctctgctggtagtgtaccagcagctctgagggaaaataaaaaaaaacggtgttgccaagtcccttttataattgctctaagttgtgattcagagagactgctatggctgcttctctacttgaaagctcctcattgtccagaactgtgggcggcctcttataatgagggatgtttgctgtagattttgaccagtcatgaagggaaaactctccttaaaaagcagctccatctgtgtttaatatcagtgggcacagaaaacacaaatttttgaaaccaacaggcaatgagtcactctttttgttctggcgtgtcatgtgstactttaggtagcttcacattttatgttctagttaagtaaaattcttagagaatgaggtactatctctggatagtctgtttgatcttgaaaatgtacagaattctttgcctcttgatcctggaggactagtgactttccagctctgagagagaacaggatccctctgccaatttttttctgtggtgtaaggcagagcctggtcactccatctaatgctgtctatctcatctcacgtataggagcgggatgctgcactccaaccctggggactatgcctggggtcagacagggcttgatgccattgtaacccaggtgaggagctgccttttgagggtgtctgttcagtgtgtctcatggttccacaggcttcctgctttccttctgctactttctgaaatggcagtcactctgctttctctaatattttgagctttggggtttccattttactaaagggatgaatgatttatggggttagctcagcatccatgcacttcctaggtctgagggaatttctagaagatggtttcacctccataggaagaaaagacttctataacaaatagtattttgtatttttgtctctcttgctcagttctataaggattctattaacaaatatttcacaaaaaaaggagggtttcctcacatgttgaagcagggatttctgctagatggagcaaagtaggggaaggaagcagagaaaaaagtattcccatgccatgtataattgcttccacttgtttatgttcattttaatttgattggtttttcatttccgttgtggatttctgagactagaaagcatgtcctttatattcagtcgtcttataggcagtaatttacctatttcttggctcacgttatgctacttttcatactctcgcttttttcttcttccagaagatgaagcttttggaccagttacattttactttttattaagctatagttttactcgtgacaccacaacccttttgctgcctctgaagttgctttatgcctagaggtgggccttgcaatcatgggtttgtctgtaggcttatacgaacgtcactctgaaattgtaaagcaattatgagtgttctggcagcaggaaaggggaaacccaagcctctcagagccttgcagaagtaagagtaactaacatacctaatgtctgcactgtttgttctcagctggagcagttccctctccagggatattgcgatgtctgccacttcgtctttttctttctctttttttgtagcttttaggacaactggaaaacacaggccctcccccagctgacaaggaaaagatcacatctcttccaacagtgacagtaactcaggaacaagttggtaggttcatttttatacttattctgtcatcttctgatctcggttcaaaatcccggtatcttctgacaggtgaaaagtttaaaaagtgaacaaaataaaaagacaaaaaaataagaaaaaaaatcccaataccttcctatattaaggacctttaagtgaagctatagccctctaaaattcctatctgggtgccaaatctggaaagttcctacccctttattaggttagtcagttggtatttcctgagcaattatgtctcttttttaggtgccattgggaataaagaggtacaaagatagataagaattgattgtaacaagttgaagaaaaactgatcaaatgattaaaaactgtgttggacacatgatactgacattggggaaaggagaagaaaaaaataggctgggagtttgtttcaaatctactttgtgtcaggtacagttaggtatcttagtcatagatactattttatttgtaagcactggaggaatttagtgacaagggacagcattttggtctgggagtttctgttcccatcagttcgggtttagagttagagattttaaagacaaggtgggcyatcttaggtcattctatttaaggaaaagtatgaactaatatacgtggtgtgtgagtcaggtaaagtggtctttagggaagattagtctaggggcagtgtgtgaaacattggaagtgagagagagcagaaacagggattttagagtgttgcagcagtccagatgaggttcagttgatggtgacaatgctaacagaaaggaaaggattcagaagatcattttggagaaatgctttcctcactcattgcataatgggatgaagaaggggaaagagtcaaagagaattctgagatttcacagctttgtaactataaacatggtgctgccatcttaagggacagggaaatagtgaatggaccctggtttgggtaaggagatgaggtgatgttttacattttttaatttgttgatttttgaggtgccagctgagaatccaagtgaagaggagctggggattgctgtggagctggtttgagggaaaactaagttgtagcaaagtataggatatatttggagggttaagaccgtggaatttgggatactagctgggaggctgttgcagcagactaggcatgagaagtaaaagaattagggctaaggtgataggaatggagagtaaggagtgaatctattaagtagtagtactgctccaaatgccttatctgctgttagttcatggagcatatcccagccactaggcgtatagactagctgacagtattagccaaatttgggaaactcaaaacttgctgcttggagctcccagtatagttcatgactgtttcttctcagagaagagggctttctgtctcttgatttsgtgacctgagctagacttcgactttgcagttctgcagcaccacttctggtatagcttttctggtatggcttctggtattttcttcttttctggtatagcttttattaataatttttttttttttttgagacagagtcttgctctgtcatccaggctggagtgcagtggcgcaatcttggctctctgcaacctccgcctcccgggttcaagcaattctctgcctcagcctcctgagtaggtgggtttacaggcgctcaccatcacacccagctaatctttgtatttttagtagagacagggtttttaccatcttggccaggctggtcttgaactcctgacctcgtgatccacccgccttcamcctcattaacagtttttacagaggactttaggacagccacactgaaataggatgcttcatcccatgctgaaaagagcatggtgaaagtggcaagtggcttgagacgctgcactgataagattgctgagatgaatcccttggctatggtggacagattcacagtagcaactgactgccagagggctgtcacacattgggaagatgtttttcctgttttactgagcagatcatctaagccccagtttatttcttccaactctttacatcaaaaaataggccttatatagttcctatataggcctttttggagtaggccccattcatcattccttcttttcatgtctctgtctactaccacctttaccctcattttgaaatacaagtcatgcctcttagctgcctgctacttgggtgtacattttcttttgtctcttgtgtcttttctttatgcattcgtagggttggtagagacattgggttagttttttcttctttccttttgcctgtttactttaaaaggcatttccttcttcaacagatatgggtttagagtgtccagtatgcaaagaagattacacagttgaagaggaagtccggcagttaccttgcaatcacttctttcacagcagttgtattgtgccgtggctagaactggtgagtacagcaagtcatggcttctttgggggatgattcagagtaaaggtatagttaacagttcctcgagatccaagtagatcagattttatcccataaatccctggcttactctgatactgttatttgtttggaacttttctgaccaagggttgcaaactatgttctacaggtcattgtgtcctgccacctgttattgtaaataaaattttattggaacacagctatgttcatttggttatagattgtggctacttttgtgctacgtcagcagagttgattagttgtaacagctgtggtgtggcctgcaaagcctaaaatacttattttctgtcccttatgtatttgttttgagacagagtctcactctgtcacccagactggagtgcagtggcgtgatctcagctcactgaaacctctacctcctggtttcaagtrattsttgtgtctcagtctccagagtagctaggattacaggcgtgcaccaccatgcccagccaatttttgtgtttttagtagagacagggtttcgccatgctgatctcaaactcctgacctcaggtgatccacctgcctcggcctcccaaagtattgggatcacaggtgtgagccactgcactcggccaattttcctgtccctttaaacaaaaagtttgctgacctctgctctagaccatattgggaagtaatgggcagttaccctcctgtcatagatcactcactgtttctggttcgttctgtttggtggtatgtattagctgttattaacttgctggcctagaattattcctgtcagttctgcttaaagttctgtttgggagatatcctggtatcacaccttagagccagtgcatgctctatgaggatgcattctctattgtttttctgttccatgtcataatttttgatgtgacaattctcagggttatttaagtgtacaatactcccagcttctcaggccaggatcttcacatagactaatatttttctgtttcagcatgacacatgtcctgtatgtaggaagagcttaaatggtgaggactctactcggcaaagccagagcactgaggcctctgcaagcaacagatttagcaatgacagtcagctacatgaccgatggactttctgaagctaaagaccacacctgaatcagggctgtggtaatcatcttaccatagctgtaaattgtatcaaaacaaaaaattagtagatggatttaggaatatgtaagaaactcaacacataatataaatgcaatgaatgtttttcttctttaaatttaaagttagtatctacagatggaattgtatctacaaccaaatgcctcttatccctgaattcagagtgataattttataagtgtgaaacttaattatgtagggctccccccgtctgaatagaattaattccttaaagtctagttagggtcctgctgtctgtcatgttgccttgtaacggatgtttccacctccttctccaacctctaccccaccattagtgtattttactataaaaacagtggaaccacagccctaaagtcctgctgatataaagtccttttgtcttaattgtatttaaaaaaaaaaaaaactactcttgatcacattagctatgaggcgaggtcaaattcaggtatctaagactaatgattttgttttgtcttgatccccagagagcaaatcaaagaaaaattacagcaagaagagaaaagtggtttatcattgtgtgctttggttttcttattttaattttttttgttttttttttttgagatggagtctcgctctgtcgcctaggctggagtgcagtggcacgatcttggctcattgcaaactctgcctcctgagttcaagcgattctcctacctcagcctccggagtagctgggaccacaggcatttgttaccatgcccagctaattttttgtatatttagtagagatggggtttcaccgtgttagccaggatggtctcaatctcctgaccttgtgctccgcctgcctcagcctcccaaagtgctgggattacaggcgtgagccactgcgcctggcctcttattttaatttttaaagactacttcagttgatgcagtttcccaagaaacctacataacatatattgggagccttatgttgataggaatctgattcccattcctttttgggaatgagttgggcagcatacaggcacagaaagacagatgtttgagacctttgcttctgagattttaaaaaatgattaccgctgggcgcggtggctcacgcctgtaatcccagcactttgggaggccgaggcaggcggatcacaaggtcaagagatcaagaccagcctggccaacaaggtaaaaccttgtctctactaaaaatataaaattagctgggcctggtggtgcatgcctgtaatcccagctactcatgaggctgaggtgggagaatcgcttgaacccaggaggtggaggttgcggtgagccggatcataccaatgcactccagtctgggcaacaagagcgaaactccactcaaaaaaaaaaaaaaaatccccaactcactgctttttttgtttgtttctgtcgcctaggctggagtgcagtggcacgatctcagctcaccacagcctcgacctcccaggctcaagtgatcctcccacctcagcctaccaagtggctgggactacaggcgtgtgccaccatgcctgggtaatttttgtatttttgtagagatagggttttgccgtgttgcccaggctggtctcaaactcctgggctcaagtgatctgcctgcctcaacctctcaaagtgctcaactcattgtttactgtcttttttcctagtaatcttaaaataatttgcctcacagaaatagagacagtaagtgtctgcagccagttcactgtttttggtaattcattggtcttcaggagttaagattttacattgtcacattttaatttttaagcctatttttcatctctgaaactttccttttctccttggttctggctatacttggactcaaactgatcagtgtgatcatgtccaaaacagcttggcctggaagaggtaggccttattttttcagcctagtagtgtcccatgcacatgctctttgtagcattcaagtgtttaacattggataaattaagaaggtcaagaatgttgttgaaacttcaaggtctcaaaaggaaatgatggggacatagaacaactgttggtgtaccaaaaaaaggtacagaggggcaccatttgtattgtcacacaacaatgatcagaatgatcagtttagaatgatcagaacaaaaacaccactctttaatgggtctttttcttggctagaagtctttcctcagtttttgttgactatcatacgctgatttgtgggtgacggaagggggctagagataacgtttctctgtactttggtaaaggatgaaggagtcagagagggaacagaaaaagtgagagagtggcctgctgaaataatagcctgcctctaaaagttgtgaccagaaagtatgattcatttgggcccagagggaataaaatatgttttttcatatacctcccatattacacctctgtagtgattgtttatttggggaatgagatctacttactgtgcgttgcccctgaaatgtagcttgagaatacacactggttttgaattggggaggaggatggaaggaaattagaggtgtattatgaatatttggccactacttagatggaggaaggctatgttgaacttgggacacattgcagttttcaagtacacaatatcagttgtctcagaaaaatcatgacagcctggacatatttgcttgtcagtgtctggagatgccaggacaggcagttgtagttttacgtacagatagagaaccaatgcctagagaactagaaaggatctgagtagctttaaaaagggtggaaacaaagtactggataggggtctgcctttttatacacagtatagcaaacagcatcagacaaagttacatgaagttttcttcactttttttgctctgatggatagaggatgtgagactcattttactgtttcccagacctgtcccacttaatggatctgttgtgtttcttcttataatggcaggcacctcagatgtccaggttaatttatgttgaggagttaggattcttcagggatttattattattattattatttatttatttatttatttatttattttttttttgagatggaggcttgctctgtcgcctaggctggagtgcagtggcgcaatctcagctcactgcaacctccacctcctgggttccagcgattcttctgccttagcctcccaagcagctgggattacaggcacctgccaccatgcccagctaattttttatatgtttagtagagacaaggttttaccttgttggccaggctggtcttgaactctagacctcaggtgatctgccagtcgtggcctcccaaagtgctgggattacagacgggagccaccatgcccagcctgagatttattataaggaattggttcacacaataatggagtttgagaaatcccaagatctgcagtgggccagctagagatccaggagagctgatggtgtagttccagtctgaaggccagcttggataccctagaagagctgatgtttctgttccagttcagaggcaggaaaagactgaggtcttagttcaagcagtcaggcaggaggacttctcccttacttgttctattcagaccttcaactgattggatgagggccacttacattagggagggccatgtgctgtattcagtctactgactgaaatgttagtctcttccaaaaacaccctcacagacacacccagaatactgtatgaccaaatatctgggcatcatgtggcctagtcaagttgacacataagattaaccatcacaatgaggaaaaacagaaatgatacatgtatacagagtgctcctcatcccaattaagtttcaccaagttaataatgtgtctctatgagaagtggttcaccatgttggtcaggctgttttcaaactcctgacctcaggtgaccacccgcctcggcctcccaaagtgctgggattacaggtgtgagctagcactcccagccgacaggtgcttcttaaatgttttctttgagcaggaattggtccaggaattggttctcaagttagaaggaaaatttgaggggaagaacttgttttttctccaatcagtctctgattaaatagttattaggaaaaactccttgcttatgtctttgtattgcacatttttatatatgtatatatgtgtaaatagagatatttatatattcacagacaaacacgtgtatgcacatttcacaatggaggaagaagggatatggtgtgcactgaggtaaagtgagcagggatacagaagagagctggagcctcacagtctgattctctcattgtacataacctttagggtctttgtttccctgagttctctggtatggggcactgttggcttgggctggtaccctgttattctctgtgatgaagggattcactggaggtaaaaacgtaatcatttccaaaggttgagaataaatgactttgaggaaagggtgttcattatccgttgcttctatattataatcagttgaactacaatacggttatctattgattttttttaatttttctgacaaattattgacaccaaattgaataattcatgacctgcatgcttcagcttctttctccctggtttccaggtgctattccctcaagaaatgcaaattaaatatgtcggtcttaataaatcaggagggaagcatagtctgtgtctgttttaaatgacaacaacaacaaaacagctttggggtttaagaagtggaagacacatttttatttttttgagacacaatctcactctttcgcccaggctggagtgcagtggcgtgatctcaggtcactgcaacctcccgctcctgggttcaagcgattctcttgcctcagcctcccaagtagctgggattacaggcacgtgccaccatgcccagctaatttttgtatttttagtagagatggggttttgccatgttgcccaggctggtctcgaactcctgatgtcaagtgatcaccgacctcagcatcccaaagtgctgggattacaggcattagccaccacgcccaggtgagaagacagattttaagagaaggagcagggctggtatctgaataggtatttggatgttaggggaaaaccctttttggcctctgtggtagagcgatcggaaggtaaaagtgctgtttacaagaataatccattggagatctggggattggggacgacttataggatagagtcctcttgttgagaatttcccgaatgaatctcatgtaggttctgtcacagtaagatggaggaaaactttgatggggtaagtatcacaagtggctgtcctatagggggaaatcctagcctgcagtaatgtcagtgtctcagtattcagccagcgagccactgagctgctccaggggtttaaaatagaatgcatagaatacaatgtatacagctggtgatgctttccaggatcaaaatagagcccttgtctgatcccattgacattgtaaggtttcgatctctcatacctgccacagacaagtacattgtaggcattcaacttttaaggttttatacatgcaaactttatgttttcctgccacactacacttggtgtccacagaagtgtagtttgtatgttgcctcttcttcctctttcaaccagaacacttagatctgtgatcataggatgtaagcctgtgattctttactttttctaataagaaatacaattttcaagatccaaaaattattagattcttggctgggcattgtggctcatgcctgtaatctcagcattttggaaggctgaggcaggcagatcacttgaggtcaggagtttgagaccagcctgggcagcacaataaaacaccatgtctactaaaaatacaaaaattagccaggtgtggtggcatgcacctgtagtcccagctacttgggaggctgaggagggagaatcgtttgaaccaaggaggcagaggttgtagtgagccaagattgtgccactgcactccagggcaacagagagagaccctgtctcaaaacaaaaacccccaaattattagattcccttccaacaacttgatagccatattattagtatttttgattaaagaatacataacaaaaagctgctatgatttcagtaatgcttttaagttaatttattagtcacaccagaatctacatccaattgaaatatatacaaatatttgaaagatatttattcaggctgaagattatggtatatagattccttctgataacctcatggcctcacaggttcaaaacccgtgtttgtgaatcactcatacagattggggctaagatgcgtgtccagaaaaccacctattatgcatgaaaatttgtaggcttatttgaaggcaattgtatcaacacattttgaaagccaagacacaagtattttaagtttctgtttaaccaagtctcgagataagcagagtaaataaactctttagaagcaagactcagttggtatgtacaaagtgggattgctttgtatatattccgcttagtttgagtcagagctagtaatctgatgctcttaaatgtcttcataaacttgggcagtgatgtttcctttctgtgattatgtgtcacagatttttatatgtggactataattagtatagtacaatggctgaaact

SEQ ID NO: 96264 - DNA, 14528 bp, Homo sapiens
gcgggatgtggattgttccatggaggggtgggagacgccgccgggtggtcgagggagcgagcacatggtggcctgaggcgttcccctcccccagtctgcttcgcttctaagtgttgtgcaatctccccctttgctagctcggcttgggctcattgtgcgcgaggccgccaccgcccgcggcctcccacatccgggcaacgcgaggggggggcttcggctggagggagtgggggagggcgcgggcgggatgacgtggggggaaggggatgtcctaccctccgatctgggaggtgaagggcgggacttccagcgcgctggtgctgcggtgggaggtgcacgcgcttgggctttaagcggctgggtcgggcccacgtggacccggcggcaagcaccacctctgggcaccgtgagcgcggcggcacgcctgccggcctgtcttcagaaagggtcacccccttatgtcgggggtggcctggcctgagccgctgcctgcatggggcaaatgcctcagttttatagaaactcctcctttgggtattttttgggagctggtgggagttggatctgggacagcaggttgatggcatcatgcaggccactcctgacagagcccggctgtcaggatttctgagtgcttcggtcgggcaggggacaaaacttatgctttaaaccaacagatccagagacaatggccccgatgggatggagcccgaaggcgtcatcgaggtgagactggagaaatggaattctgtcctcccccattacaactttcagccgtatagagttagagtggcctcttgattgatttcccagatcatctagaagcagctggtttccctaaagggaggagggttgtaagctctgaggcttttgttagtaggcaccagattctgtttgctcggagactacagctcagctccaccttttccatgactcaagctttaatttctttgcatcccctagagtaactggaatgagattgttgacagctttgatgacatgaacctctcggagtcccttctccgtggcatctacgcctatggttttgagaagccctctgccatccagcagcgagccattctaccttgtatcaagggtgagacctctcagtcccagaagacattgtggactgtccctgacctgggtagagtggcatctggttggtgatgcccatctcatatcagccagggacaaagcaactccttgttcatcccagcttggcttttgatccgtgcccatgcctggttcatgccttggacacataggtttcctttaaagaggtggtattgtagccagcttatatttgcatctacagccatgtttctagtccagcttggtgtgcaatactagatgagttaataactggtccttgtttctgatctggttcccattgtgtaactgtgttgattgggaaggtagtttgtgagccatgaaatgcttggttcattggttgcttattgacctcattaacctaggacttgaatatcccaaagggtatgctctttaccacattcaactcctaatttatttgtttaggttatgatgtgattgctcaagcccaatctgggactgggaaaacggccacatttgccatatcgattctgcagcagattgaattagatctaaaagccacccaggccttggtcctagcacccactcgagaattggctcagcaggtaagagtggcttctattccctccttcagggctgatttagggatgatgagtataatccaaggaccagagaagtcttctctgatcaccaccttgggaggaagacatgggtgccctaacactctcgagacctgctgggttaattaaaagctatttcttacccaaacgtaaccattgcttcctccacccatttcctgagtcaaatgggaaagctgttgggtgaagcctggctggctgggcaagtttgactgtgttctgaataagcaccttcactatgggctaagagatcccttggtgtgggggtgatcttacagtagtcagagcagatggacagtccttttcacccttgcttaatagccagagctgtttcatgcctggggcacacacaattctaatgctggactttttcctgggtcatgctgcaacactgatgtcagagcatgtttttaaatgttctgtggcaggggcagtgattattctgggtgtggataatgtaagaagttacagcagagctccattctaaggcacttggctctcagttttctcagagtgaacatgcctcgtagcttgggtcctatggcaggagtgcaataggacatggatatgcatcacctgttctataaaactggttgctggctgggcgcggtggctcaactcgtataatcccaacactttgggaggccaaggcaggcagatctcttgagatcaggagttggagaccagcctggccaacatagtgaaaccccgcttctactaaaaatacaaaaattagccaggcatggtggcgtgtgccttttatcccagctactcgggaagctcaggcaggagaatttaacccaggaggtggaggttgcagtgagctgagattgtgccattgcactccagcctgggcaacgagcaaagctctgtctcaaaaaaagaaaaaaaaaatggttgctgcgtgatgaggcagttggtcaaattagttttcagaaggttaagggttctaaatatctagagtaaagaaactgaattaattatctgagcggcctcattgtgaatcactgtacactcaggaaccagactgagttgaaatcctgtctttgccacctattgacagcacgatcttaagtggattttagcctctgcctgtttctcagctgaatgtgagtttaataatagtgcatgccccaaagttgttggttaggaatcaatacatgaaaaacatttaagaatggtgccgggcacagtggtaactgacatatgagcacctgcctctctctgctcagatacagaaggtggtcatggcactaggagactacatgggcgcctcctgtcacgcctgtatcgggggcaccaacgtgcgtgctgaggtgcagaaactgcagatggaagctccccacatcatcgtgggtacccctggccgtgtgtttgatatgcttaaccggagatacctgtgtgagtaattcggttctccaatcccctgggtcactttgctcttgtgcacgctttccagtctttcagcgtaagccagagtcattcccaaggatgctggtttctctctgggggaagagctgctctgtgatggagcccatgcgtgtcatctgagcctctggcttccctgccagtgcagccctggcagtgtcctacttcccagggctgttgtctgcctggcgggaaggtcctgggcaaaggatcagtctttgtactctgagagcagactacttggctcctctctgttttttatcagcgaagttggatatatctctcccacatttccctaatcatatgctatatattggctttttttttcttctctagcccccaaatacatcaagatgtttgtactggatgaagctgacgaaatgttaagccgtggattcaaggaccagatctatgacatattccaaaagctcaacagcaacacccaggtgagggcagtcttgcttgaatagctaatgattcttgaaaaatagtaagtgccaggggaaccatatactggattcttgagcctttttatgcatctgcttcagttttaggtgtggctagggaagggagcaggcctcaggaaggaaccagcactctaagactggcctttttttccactaggtagttttgctgtcagccacaatgccttctgatgtgcttgaggtgaccaagaagttcatgagggaccccattcggattcttgtcaagaaggaagagttgaccctggagggtatccgccagttctacatcaacgtggaacgagaggtggggcccagtgcaggaggcgggcctggtagtgagttgttgggtatagcccctgactgatttttgtcccccaacctccaggagtggaagctggacacactatgtgacttgtatgaaaccctgaccatcacccaggcagtcatcttcatcaacacccggaggaaggtggactggctcaccgagaagatgcatgctcgagatttcactgtatccgccatggtgtgtttgcccgctgccagcctgttgtgggtctgcccgtcagaagtgtcctacttgaagccagggttcctggaacccaggtgcctacctggtctgctgcatatttgttttctcttccagcatggagatatggaccaaaaggaacgagacgtgattatgagggagtttcgttctggctctagcagagttttgattaccactgacctgctggtgagtagagggaactgatagcaaaggcagaagggaggatccaaggtgattccctctccaaggggacatcagtgcctctcaggaaagtagcagcttggaatagaatctggcatgcctaaggcctttggggaactgggatgcttatttcctctgccttccttggctgcccacatggatgcctaagtgtcttccctccgggatagagtgtcctccgtgcacatgctgaagagttgtctttcttgacgtaggccagaggcattgatgtgcagcaggtttctttagtcatcaactatgaccttcccaccaacagggaaaactatatccacaggtaagcgtagatctggaacactcccctaccccttcacacctggccctccctgggcttaaagctcctgatattcctcatccccttccttgttttccagaatcggtcgaggtggacggtttggccgtaaaggtgtggctattaacatggtgacagaagaagacaagaggactcttcgagacattgagaccttctacaacacctccattgaggaaatgcccctcaatgttgctgacctcatctgaggggctgtcctgccacccagccccagccagggctcaatctctgggggctgaggagcagcaggaggggggagggaagggagccaagggatggacatcttgtcattttttttctttgaataaatgtcactttttgaggcaaaagaaggaaccgtgaacattttagacacccttttctttggggtaggctcttgccccaggcgccggctcttctcccaaaaaaaaaaaaaaaacactaatccatttccctaacctagtaacctccagatcccagaggctctcctcacctcagctgagctcctttgaaagtgattcaagggactatgtcactcagcctcatttgctggaccaaatctggagggagaacccctaaaacccctaagtgaggttgcccagggggttgtccccaggtggggggaagcaggggagagaaaatggtagccatttttacattgttttgtatagtatttattgattcaggaaacaaacacaaaattctgaataaaatgacttggaaactgcctgtttgggcttctcatttcttacctccccttccctctcccacctgctactgggtgcatctctgctccccccttccccagcagatggttacctttgggctgttgctttcttgtcaccatctgagttctcagacgctggaaagccatgttctcggctctgtgaatgacaatgctgactggagtgctgcccctctgtaaagggctgggtgtggatggtcacaagcccctcacatgcctcagccaagaggaagtagtacaggggtcagcccagaggtccaggggaaaggagtggaaaccgatttccccaccaagggaggggcctgtacctcagctgttcccatagctacttgccacaactgccaagcaagtttcgctgagtttgacacatggatccctgtggatcaactgccctaggactccgtttgcacccatgtgacactgttgactttgccctgacgaagcagggccaacagtcccctaacttaattacaaaaactaatgactaagagagaggtggctagagctgaggcccctgagtcaggctgtgggtgggatcatctccagtacaggaagtgagactttcatttcctcctttccaagagagggctgagggagcagggttgagcaactggtgcagacagcctagctggactttgggtgaggcggttcagccatgaggctggctgtgcttttctcgggggccctgctggggctactggcaggtaaggaggaaggaggctgaggggagggggcccctgggagggagcctgccctgggttgctaaccatctcctctctgccaaaagcccargggacagggaatgactgtcctcacaaaaaatcagctactttgctgccatccttcacggtgacacccacggttacagagagcactggaacaaccagccacaggactaccaagagccacaaaaccaccactcacaggacaaccaccacaggcaccaccagccacggacccacgactgccactcacaaccccaccaccaccagccatggaaacgtcacagttcatccaacaagcaatagcactgccaccagccagggaccctcaactgccactcacagtcctgccaccactagtcatggaaatgccacggttcatccaacaagcaacagcactgccaccagcccaggattcaccagttctgcccacccagaaccacctccaccctctccgagtcctagcccaacctccaaggagaccattggagactacacgtggaccaatggttcccagccctgtgtccacctccaagcccagattcagattcgagtcatgtayacaacccagggtggaggagaggtaaagctaaaactggsggatgagaggggagggaggcaggactggatataggctcagagggaagaaggaagaggggacagggaaccttggccggcatcgcatgcagtcttgtgaccttccagtctttaacttccgcaggcctggggcatctctgtactgaaccccaacaaaaccaaggtccagggaagctgtgagggtgcccatccccacctgcttctctcattcccctatggacacctcagctttggattcatgcaggtatagccatgwcctcagtctcacccctcactcagcctcccggcgcccctcccctcccaatcccacacgctactccttcctctgtggagagggataccacctgcgccttcctcttcgccccacaggacctccagcagaaggttgtctacctgagctacatggcggtggagtacaatgtgtccttcccccacgcagcamgtaagtaacctccttccctttctcattgctaccactagacgccagggttcctgaaaggactaagctggggccagggaggtggataggatctgacccttcctcactcctccagagtggacattctcggctcagaatgcatcccttcgagatctccaagcacccctggggcagagcttcagttgcagcaactcgascatcattctttcaccagctgtccacctcgacctgctctccctgaggctccaggctgctcagctgccccacacaggggtctttgggcaaagtaagacctacctactccttccctcctagaatcctcccactgcactgaaaaccccttccccaggcccataagccactcatctctcttcttaaccccccaaatctcgctctcccagcttgtcatggctacagggcagctttctttccatcctctacaagactctgccagtttcccccttttatcactgctgagtcactgcggtgagctcctcaccaatctcctactccccagcatccccccattccctcctcccacctttatcccaaccagcacgtcactgcaaatacctacctgccctatccttccgccaggtttctcctgccccagtgaccggtccatcttgctgcctctcatcatcggcctgayccttcttggcctcctcgccctggtgcttattrctttctgcatcatccggagacgcccatccrcctaccaggccctctgagcatttgcttcaaaccccagggcactgagggggttggggtgtggtgggggggtacccttatttcctcgacacgcmrctggctcaaagacaatgttattttccttccctttcttgaagaacaaaaagaaagccgggcatgacggctcatgcctgtaatcccagcactttgggaggctgaggcaggtggatcactggaggtcaggagtttgagaccagcctggccaacatggtgaaaccctgtctctactaaaaatacaattagccaggtgtggcggcgtaatcccagctggcctgtaatcccrgctacttgggaggctgaggcagaactgcttgaacccaggaggtggaggttgcagtgagccgtcatcgcgccactragccaagatcgcgccactgcactccagcctgggcgacagagccagactgtctcaaataaataaatatgagataatgcagtcgggagaagggagggagagaattttattaaatgtgacgaactgccccccccccccccccagcaggagagcagcaaaatttatgcaaatctttgacggggttttccttgtcctgccaggattaaaagccatgagtttcttgtcacatgcctttctatgccttccatggctgggtctcagggagccggaagcagctgctgaggagggatgaaaatgtcagtgtgtgacgatgcctcatgggttcaccccccaaagcctggcacagctggtgttgggtctgccgtgcctcccttccttcctcctcttggggccactggctgctccagttccccatccgtggcaagccggtagagccattcatccccgcagccttcttcctgaccctcgtacagtttcaaatgcagcagacagccaaagcaatgagtggggggctgtggaacttcattcccaaaggcagcgccagtggctcctgagcaatgagaatgtcctgtcctgtccaccatattcaaggccagcagaagagcccgattaaaccctcgcagcacctggcatgctcctatcccacctgcaaggggttgaatcaagaaggagcagtgggtactctgacctccactgggggctcctgggaacagcatgccccccacacggggccacctgccaagcctaacttcatgcccccagtacttgagatgaggagtgtcactctcaggacagccaaggtccagattctagaaaggacctcccagatggccacagcctgcaccagcagtgagcgccagtcccacccattacagctggctacggcgcaatccctgggagccaggatgagcagcaccccccagccgtaggagccccaggaggcttccggcctccaaggcccagagactgccccacaagggcagccctcacctggcagggccccagcagccccacctctgcctgcagacatccgtgtgaccttgtagactttggaggggggccgccaaagggctgatccacagcggaatgacgcacgggtgggcaccgtgggttggcgtcccggcggtcggtaacgaagcacaacgcccccaccaggtagtccaaggtgccctttcccaagcagcgctgcagggtccactcggcctcgccgaagtctctgcccagcacgtggtgcgccctcgggccagcggggagggggcgaatcccgggactgcctcgccaggcctcggctccccggagactcttgggggtctgggccccaagggtgattcaggtgctgcccttccccgacctgggctcgcctcccccacctcctcctctgcttcactgtcccgggcccagcagttgccggcgcactcatgctccgaggcctgagccaaccggaggcgagacaagcacagggccctgcgcgcaacccggcacctaaggaggcctgcccggtgcagactctcctgctcccaccggcgcccttccctctagagacgctgagagaacgggagctagtagcgcccccacccaacgccacctcggagactccggctccttctctctcaacttcgaacaatacaaagtgtgctaggagaagacaagatggcgcccagcaggaggagcggagaaaggcaggggtgtaaatctggcttccaaactggaagcgtcaacaaaggcgtgggaggtctaaccgcgcaggcgtgcagcttcggcaagctttacaattccaacagcgcgtccaaaacgtggtccctgactgagacttattttacgccactagagtgagggtgggtagcgtcagaaagagcggggcacggggcgggccagcttcgccgcgggaaaagaacgggaggcggagtgtccgcagcgcgcacgcgcaacgaaagtcaatggcggtctggagagactggcggaagctagctttgcaatatggcggccgaggcggacggaccgcttaaacggctgctcgtgccgattcttttacctgagaaatgctacgaccaacttttcgttcagtgggacttgcttcacggtgagttttattcagcatccgatccaagtcctactcgagtgaccgtgggcccttagtccaagccttgatcggcgactaagtgacggcagtgactgccgccatgccgagctggacggaagtcacttctgagaagggcggaagtgtctcgggctccttagagggaggacaccatattagtgccagtggggaagtcaccgggtggaattacttctttgtggagtttgtgctgtagcgacaatgaaaaacgaagagtcaacttttataaaacaaaataaaaattaagtcaaatcatgccaacctttattagatcgctagcagggttaaacttaattcaaagcccctgatgaatcgggccttcattgcacccccaaaggctccgccaccctgattgctttctttccagcctccaggtttgctcatagtctgatttcggaataatttgcctcccttcctttttctgattgcgagacagctccacaagggtcaccgtcagaccgtttggggagcgtcagtctgcccctgtcagttcatggtacctctcttgagctcgtggggcactttgttttagccgcattcatgacccgtgagagtcagactcccactagaccaagttccttgaggggaaggcttcaaggctagagaagttgtggatggccagggcataaaagcaagccttgaaagggtaaggtttagtccctgagtaggggccagggacagtcagagtgttcaagaaagagtggtatggggcgggcacggtggctcacgcctgtaatcccagcactttgggaggccgaagcgggtggatcacctgaggtcaggcgttcgagaccagcctggccaatagggcgaaaccccgcctctactaaaaatacaaaaaattagccgggcgttgtggcaggcgcctgtaatcccagctactcgggaggctgaggcaggagaatcgcttaaacccgggagacagaggttacagtgagccgagatcgtgccattgcactccagcctgggcaacaagagtgaaactccgtctcaaaattaaaataagaaaaaaaaaatggtatgaagacttgtctttggagagagaagacatgtgaaatggggcacccattggcccagagaagggaaataaaggatcagagagctcttgggcatttctcagctttatatggggaagcaatggagagccgtggaggtcaagccaagtttgggtgttaatttatagggaatggaagattggatgtggggggtggtaggcatcggagaaaagctgttttggaaagtaacagtctggggcccggtgcggtagctcgagcttataatcccagcactttaaggaggctgaggcaggtggatcatctgaggtcaggagttcgagaccagcctggccaacatggtgaaaccctgtctctactaaaaacacaaaaattaaccgggcatggtggtgtgtgcctgtaattctagctacttgggaggctgagacaagagaattgcttgaacccaagaggcagaggctgcagtgggctgagattgggccactgcactccagcctgggtgacagagcaagactctgtctccaaaaaaaaaaaaaagtgtggtggtttggagcaggaaggaccaggactttctcactgccctccgcctctcctccccccaagacaatgcaagaccctggtgtgggtaagggggctcggggagagcccacaggagcttcaagccctggcctgggtttcagacatctcctgtctgcttacccttttttctctcctcagtcccctgcctcaagattctcctcagcaaaggcctggggctgggcattgtggctggctcacttctaggtatgtctcttatctttctttccagctgttgggttggggtggaggtgctgagaggccatcaactgtgtgggtgttcgttctatagctgttgtgttgcatcccaaagaatggagagtcctcagtcctacttttctcatctttcccctagtaaagctgccccaggtgtttaaaatcctgggagccaagagtgctgaagggttgagtctccagtctgtaatgctggagctagtggcattgactgggaccatggtctacagcatcactaacaacttcccattcaggtgaggggcccacccttccaccccaagggtaatacccacaactctaatggggattaaggtgaaggaggttacaaggcagcaaagtggccgggcccagtggcttgcacctgtaaccccagcactttgggaggccgaggcgggtggatcacctgaggtcaggagttcgaactggccaacatggtgaaaccccgtctctactaaaaatacaaaattagctgggtgtggtgatgggcacctgtaatcccagctacttgggaggctgaggcaggagaatcacttgaacctgggaggcagaggttgcagtgagccaagattgcgccactgcactccagcctgggcaacaagagcgaaactcagtcttaaaaaaaaaaaaaagggacaaggggctaggaaagttttaagcccttttagaaacctaatcatcaccagtggaggtgatcttgagaaggggtgagcatcccgagaatggccacgattcagaatgagccagtcccgtgtgggggctgtagagaagcgtgatcagagcatagtgtccctggatggatgggctatggaggctttccctgcctctttctaggcccgcctttcttcctcccaactcttgactctgcagctcttggggtgaagccttattcctgatgctccagacgatcaccatctgcttcctggtcatgcactacagaggacagactgtgaaaggtgctggggacttacccaagagcaggctgtgtggttcctgggaaccctgctgggaactcaggtctgggaaagccaaatgatgtggagagattgacaaggactcctgtctccccacccctaggtgtcgctttcctcgcttgctacggcctggtcctgctggtgcttctctcacctctgacgcccttgactgtagtcaccctgctccaggcctccaatgtgcctgctgtggtggtggggagggtgggtaccaggagcaagggacaagatgttgtgggggcagggtgggggggaagagtagaagatcaaagtgtgggggtgttgtacttgggggagcatgggaagagctcaggtgacagagccaaaggtctcaactcctcccctagcttctccaggcagccaccaactaccacaacgggcacacaggccagctctcagccatcacagtcttcctgctgtttgggggctccctggcccgaatcttcacttccattcaggtgagtgcaacatcttccttctagaaggcactaaaacctcgtcttacttctcccagctaagggccaaagctgccccgtgaggaacctttgtccataagggaacctttcttgagctatgctgaagggtaaccctggctctgtctcttgcaaccaggaaaccggagatcccctgatggctgggacctttgtggtctcctctctctgcaacggcctcatcgccgcccagctgctcttctactggaatgcaaagcctccccacaagcagaaaaaggcgcagtagagccagctactggagtcattccgtttccactcattcacccaacctcagggttctccccatctgagccagcctgctggtgtgacttactcatcctccattcctctgcacttgcagactttctgagccagggttttcttttagtggaaacaaatggttgatggatccagatccttagaaaaggagaggatgggggtagagtctcccaagccaaaattttgacatttgagtgctttcgtaagccctgtacatgtactattaattcagtcattcagccaagcctcctcctctagcagcaatttccagctgtttaacactatcctgggcaaatgttttaccctgtcctccagcctccctgcttcccttctggccctggaagactgagtctggacggcagagtggagggactgggaggctgtggctgcctccctccctcagcccggctgggactgtctcccggaccccagtgctggggtgggggaagggggacggagaatgactcaggcagggccccagggtggggtgaggaggttcctgctctggcaggtctaggcggaaggga

SEQ ID NO: 96265 - DNA, 18071 bp, Homo sapiens
aacagtctctccctagtatttgctttttgtaagcttccctagtattgttatatttttattgataaattatatgctgtactactgtgcaaatgtataaattataaaacataccccaatatagaagtaaaagagaatgagatgggtacttggtttgaatgtggtgacataactcagcattctctgtttcttccatttggaaatcatccaaaaacagcaagggaaactgtgcccctctgtgttttaaagactaactgcaatgagggtggttcctgccaacagtcactatgagttttctgcttttgtcataaaaacagtcccagttttttcacctatatgtatggcctcttaccgtgagaaagcaaatttacttgtttttttctaagatatacaaccttaaagaaaatttaagcaaatggttacacaataagtcatgtttacagaaaactgtttgtttccatgacagcaaagaagggagcctttgaatcatgaaaacaagtcagtctccaaatactacccttgaccttcccctagaaacccaccaattatcccaagaaaaaccagtctacttcagtataagtaataataaaaagagagctgacattgaatacattcaaagatactatgagaaaaaggcagattaaaaaagaaaaaaatctaataacagatgaagagctcttacaagaaaaagttgacataatacagataattatgactgaacatttgccatgacttttaaagacttaaagcaagatcataaagtaaaaatgcaatagtcaaggaagacatgataaaatgtgaaagttatagaatgctgtaaatctttcgtcccttccaatagagttattacccatctgttactgttaaaaatacaattacatatagaaaaatgacagaaatagataacaggtaaagaagacccagcatatgcctaagtagaatccctgaagaaaaactttaaaatcatgttgggggagggggactgatgttaaatataaagatgcaaattaatgtaaaaatataaattaaaaactgctaaattatcaaagatgtttatatatattaaatgattaaaatattaaagattaaaagcccatattgtatgacagaggtatagaatcaaaatgaccatcactgagacatggcctagtgaaattactgggcttcaaaatgaagaaataattatctgggctgcctactcatgtaagtgatggaagaggtggcatggcaatcaagaggccctcaaacttctcaagagcagcattcaaaagcaaaagacagtggagcactacttataagatcttgtggagaatcttatatgtaaatcatggattctatatctagccaaaagtttattcaaggacagaggaaatagatatatagttgagaatatactatattctcagggattattaccataagatgtttttgagaaaatcagtactacaggacaaatttcggccaacatgcagaggactagaagcacaaaggcacaaatggtcatataatatacttaaccatagaattaaaactaaaacaaccgtacaaatgaacaaatttgtatgatgtacaaattatgtaactaacaaaaaatggaaaaatatggggaaagaaggtctacggaagaagtatgctggaattttcagttacaatagccaatcaaaggatgaaatgtaaacttgataaacagaaataaaacaaaatgtaataatgcaaaagaaacaccaaggaaaagtaaataaatgactaaaattagatggtggagaagaaatagaggactacagagacattgaagaaatgccctgctttcattatttctcattatgaagaataatagatctgggattctttttaaaatagaggactgagggtactataaaaggttatagttgtaaaggtaatttatagaaggaaataatgtaaaccttcttaaatgtcagaagaaccacccacacacaactacaaagaagaaagacacagattattgaacaatcctttaaaaattttaaaacatggaaaatgcaataaaaaccataagacagaaacaatctcaagtatgtttgtaatatgaataaatgtaaatgaacaaaaacttaactattgttttaaaaaataagattttcaggttgtatcacatagcaaaatccaattctaggctctgtacaagagatactaaaaccaagtgtttggaaaggttaaaaatgaaagacacagttagattcaagccaaacagcattaaactagacaaaagcatatacttcataaagttaaaatgcacaattcacaaaaagcaaattaaaagagtagtgctttggtaactaattagagtttatttagagtgaccctctattccagcttaccatggatagtttatgtctgttgtcctggcttaagtatttattgaacattctttcatacctaaagtatataggtttacatgttaaataatatggtcattttaggcacattccaggaatgcaaggatggttctatatcagaaaacatattcacataaattcctatcaagttttagcattttgccatcagcttcataacactgcatgtcatgctgtattatatcctttgtattgtatcgtatcatataggtctctgctttttagcattcactttctttggctcactgtatcacagctgtgatatatgttccttttacagggtcccctaaaaggctttctggaagatttaggcagactgcaaaagaagttctatgccaaaaatgaacggttactttgtcctatcaggacctacctggttacagctaggagtgcagccagttcaggcgcccgtgtgctgaagacccttcgacgctggggtctagagatagacgaagctcttttccttgctggagcccccaaaagtcccatcttggtgaagatccggccccacatcttctttgatgaccacatgttccacattgaaggggcacagaggttaggttccatcgcagcttatggctttaataaaaaattcagtagttaggggcagggaggagaaataaagtggtgatagtctggtgttacagaagccacttcttttggctctctaggataattagataggtatttcagaaaattggaccttaaaactttgcttctttggaaaggttttctcctgattttttggaaaaccttttgaaccctcaagttaccatcaaactacttctctttgaactaccaatactgttgaatgccattacacctatctctgtgtaagtcataatgatgactctttaggataagtttagaacttgaatatttgcatgcttaaggcactgttttagaagcttacttagttttataaacactgctcatttttggatgtttgtagataacaatgaattgttacccatcagcattgtagaatagtgtcttcaaaggtagaaggagtatggttaagcacactcttgaaaactggagctttgtattctgtgactgctatggctagctttgtaaccaaagcaaaatgagaatttcactctacctgcatgagtataacaattttgatactgctcatttagaaataaatcatctggttgttcctccagggtactttctaagataagccttaaacagaaacccctaagaaaggttctctgaaaattatttggtgggttaaatgcctctgatccacagagtttcatatttgaagtctccggctttgggcctggcaggctggcacatccatatttgtatggaaaaaaaaaaaaaagaccctacgctaccacttcaaaaagtgacatgaagtgtagtatcctggcccttcattgtcattctctcatgatttttgttttgttttcaacaaaaattggttggtcattaaatatatcatatgttaggcacagtgacctggttattttcacatgttacttcattttcttatcaaattaaatgtttgtgacatagtattattattaccttcctttttatcaatgaggagcctaagattcaaaaagattagacagcttgtttaaggatatggagctaataagtgttaagactaattagattcaaattcaaatcttacttcataagttataatgaggtctctttcctcccttccaaatagagttattaatttcatggcctttggacccatctggtacagattaatcatttcattaagttccatgcataaactacacagcagttacactgcaggtctaaggattcctccctcctcttttcctcctaccctctcctgctctctctacctccaccttcatctctactccacctgtacatatgtattccacccctggctctagatgagagaagaccacagctgaaacacatcttctgatgctccctaattttatgtaaaccagtccaaaatatatcagttgtgacatgtgacactgagtacctaccattttgtaggtgtcctcccatgcaaagaccacaagaggtacgcagacacaatcctatcctctaggaaacttgaaaccttaacaatctggtcaaggaagtcaaatgtgcaaactcaaacagccaatactagaaggctgtttgtcttcagtgccagtgagggtcacacatgaccctgagggtcacacatgaagggagcagagatctttataggctggaagtggtcaggaaagaaagacttgaggtagcctgtgattttgatggatgggcaagatgtggatgggtagaaaggacaataaagtggaaacatatgctgggggatcaatgagtttgagtagcagcttcaaattggggatagggtggtgtaggaccacctctcatgattcctgttcctggtgccttgtataatccccagtaagagtgctctttcccacctctgagctccattctcattactcataagaaacctcctggaatccatccctttttctttgtattctgactattagttgcatgttacatccttcccaaatgtaagggagtggaagatggattatcacaattattggggagtttgtctcaaacgacacaagctgtggttctttttccttgtctggagaacctgcaatgggtggagggtgggaagtgggagatcacagttccagaaagtaagcaccctgagagcagaaatggtgtcccatttctctgtggctctaacagggaacaggcagggccaggcacatattggatggagaggcagacgaacgaatgagtctttaaaagtagcttggtctacagctatgaagtttgtagcttgaagaagggtccctgtgacactaaccctgatattaatgaggcattttacagtgagccaagcactttgccttccatcgttgtgtgtaatagtcctatggagagggcagggaggcatttgtaaatggcctgctcagaagcctatatttacaataagtccaagcttttcccactgtacctctgccagtgtgaagatcatttgaagatggctttcttttttttaatagggaccaatgacataatgtcttgttcagtggttctcaaagtgtggttcccagatctgcagcagcagcagcacctggaaacttgttaaaagtgcaaattatcaggccccatcctgtacctattgaattagaaactctaatactggggccctggttttttgttttcgttttgtttcattcccccaccccgaacccccaccccaagtcctccaggtgattctgatgtgcatttaagtttgagaactactcgaccattctatttccaactgattcatgttgcttaattctttgtctcatctatgaaaaacagtcctacctcagacttcagcttgtcagggcccattcctcagaaggtgaattgaactgaatttacaagtcccaagagccctcaaaggaaaacacacgaaatgccctgaggagtggcatttgtaacagggcctgtacagagatctgtgattcaaagtactcatcagacattcccatggggaagtccgccactactctgggatttcaatacgtatgaaccccagcaccctgaacactgtgctggttgcccagcctccatcattaggctgggaggagcttccacggagggcgcaggacccagggcgctgaactctcacaaccaatcaggcgacccccccagagggaaactacaagtcccagcatgccccacgcgcaccgtcaggggccgacccgccgcgccccagcgttctccgcgtacaggtggtctcttgggttccggtaaggcggcggctgcggaactcccgtggaggggccggtgggccctcgggcctgacgatggcagtggccactgcggcggcagtactggccgctctgggcggggcgctgtggctggcggcccgccggttcgtggggcccagggtccagcggctgcgcagaggcggggaccccggcctcatgcacgggaagactgtgctgatcaccggggcgaacagcggcctgggccgcgccacggccgccgagctactgcgcctgggagcgcgggtgatcatgggctgccgggaccgcgcgcgcgccgaggaggcggcgggtcagctccgccgcgagctccgccaggccgcggagtgcggcccagagcctggcgtcagcggggtgggcgagctcatagtccgggagctggacctcgcctcgctgcgctcggtgcgcgccttctgccaggaaatgctccaggtgtgggcctcggggggccgggctggtggggagggcctgggcacggtgtgggaggggactgcgggctggggctgagccgcgagggaccgccctggggttcagggtgtcaccttgggaaccgctgaggctgagaggagtccaaaaagccactttgaggcggccgggaagctgcagggttgagagggaaagagaaactaactgggagggctgccttctgtcctctaaggatgtcgaaaaagaaatgggcccaagagaaaaataaataaaccagtttctgaacgtttcatttcgttacgtgaggaccgccccgaagtagatccatggcctctgaattgtttttcctgtstcagaagtgaatttgcaccaagctgtgtcttcagaacccctgagcactgggggaagttgctagctaaggacctcatatcagtcctttaaaaaaagttctccttcccccggcctctgccccttttctgctggggtaaggagctcgctgccaccagtaaactcagcaccatccttaacgggactgtggcctgatttccaagtagaatacattttggaacccagtggtcatgctccatacagagacaggaataaaaataacacccagcattattgaagatctgtatgccaggagctgtgccaagcatttcagattttcctttttgtcttaaatgaaaatgaagtgtccttgccyataactgtcaytgaagctacacagtaaccctgtggagtaggcattattatcatccctgttttacaacgcgaggaaactgaggcataggaaggctaagaaacttgcttgtggtctgtctccagaacacttgcttttaacccttgttctttcctcctgctgcctggcagtgaggtgtgaggatttctttgtgcaaatggtaagtaattccacataagtggatgttctccgttgagattgaggtagaagagtttcttgcagggataactggcattcagagggcatttgttcagaagagtgaaatttaaaattagctgggacaagaaaggtgcctatatgacgtagagtctcttgagtctagagaagaggttcccaaattttctcagtaattttttcatgatgcccttaggccagaaatatttcccagttcatttatttagaaagtttattttgccaaggttaaggatgcacccgtggcagaacctcaggcggtcctgaggacatgtgcccaaggtggtcggggcacagcttggttttatacattttagggagacatgagacatcaatcacatatgtaaggtatacattggttctcctggaaaagtgggacaactcgaagtgggggcttccaggtcataggtagatgggagacaaaaggttgcattcttttgggtctttgattagccttttactgaatacaatttacatgtgcaggagggatagaggaataatcacttatgtcttagactggctcagtgagtctgcattttcacataaacaatacggcagagtcagcaatcagataagcatttatctcaggtgagcagaaggatgactttagagttctgtcttttgtttggcacttgtgaagatgagctatcaatttatgaatacattgccagggtgaaattcaacagaagtgttttagggtaaagatcttgaggcccatgtgggcaaattatgagggtgatatgtagcttctttttctttgtagctatcttatttaggaataaaatgggaggcaggtttgtctgaggcagttcccagcttgactttaacctttgacttagtgattttgggttctgagatttattttcctttgacacaacctaataagtagttatgtcctaacaacttagtagctatttgagaagataacataattgaaagaaaaaaataatatgtttattttgttcttaaacagccataactactaatgggaaatgtatctctgttggtcattacaccagtgtctgaaaccttggaatcagattggacacttccaccctcatttcctgttctaggtagatttttagcattgttcttgttttttattacagcaactgctaacagctgcttaaaagtcagctccacaaagaaataatgtcattgaaaggaatatagcacaatgtaatgttcaagctgtgaaccacctggagctagtagttttgaggtattgagcaaatatcactgtgtttccctcgaaaatttaaaatattccacaacaccctgagagtttgctgcaatgctgtaggccacagttcgggagctgttgcagaactagagagttggttttttgtttattgctagtatttaattatgtgtaacacaggttaagaaataatactcatcagtgagattttggaagcattaaagatggatctttctgttcctctttaaaatatagatggggctgggtttgcttctttggcacttgaggcagaactaattaaaaagtgaggacacaaagagataattaagttgtccttgcttctaagtaagtatttctgttcctgcctggctctgaagttaagtgactataattagaaggaaaaaaaaatggaaatgtagatttcccacaggttggtattcttggtatttatttcatttatctcgtagaatttaaaaaaatagtaaatgacaaaattttaaaataacacaagcccagcaaagaatgctggataacaaatgattaattcaggaaaatcttccaaaggatttgtgaaaaagaatactcctttctttcccccatgagtgaactcttgccttctttttgaagttgactattggaaaacccaaagatgcttagacagggcagaatgagaaatagttaatcctctgacaggtgggcttcgataacagttgtgaaatgtaacacatttttcttttcacttatagttggcagaagggccagtgaaatttgaaakttgacctcatattaatcatgggtcatcacagtgtctttacacttggaacatgttgtgcatttctttgtccatcaaaagaaacagaacaaccgagaaaaggctagagaagaccatcttacatgatttaaggaataaaaagacttccctatgagaacagtctaaattttaggactttaatttggaaagatacagaagcataagttcagagtataaaatgttgactgtacagatctcctagagtcccctttacgctggatatttttatattacctgattatttttttcttaatctttgattattctttatgaatctcgatttattcatgatgttctctccagtgttaagtttgcatttctgaccttttctattgcttgtttcacttttaaggaaatgacttgaagttgttccacccccatggtgccatttaccctgagagaactacagaataaagcaaccataagtttgcccttggtgttgataaccagtagctctgggaataaactatgcttacctgttttctacagcatatggtctgtctagctttcattgcctctctagctgttttgaaaatcccaattagaaagccatgccagcttactaattaagaaaataggccttggtgtcaaagacttcatcttcagatctgatcttattttgctacttaggagttctgatactgggcaagtcacctagcctgtgagcttcatttgcttatacagttgttggaattagatgtggtgacatgcgaaaagcacaaarcctggctcctatcaagcttctgcatctatttttttttctatttttctctcaattattggaagctcatagaagcattttgggatagaattttagtagtttgcaagtatttttaaacattttatcataggtacacttataattttgatatgatctcagtattaacctgataactcccaaattgatattttcctagttcaactgaaattaaagggagaaatatgggattgtaggagtgccttgtcctcaaattgactgtatttctgttttgagaaagatcttggtactgatcacgtagtcaactttctaatgcaatgttaaagtttatatatttgtaaatgttattgttataaaagcataaaaccagaaattaagtcttagatttagtttctacatcttttattggaagatgactgtagataaatatctttctgtatatcattttaataaatgagaaaaaagagctgttgaatgaaagatcatgaacatcagtatttatctgaggaacatcctgcggaggaatccctttccccatttattaaacacaaaattgccagtgtttcaagtagttctctgatcgatagaccaacaactgaaattaaatgcttttagtctcaagtgcccatttttattaaaatgtaattatcatgaacagaaaaagcaatacaaggcgtgtgttcttaataattctgccattctctttttgacatttaaaggaagagcctaggctggatgtcttgatcaataacgcagggatcttccagtgcccttacatgaagactgaagatgggtttgagatgcagttcggagtgaaccatctggggcactttctactcaccaatcttctccttggactcctcaaaagttcagctcccagcaggattgtggtagtttcttccaaactttataaatacggagacatcaattttgatgacttgaacagtgaacaaagctataataaaagcttttgttatagccggagcaaactggctaacattctttttaccagggaactagcccgccgcttagaaggcacaaatgtcaccgtcaatgtgttgcatcctggtattgtacggacaaatctggggaggcacatacacattccactgttggtcaaaccactcttcaatttggtgtcatgggcttttttcaaaactccagtagaaggtgcccagacttccatttatttggcctcttcacctgaggtagaaggagtgtcaggaagatactttggggattgtaaagaggaagaactgttgcccaaagctatggatgaatctgttgcaagaaaactctgggatatcagtgaagtgatggttggcctgctaaaataggaacaaggagtaaaagagctgtttataaaactgcatatcagttatatctgtgatcaggaatggtgtggattgagaacttgttacttgaagaaaaagaattttgatattggaatagcctgctaagaggtacatgtgggtattttggagttactgaaaaattatttttgggataagagaatttcagcaaagatgttttaaatatatatagtaagtataatgaataataagtacaatgaaaaatacaattatattgtaaaattataactgggcaagcatggatgacatattaatatttgtcagaattaagtgactcaaagtgctatcgagaggtttttcaagtatctttgagtttcatggccaaagtgttaactagttttactacaatgtttggtgtttgtgtggaaattatctgcctggtgtgtgcacacaagtcttacttggaataaatttactggtacaaattcttaactgtgcatttctttggaggcttcactgaatacagtcctttatcatgtcaccattagcctatgctgatcttggtctgcccagtctcttcttgccacgtatcttgtacactgctctgagagataatattcctaaaacccaaatctatcacattcctgcttaaaaaacagtgggttttgagccttaaaaaaaaaaaaatttggcagaattctttcttcaaaagcggtgtttcactgaaacgtagaagctggagggggtaaagcaggttatcgcaatgctgccaaggtggagtcccccacggcaattcctaaagggatttcatagaatatagtggtttataaaccacttttatttagactaaagattaaactgttgaagatagagttgaggctccatgagacagcaccatgcttaccctatactctcatactcagcactgttcagtagaactttgcagtgaggaaaggaatactctgtgttgtctgatgtgatggactctagaaacatgggattattaagtacttcaaattcaactgagaactgaatttctaattatatgtaatgttaatttaaataggcacatgtctagcaactggtatcttggacagtacatctctggtcatcccatcagataatccagtcctgattttagaacagtcacctactcacttgctttgggcctttctttatattgttctttcagtctggaatgccatctcctttttccttggaaatacgacttacccttcaggttcctttcaaatgtgttcctttctccagcccccgtaggcagagacaattctctcttcctactttttttttcccccttgatcttggtacttttactaggagtttagtgcactaattattcattcacaggttcagtcagataatcagaatagaaattctctaaggaaaggagatttattttattattagctttcctccatcaagaatcaagtatagtgcccagcacacagtaaaaaatcagtaaataatggtatgcataagaataattgagcccaaataggaatattgcaggcatctgtgttacaacatcaaaagtatctacttaattttaattatttgtttcactatctcatatcggaaaaaggaattataacactaaagtatagacagttacactgaatttaatgactatttagcccagggataattcttggttattatttttaagaccatttataatatcagcttatgagtatcggttattttcaagaatggcaggatcttggcatatcatgcagaaggtctgttttctgttagagcattgccttgtgaattggagaaacagtgtatcatcacaggtgtgtctctgcaggtgtagtggatatagctgcatcatattctttgaaacattgtatttttaaaaagtaatcctacaaagagacctgctgaacttagaaatataggcaggaaatacaccagaatgcaacttggaaaaatggaagctaataaatctgtcctacacctcgacttcattaaaagggagcccctttttttcatttaataccatcttttctggctgcattttgatacttgatgcttttcaggggatttggaccttttgtaagagttgagcctttcagagttcttttgtttgtggcaccataataaaataggatatattaacttatcatgatagaaagctagaaacttacctggaaacaccaactattaaggtaaaatgagctgccatttggaagatgtccttcgcaccactgtgtttgatggaattgaggactaagagctccaaaatgatgaggtagattttgaagaagtccttaacttcccctccttctttctcccttttgctgactcactttaatccattttactgggcaaagaaataagtaaaaggcagtcctgttattttggtattgttctcaccctcagcagtatatcagaggggaaactgtaatgtgccagatcatggaagaaatgagttgaaagcccattttccatgctggttctcagcttcattttttttgaaaaattgactcgtgtttcaagcagcttattctgagaagggttgaggttgctggccttctgtttcaactttgctcagagtaactattttatatagtggggttctaagtaggatttaattggacaaggggcttcacagcttaaacacaccaccacattgggtttgactaacagctctactgtgtaatgcttcctgtaaccttggcaagttacttaacctttccgagctattattttttttggctctatattgaaatataagtgtctactttaaaggattactcagtgaatgaaagagacagactaggtaaaatgtttagcaaagtgtctggcacatacaggcacacatccatttctccttccacaatgcacataatcattactatccattagcagtaatagtaattagcgatgctaatggttaggcaagtacatatcatggaaacaaaactctaaaccaaggggcagcaaacttcatctaaaaggccagatttctttttataatctttcaaaaatgtaaagaccatttgtagccagtacataccatactattgtacttaaatgactggtacagtcttccaggcccaatgtactcacttacttgtttacctttaagacaccttgtttgagagtagttgtcgtatatgctgtgactcctattactctataaggctgctgttgtttttccatattatttctaatgttgtggacaactatttgcttgcagaccaggaagcctaaagggtatattttaaaagtctgtctccagctatagattctggtgtgaggaagagcagttatctgccttcaactccctccccctgacaaacttgctgggcctggccagagatctgagggactctgtatttgaatatttaattgattccaaatgtcctatggaacactgaagagagaacatgttactaatcacccttcaggagcttggcccccacagacaggttcagatgttccacaagccttctctgggcgatggggagttaaattagttacaggctaacatggagaaaggtagtttattcctagaggaaactaagacggaatgcttagttttatgcagacagtaaggaaaagcttttgctaagccagatgtgtaatcaaagtgcagtggaagcacttttaagcaactaccatctaagagatttgctgtaataactgattctccattctttttttctaaaaaaaaaaaaaaaaactaatgcacatagcatgtgaaactctaggctgataggctttcttctagcacacaacagcccttctgcttcctcttgttctattatatacttaagagtgagttgtgtaccatttgttattcacttagcaaatatttattgagtacctattatgtaaccgggcattattctagttctgggcatgcaggaggcaacaaagaaaacccaacccaatttgtgcatgcatatgtcaactgtgctggttaataatcacattacaaattattaatcatactgcaagtcaatgaaatgtgagtacaaagaatttatatgaaaagtagaaaagtagttttgtaaaaactaaatgaaagcaagtcactaaaaatttactgttgactaaagtttcaaagcaactatcaaatactaaaaataaatacaaaattataaaaggagtctgtagttagtgctttgcaagtaactttaaactttgagtccattttaagggcaaaaaagctagaaatccgactctactatttaagtgaatacaggaataccacagagatacttctgattttgttccagatcaccacaataaagcaaatattaaagtgagttacacaaacttttttgtttctccatgcgtgtaaaagttatgtttatactatactgttgtctattaggtgtataagaccattatgtctaaaaaacaatgtacataccttaatttaaaaatacgttttttgctcaaaaacctctaacaattatctgagccatcagtgagtcattatattttttctggtggagggtctcacctcgatggctgctgacttcagggtggtggttgctgaaggctgggttggctggagcaatgtctgaaaatacaacaacaatgcaggttgccaaattgataagactgttccttccatgaaatatttatctgtagcatgtggtggtatttacccacagtagaacttccttcaaaattgaagtcaatcctatcaaaccctattgctgccttctcaactaagtttatgtaatattccaaatcctttgctttcatttcagaaatgttcacaacctcttcaccaggagtagagtccatctccagaaacccactttctttgttcatccctaagaaacaattccttatgtctttaagttttatcatgagattgcagcagttcactcacatctttaggctccacttccaattatcttgtgatttttacctcatctgtgtttacttcctccaaagaaggtttgaaccctcaaagtcatccatgagggttggactcagattttttcaaatttctgttaatgttgatattttgaccttctcctttgaattatgaatgttcttaatggcatctagaatggttaatactttcgcagaagattgtcaatttattttgcccagatccatcggaggaataactgtggcagctttagccctaggaaatgttatttcttaaataataagactttaaagtcaaaattactccttaatccatgggctgcagactagatgtatcagcagacatgaaaacattaatcgttttatacatctccatcagagttcttgggtgactatgtgcattgtcaatgagcagtaatattttgaaaggcatcttttctaagcaataggtcttaacagtggacttaaaatttcagtaaaccatgctgtaaacagatgtgctgtcatccagaccttgttgttccccttatagcacataggcagagtagattaaacataattcttacaggccctagaatttttagtatggtaaatgtgcattgacttcaacttaaagtcaccagctgcattagccccaaacaagagagtcagactgtcctttgaagctttgtttccatgcattgacttctctctagctataaaagcctcagatcgcatcttcttccaatggaaagctattttgtctgcattaaaaatccgttgcttagtgtattagtccattttcatgctgctgataaagacgtacccaaggctgggcaatttataaagaaaaagaagtttaatggactcacagttccacgtggctggggaggcctaacaatcatagcagaaggtgaaaggcatatcttacatggctgcagggaagagagaaaatgagagacaagcaaaagaggtttccccttataaacccaccagatctcttgagacttattcactaccatgagaacagcacaggaaagacccatccacatgattcaattacctcccacgggtccctcccacaacacatgggaattgtggaagctacaattcaagatgagatttgagtggggcacagtcaaaccatatcacttagtgtggccaccttcatcaatgttcttagctagctcttctggataacttgctgtagcttctgcattagcacttgctgcttcaccttgcactttaatgttgcagagatggcttctttccctaaacctcatgaaccaacctctgctagcttcaaacttttcttctgcagctttctcacctctctcaacccagatagagttgagttagggccttgctctgaattaggttttggctttagggaatgttgtggctggtttgatcttagaagatcactttagacagcccactaaaactttctccatatcagcaatatgaggctgtttcacttgcttatcattcatgtgtttcctggaattgcatgtttaatttctttcaagaacttttctttgtgttcataacttggccaactgtttggcaggagaggcctcgcttttggcctttcttggctttcaacatgccttcctcactaagctta

SEQ ID NO: 96266 - DNA, 23822 bp, Homo sapiens
accctatctctctcttctctctcttctctctctctctctctctctctctctatatatatatatatatatatatatgaatgtgagagagagagacatatatatatatgaatgagagagagagacatatgatatatatatgaatgtgaatctgcaggacatggggtgaatggtgaatgtgcagctgtgcaccatttcccagagttgcctgtgctctttttctttttttttttttctcgagagacagagtctcactctgttgcccaggctggagtgcagtggtgtgatatcagcacactgcaacctccgcctcccaggttcaagtgattctcgtgcctcagccacccaagtagctggaattacaggtgcacaccaccatgcccggctattttttgtatttttggtagagacaggggtctcaccatgttggtcaagctggtctcaaattcctgggctcaagggatccacctgccttggcctcccaaagtagtgggattacaggcgttagtcaccatgcccagccgatttttctacgtagcatcttgctctgagaattagtggtccaggaagcacactctggaaaaagtcacagcaggagacagcctcaaattttccaactctgtcaccatggcactgaaaaagaggagccggaccaggcaagagcagcagagatgtggttatcaggaagaatgtactggtgccagagaagtgctgggacagacggtgggggagctggggactcctctctcctccagctttcataccccgtgcgagtggggtccctgtggaaggggcatgagtccgcgattcagaagagctgatttgactcttgactttgccactcccttgctgggtggccttggtcaagtcacctgtcctctctgagcctggtatctttacttggataatgatgggatgtaggctataaacctgagaatgtctaaggacccttctggctccaggattttatgtctatatgcatttcggccaaaatggggatgagaagaaaaaaagggaatcctatctagagcacagtgtcttctaaccacgattcctgattctagacttgtttgggggtggtttccaaagagcttctaatgcctactcactcacttggccaatgtattccctgagggtcgaggttgctaatagagaaaaatggtgacacgccatgccagactcatagctgttgagggctaggggacagagagaggaagaaaggtcctcatttgaattctttgtgtatttgaagagactattaaatcgactatgccaaatgcccccccaacctccttttttttttttttttttttgaaacagggtcttgctctatcacccaggcgggagtgtagtggcatgatcttggctcactacaacctccacctctcgagctcacgagatcctcccatctcagcccctcaagtagctggaactacaggtgtgcaccaccatgcttggctaattttttttttttttttttttttgtagagatgaggtctcactatattgcccaggatggtctcaaactcctgggctcaagtgatcctccttcctcagccttccaaaatgctgggattacaggcatgagccactgtgcccagccctcaagtttttaaacagtgatatggtgactgtactctatattttccaaactaaacatcaggacccatggtatcagaaaggcttttacatgctgacatttccattttcgtaaaatgcggatggtttgtgggggacaagggaaataacagctaaaaacaggagtgtcccaggaagccaaggtactacgatcaccatgccgagtatcttctcccccgccccctcaaaccaccggatatctgatgttctccacggcagaagcattgctcttttctcatcaatagaaatggcagacctcaccctggcattcccgtaaagatgataaaaaccacattggatgctcagactggtatctaacactctcaaacacatccaatcctcccctcagggctctcttgctttcctccaggcttaattgcaatacttactttcaccaaattgattgcagactaacaatttcccccatttaatttattaagccactcagagacataatgacctatttgggagttgtgtcttccctgtggagctcctagactatgaactcctcttggcaagagtgaaccgagcagcccctccccatggaaggggctggacactggcctggccctttgtcctcctccttttcttaatttcctgccacctattgtctctctgataactgctgacagagggaagggtgctatttaattgctttaaagatatcaaacaagccagttagaaggttatctcctccccaacccctctatttttctggctcaaggttttgttacttagttactagccaagctgcagaggaagaagaggtagccccatgtggattacagctcagacttcattcagcagatggagggcagagtcaaaatagcctgggggagccaaaggtggaataggaactcgaggttggcccctgagtgctgctggcagcccaaactgctctttggaggccttcaaaggtggggaggggagaagagaggaggcattcattttctggacaaaatcaacaatcatcctagatgacacatttctgctgtcaaggtccatgttgttcagagcccactcagccagctgcagtaagacaggtgtgcctaacgtgggtgcatcagtactttttccaggctgggtctgccctatgtgataaggaggggaaggctcgacaaggaaagtgcatgaaggggaatgttgctttatttggtcatccacattaaagagcatacagggctacatgtggtggctcacacctgtaatcccagcattttgggattattcagcctattcaggaggctgaggtgggcgattacctgaagtcagtagttcaagaccggcctggccaacatggtgaaaccctgtctctactaaaattacaaaaattagccaggcatggtggcaaccgcccggagtcccagctacgcaggaggctgaggcagcagaatcacttgagcctgggaggcagaggttgctgtgagctgacatcacgccactgcactccaccttggacaacagagtgagactccgtctcaaaaaaaataaaaattaggccaggcgtggtggctcatgcctgtaatcccagcactttgggagcccgaggcgggtggatcacttgaggtcaggagtttgagactagcctgggcaacatagtgaaaccccgtctctactaaaaatacaaaacttagcagggcatggtggcgcacacctgtaatcccagctcctcgggacgctgaggtacaagaatcgcttgaacctgggaggtggaggttgcagtgggccaagatcgcaccactgcactccagcctgggcaacaagagcgaaactccatctcaaaaaaaaaaaaaaaaaaaaaaaaaagaggtcaggcacggtggctcacacctgtaatcccagcactttgggaggccgaggtgggtgaatcacgaggtcaggagatcaagatcatactgggtaacacagtgaaaccgcatctctactaaaactacaaaaaattagccaggcatggtggcacgtgcctgtagccccagctactcgggaggctgaggcaggagaacggtgtgaacccgggaggtggggcttgcagtgagccaagatcgtgccactgcactccagcctgggcgacagagcgagactccgtctcaaaaaagaaagaaagaaagaaggaaagaaagaaagaaaggaaggaaggaaggaaggaagaaagaacaggacttcaaacagagcatacttagttatgggtcccctccccacacagaaaaactccctggacatcaatgacttcatccattcggactggcagataggccacatttcctgacaccctgtctcttcaccttaaaagggttagctttccaccacaccagcaaagaccctcaggacacacgattcatattcccagctgagcatctacccggaggtaagcagacgctcaggcacctgggccgtccttgccctaatccctccagtggtgtccacactgagtcctgcagcactggtagaaggtggtcttcggctcatctgcagagtgggtctgaagctacatgtagtaagcacaaggaggttctcattgaggacatggctctgcagtagagtcaacatcctcccaggcagctgctcccccaagcccatcatccacttctttcagctttgagtacttccaatttgttaccttgtgggtgaagtgcacacagaggcacgtgttgcaggcgagggagtggcagcggcagcgctgtccctcctccacgatcagcccatccctgcagccagggtagaacagcagcatcatctcggactctgctggctccagttattattttttttaatgaaacgtaaatctggtattaacagtttgagaacttttaggaaaggaatttgagggcagagtgggcacttcctggctcttccttcttttcctggaaaccagtcagattactggttttaaactggaggtggcaacaggcattgtagcaactgtgtggccagaggatgccgagttcccctgagcacaattccacgatgccctcctgatattactattacctctctgcctctccctcttcccactgacggtgagcagacacagccctcttccagtgagctagccaccccagcccttccacttgcatacacatgtctaaaagagatgctggctcccagattgactcctggaacttaaggcaattgcagctcaatttccatctcaccctgagctccaggatgccaagatttaagccctatcatgaccaacgtctcagagagagatggaaactcctgatccccatctcacagtgggtaccccaagatacagcttggcccagatagaagagagagctggctgctgctgtacctggtggttgcttttccatgtcactcatctatctctaaggctcaccccacctgccacacagcttctggacttttacttttccctggtgaattggaaatcagataataggatggacaaatcaaggcagctcagctcacagagaaagctagttggggtttgctttctgttttcacatcctctaaaactgtactgaggatggtgtgtgtgtgtgtgtgtgtgtgtgtgtgtgtgtgtatacctatgtacttggaggagggtgaggaaggggaggctgcaggattgattatgacttattaaactattggaaaagaggctgaatcatcacagtcaaaaataaacagctgcaactccatgcgactcccacttcttgcctgctcccctttgctccctcacagcatgtaggagagactgtgctgggtcagaccagcaggtgctgactgacgtggctacagcaaggggaccacctgtatggccgctgcacctccaagctgtgggacgcagggacagctgggaccagtcgacgtccactggccctctgatggctcctaggactgaatcttggactccaggtgcgggtttacactccctgcgctcattgggaactgcatggagaagcgctatcccctgagccctttttctccctactcttagcctggccctgcgccctgcgcccggggctggcccacggtaaacacagctttgctaacttgtttggctaaggaaatcacagaggtcccggtataagtctgggtcaccccggccgccactccagctgcctagaatatatgggtggaagggaatcgactctgtgaaatcagagggaaaatagcgcttgtccttgccatgagtcttgaggagaccgaaaacgcttaaccttttacgcccccgcaggcgggtcccctctctccccgctccccggctgtctgtaagctctgcctgcggccacccgcaggcgtttcagccggtctcacccctgtccttctgcaggacccgggaggaggggttgggggggcggagcgaagccgctgtgacgtagcgggaggggggcgtggggaaatgtgccgaggtgcccgggctggctgggccagtcccagcggcgcagccacccatgcgcgcgcgctcgcaagaccaccagcgcccagagccccagtctgaggcttggcgccgggggtctgcgggcgaggggagctctctacgtgcgaggggctagcgggagccggcacaagagggtcgaggagccaggaaccccaaacgtccggcgccaggcgctagccaagctgctgcgcgccccggcgcccagctggctcggggacagccgctgggtgtcggagaccggagctagcggattgcagcggaaaagcaaaggtgaggggtgtgtgtgtgtgtgtgtgtgtgtgtgtgtgtgtgtgtgtgataagagagatggagggagcgagaagcgcacttgggcacctgtgtgcatctgcgctgatggtggtgtgcccatccgagtgcctgagcttaggtcccggtgcgtgattctccgctcttgtgccttttggggtgattgtagtaggaatgaacgacaacgggtacccttgcctgagtaagggggctgtgggtagagtgtgctggaacggacgtgtcctcgcagcctcatgcccgtgtgcgtggcgtgtgccctttagcccgagatttcaggtagctgcgacgggtgacaacttctctcccagccccctacaaaagagacctggcgcgaggggagcgaggccgtgagatgccagctggggctcctgcgggagcgcacccggagatccgagcctgccagaggcaggcggcgggcgcagagcggagaaagaggggcttctctccctagacgctgaacgatctaggatccgtccccgtcccccacctcgggacagaaaggacagtttgtctagktttggagagaaaaaaccactgcataggccgtgcccaaaagccrctggccaagtcccccaagcgactgtcttctgcgccccgatgtctctgtcctcagcgccccccccccacacccggcacccctgctgtgcgtttcgatactgggcgtgctggcgccacaatctccgctcttgcctcgtcttcctggaaatggcacagagttctttgggaaacccttgctctgaggatcagcgagttggatggccaggaggaggactttctgtgccagccgggagcaaccggctccgcggtcctgacactcgcccctccatttctcaaccccgtaggccagcaccgccccggcttttcccaggcgctcacgcgccgcggtggccctcaggggcttttgtcaccctgccagtgggggctctcgctctagccgcacagagaccaagccgggttctgcaggccctgagggaggyggggggtgggaagtgaatgcgggaaacatgatggggagaggagaaactgaagctgagtaggatttaggacctcccctgatgtcgggtcgccatcccaacactcatttcttgggctggtaatcacagcccctatgtaaaaggggggcggggggggcaggtgcgtragaccattctcaccctcctctctacagagcctggacatggttcagaggaaaccaaccactagccatttccagcatctaacaattcttgggctggaaaaacaaagaatgcagaaaacgaaacttccttgtacatttaatttaaccacaattcatctagaattgtctgcctggcattggaatattctttctctgaaacaaaaatgaaacagaagtctctggaagaccttaagcggctgacttctttgttaaataagactccccatgatttaagctcatttcttgcttagaggagccttcccactctcagccggctccccagcctcccacctccaccaccttcaccaagactctgaaccctgtctgttgctaccattaagcaattctgtcctgttgactcaaactccagttaaaatgaccsagttagggctggaaagcaacactcaaccctctctcatactccctgcaccatcatcgttcctagcccaaaagctcttagacaggggctctgccaacccagggggattccgtgttactcagacattggagtgtgaccattcatgttatatagatgggcccctggaaatccccawgataaggtacactctgattgcaggcagcttgaataggattctggctctgtagaattaaaccaactgaccagatggttagaagtgataacgaaactayccaagttaatccagggatactaaccacagtttctgtacagcttctgttttaattgctgccagtctatgcttttttacgcaatgcagacatgaaattccaggtgcctcaaatacttcacaaaatggtcagccacaaagcccagatctcacttcacagacagttgtgtggtagggaaatgagcacagaaggaacgagcaatgcacctggcagttcagaatcaatcagaagcaaaggtgagcaaggatcctcaagtacttgttgctggccaagtctcctttaactgatctgcagtctttccaaggattaagaagtaatcttccatctacacccaggcaccaggaaaaggacctagctcaggggaaatgtgtcagccargtgaattagtcccactctgctgaacacaccaccctttgaacatctcgcctcttcctagattggcctctttgctgtcctcctgcttcactcttcatatacccaagacccagctcaaacamttctctttggaagcctcctctgagtcccccaggaaaggaaggcattcttaagtccttcatttatctctcgtgcaatgcccaccctatatgagctggcttcctttcctatctccccttttaaattatcacctcctagagggcactggccaagtttgttcatttctacatccctgctgtcagcacaaagaagcctcctctccaggcccccaacccccgtgatattttttgaatggctgtatatcaatcatttaattatgggatgaactattgttttagatcttaagccaagccartagtgctccaattattttctcagcaaggaagtaacacaggagtcagttgcttcaaaccaaagcccagttatcagccgttcggtctctaggccactgaggagcagaggggatgccttgagacgtgcaaaagacttggggccaggtggcctgtgttcacatcccagctccaccaattatgtgcaagagaatggggtgagctccttaaactctcttaagcctcagtttccacatctctaaaatgggggtaattatccctaccacctaggacagttggggagatcaagggactcgtgartgtgaatgaattatatcagtactggaagccttctgcttacttctgtgaaagagcttgtgtcccacacctgcttcccgtttttgtccgtaattagaaaatggcaggcaaattctctggagtgttacagcacttgggagcagcatccccttagggactttgggaaagagctcttgaggaagtcaagcattaggtattggaaaacaaaaatagaagaaaaacaaaaaataaactgaagcctacatttcaaaaatgaaagcaaaccagacttttatttttaatactgaagactataaattgtttcaccacgtaggtagatttcaataaatcagagataatgagatggtagaggaaaacatggggggaaacaacttacgaggttcccattatgagcccaacgcaaggctaggcattttcacatatattccatcatttaaccttcatgacgcccccatgtgaagaaataagagtcagaaccattaaggaccaggcatgtggtcacacgggctcagcagtggaacccggtttgttctgcctctagagtctgggttttttccactatggcattttcagaatggaaagactccaaggcagtcagcaagtcagcatagatttcctggtagggaagaggccaggaatgtcagtgtcagacccttctgaggtcaggcgctgaacttctccaagctctgcctttctgcagtttagatcagtcaacttcttaggggtcaaagtatgtgctttttkaagccacagccctccccgacatgtgcgtcagcagatgatggctgaacccaaacccttccctactattggaaaaacaactcaaaaagtctgcacactgatgaggaactctagagcttaatgttgatgtggaaagataatacatttttcaatttaagagtatgtctgagaggctaarccagaaatgtgtaaatttggtgagastttaaacagcctgtgaccgacgggccaatcttcctcttttccttccagatgtcacactggatccttggcctccagggtccattaaggtgagaataagatctctgggctggctggaactagcctaagactgaaaagcagccatggacatggcggatgagccactcaatggaagccacacatggctatccattccatttgacctcaatggctctgtggtgtcaaccaacacctcaaaccagacagagccgtactatgacctgacaagcaatgcagtcctcacattcatctattttgtggtctgcatcattgggttgtgtggcaacacacttgtcatttatgtcatcctccgctatgccaagatgaagaccatcaccaacatttacatcctcaacctggccatcgcagatgagctcttcatgctgggtctgcctttcttggctatgcaggtggctctggtccactggccctttggcaaggccatttgccgggtggtcatgactgtggatggcatcaatcagttcaccagcatcttctgcctgacagtcatgagcatcgaccgatacctggctgtggtccaccccatcaagtcggccaagtggaggagaccccggacggccaagatgatcaccatggctgtgtggggagtctctctgctggtcatcttgcccatcatgatatatgctgggctccggagcaaccagtgggggagaagcagctgcaccatcaactggccaggtgaatctggggcttggtacacagggttcatcatctacactttcattctggggttcctggtacccctcaccatcatctgtctttgctacctgttcattatcatcaaggtgaagtcctctggaatccgagtgggctcctctaagaggaagaagtytgagaagaaggtcacccgaatggtgtccatcgtggtggctgtcttcatcttctgctggcttcccttctacatattcaacgtttcttccgtctccatggccatcagccccaccccagcccttaaaggcatgtttgactttgtggtggtcctcacctatgctaacagctgtgccaaccctatcctatatgccttcttgtctgacaacttcaagaagagcttccagaatgtcctctgcttggtcaaggtgagcggcacagatgatggggagcggagtgacagtaagcaggacaaatcccggctgaatgagaccacggagacccagaggaccctcctcaatggagacctccaaaccagtatctgaactgcttggggggtgggaaagaaccaagccatgctctgtctactggcaatgggctccctacccacactggcttcctgcctcccacccctcacacctggcttctagaatagaggattgctcagcatgagtccaattcagagaacggtgtttgagtcagcttgtctgattgaatgataatgtgctaaattgattacctcccccttaaagcgaacactgaaatgcaggtagacaattcaaagtctggagaagagggatcatgcctggatatgatctttagaaacaacaaaaatagaaaaaaataagtatctgtgtgtttgtgtattgaaaactcaatatgtaatcttgtgtttttatatgtatacttgtatattcctatttattctctgtataggcattacctacgttcctgtgtttacatacacaagtagcaaattcgagtatgcatagtgtagatggacatttgccacaacacactgcccgcagaaatggacttaccgtgaagccaataaagttcaagcttcagggatctctctygcacgggccttgccaaggcccaggagggacttgggcagtatgttcatgtggtcatatgtttttgtaaaaaattgtgaaagtaagatatgtttgtattgtttttcttaaagaggaacctcgtataagcttcaagcctcacaaaccttctagcctctgcccttggggatttgcttcattaatttcaggcaagtgaggtcaatgtaagaagggaaagggagaagatatttgaagaaccagaatgtaaattcatgtgtttccacttctcagatatagtcagagaattattcatttgcccaaaaggacttaagtggttgtggtcatccatcattgtatttatcaagacaaagccaactttgttataagattgcatttttttcttttcaaattgctttagtttttcttagggagctatgagggggaaaaatcactaacatgaaaggcaaaaaatggactatgattcctgtggggaaacaatttcattctctccatcgtgaaaataagtgaataagagtgaagcaaaattacacctttatgagaaaccataaaattgtttttatttttcaggccagacatagcttcctaatgaaagaaaatggaaatgtaattcgacgactcctcaaaggggactttagaggacttcatacaaagctgggcattaagaaaaccacaatgcatggccgggcgtggtggcttacacctgtaatcccagcactttgggaggccgaggtgggtggatcacccgaggtcaggagttcgagaccagcctggccaacatggtgaaaccccatcactactaaaaatatgtaaattagtcgggcgtggtgtcacgtgcctgtaatcctagctgctcgggaggctgaggcaggagaatcacttgaacttgggaggtggaggttgcagtaagctgagattgtgccactgcactctagcctgagcaacaagagcaaaactcagtctcaaaaaaaaaaaaaaaaaaaaaaaaaaaaaaaaaaagggaaaaccacaatgcgtactaaagaccagaagacattgttcacaaaacaaaagcaccctcacctgccaatgaatatgcagcgtgcagggggtgtggtgtgagtgttggtggggccccacctctcggagatactgctgtgctgccttcctcactgactgtatacatagtaactgtcatatctttaatgccatggactcactgagccgctctgcaaggactattgtagacaggcacttcacaccataaagtggcatttttttcgttccccaaactgacatttacaagcgataagaaaagagacaatatccatttcattgactgatcattttctagagtatgaagaaatacacacctgggtgtctgcaaggatgtcatcatctttgggtttcatctgagagcatcactcagcatctcacacatagatgttaccatatttttaaatgagctttcctcatccggctccctaagcaagcgctgttggccggtgggagtgactaagtgctccacctgtgggtgtccttcttaatgtgctgcttttgttctgtataaattcacaccacctcactcccaaaagtacttcctgtggctcagaaaaatatgttcaataagattttggatagataaatccatacaaaaataaaaagaggtatagttataaaacaagactacagaaaaagttgtggcagaaattgcatgcaggaaaatcccacaccattagtaaaagtaaggtcaactgtaagttcagctcagggcttcctagcagccatgtttagcgaagtgtgatttttttttttaaacaaaaacaagcaaagatttggaagaaaatgctttagacctaactttacaattattataacataagatgttccagggtccttgaataaatgctgagttttagggaaatgattccaagggaccaagaattggtagaaataatttcaaggcagagaagactaattctacaggccgggcgtggtggcttatgcctgtaatcccacactttgggaggctgaggtgggtggattgcctgaggtcaagagttcaagaccagcctggccaacatggtgaaaccctgtctctactaaaaatacaaaaaattacccaggcatggtggcgggcgcctgtaatcccagctacttgggaggctgagacaggagaatggcttgaacccaggaggtggagattgcggtgagctgagatcgtgccattgcactccagcctgggcaacaagagcgaaacttcatctcaaaaaaaaaaaaacaaagactaattctatagtacccatgaccctgcaaccagagaaactgcctgtagggaggccagagtccaaagcagccacctgtaacctgaaaatgaaacgcagacccaggcatctgtgggtcttcatcagcaggatgaccattctaaggctaaaagacaggcctttaaatctgatgctataattccatccaaatacacagttaggtttctaccatagggaaagctattctccactttttgaagtatctgtttcaaagataacttgctctctggttctcttttatctaaaagagagaatcaacatgctaatttaaaggttaacatcattttaattcaaaaattttagtctccattccatatttaatgatgaagacaaatctgctgggtgctgggagggaataaaaagtaatgcaccccattgatttcagagtatctgatcacttgggttatgcaagctgctacttacccgccattagcatgggtagttaagtgctgattaaacctaagtggactcagtgaaaaagatattgggaaaaataatatgatattgtggcctatgttgaatgatgttagcttgtgtttcagtaacagagttgggtaatactggacgtgtagatgaagctttagcagggctgggcacggtggctcatgcctgtaatcccagcactttgggaggctgaggcgggtggattacctgaggtcaggagttcaagaccagcctggccaacatggggaaaccctgtctctactaagaatacaaaaattagctgggtgtggtggcgtgtgcctgtaatcccagctactcaggaggctgagacaggagaatcgcttgaacccgggaggcgaaggttgcagtgagccaagatcgcgccactgcacttcagcctgggtgacagcacaagactccatctcaaaaaaaaaaaaaaaaaggaagaagaaaaagaaacttaagtggggttcatacatagcatggcagagggacactggagaataaaatggcatgcagagaggaacacgcgggccagtggatgaggcttctagacctggcagtgaactggagtctatttgcttacacaaatttaaccttctctccatgatggaatacaagtgtttcttgccaaaactcgcagccccagctgccctagatgaggagcaccgtgctggaaaagtgcacaggctgatcacagagacaggtaggaagcaatggactgttaaaatgcatgttccgggctggggatggtggctcacacctgtgatctcagcactttgggaggccgaggctggggaatcgcttgagcccaggattttgagactagcctaggcaatatggtgagaccctgcccttaaaaaaaaaaaagaaaagaaaagaaaagaaaaaaagattcatattcctgatcagctctgaatgtgactattcaatgaagacagtaaagttacagtgtaaggcacacatgacctttggccttgctaaagaagagtggctgaaggtctagcaaattaatgcttgtcttaggttacctgttgatttaaaaacaacaacaacaaaaacccataaaaatagtaaaatataaaaacaaattagtgttttatagaccctggggaaaagaattttcagcaaagtacaaaaatttaaagcattcctttctttaattttgtaattctttactgtagaacagctcaaaatatcagttctgttttaagtaacagaattgataactgagcagggaaacgtaatttggattgtaaaattcttgctttaataaaaattctttaaacagtcaaaatagaaagaaagaaagaaaggtggcaagagaattatcaaaagtttccatagatggttgggaagatctgattagtgtttccaaaatgcttatcattctaagaatcccaatagctggcaagccaagcagtggaacttatagtaacaacaatcaatcacttgtctcatcccacatttttgccaaattcaaaaacaccaaatttcccatcaaatgttctgtcagagtaaacctttacctaagtgcttgttttgcttttaatatgtgaatttctgggaacattcccatgggcagcctctaattttttttttttttttttgagacagagtttcgctttttcacccaggctggagcgcagtggcacgatcttggctcactgcaacctccacctaccggattcaagtgattctcctgcctcagcctcccaagtagcagggactacaggcacgtgccaccacgcccagctaatttttgtatttttagtggagatgggtttttgccatgttggccaggcaggtcttgaactcttgacctcaggtgatccgcctgcctcagtgtcccaaagtgttgggattacaggcacgagccaccgcgctcagccaatttttcctcaactctctctttcctggacgggctgcgttggggggaggtgcagggaaagaacacctctttgcttagacattggtgtcgacagtggggatactaagttcatctcctgatcctgctaggcctggaagcaggaaagaaatgtcctggttagagataaaattgttctatccttttagaaaagcctgttaaggaatatgatgcaaagccaccttcgacgaaatctgaaatgataccccacagccttgtccaccccaattattcagtgacagggctccagttgcttaagccatagagaaggcccctttgcagtgggagtcactgaagacagaaagggaagcccaggatgaacccagtcctaagggctgctgggggccaccaaataagactgttttagccctggacacagagggagacacagtcatcccagatccttacaaagaatacattgccaaggaccccgaaggaaatctgcttgtcttaagagaggaagacccacgaccagctctctgggactacctgtcaactcagcaggtgcagccagggagcagccatgcttcttctgccctcccagtaggctgggctatcagttcctgggaggggtcctgtccccatgtaaggggatatgtacattgctgagtacgctgatatctttttcatgggtatgattttttaacaagaaagctaaatggttctcgtgtaacataactgatatagtttggctgtgtccccacccaaatcttatcttgaactgcagctcccataatccccaggtgttgtgggagggacccagtgggaggtaattgaatcatgggggtggttaccgccatgctgttctcgtgatagcgagtgagttctcacgagatctgatggttttataaggggctttccccctccttcgctctgcacttctccttgctgccatgcgaagaaggatgtgtttgcttccccttctgccatgattgtaagtttcctgaggcctccccagccatgttaaactttgagttaattaaacctctttcctttataaattacccagtcttgcgtatgtctttattagcagtgtgagaatggactaatacaataaccaaggcttggtggctttctcaacattaaccagcatcccagttctcaggagacatggatggtgttctaaggctctcaagttcccaacttgtaccttcactctagtttgtgctcccaagcacatgcacacataaacacacacgtaatgtacatgcatataggtggcatgacagaacacatgtgtgatgcttcacatgtatgtcaccctccccttgtccactgccctgctccagcccatttccatggctcagtctacatctgctcatcttgtttgcttaagtaccatgcatgtgaaagacatgctcacgtgtgtgtgatattcatgcacatacatgttaggcacacgtgatgcacatgtgtacatgggaggcatgtgtgtgatgtgtacacacagtatacatcctgtattgcctcggcaagacctcaatgcagagattctccagcagctttaaacagagggtgataaatataatttgactaactcatctcaaatctagggatagttagtcttttttttgagacagaatttcgctttttttgcccaggctggagtgcagtggtgcgatcttggctcactgcaacccccacctcccgggttcaagcgattcacctgcctcagcctcccaagtaactgggattacaggcatgtgccatcacgctcagctaattttttttgtatttttagtagagacggggtttcacctcgatggccaggttggtctcgaactcctgacccccaagtgatccacccacctcggcctcccaaagtgctgggattacaggcatgagccaccccgcctggccagttagtcattttttctagactgctgccacgatagggaggaggacattatgcataaactagttttttacccagagaattccatgctagatcacagactgcatgcctagcatgcccagccccagccagctgtccctgcctcaattcaacaccaccagcaaaaagggttggcaaaagggtgtgacggcttcctgcaaatcacccccaccggtccattggcatgaagcacttgtactgctaacagcaacatttttgcataagaaaaatgatacaatttcttcatagaaaaatcactgaaaataattcttaaattgagtctcatcaatgacagcatcttaacagacatttcttccccctggtcccccggaccatgcttcttaatacaaatccaaggctgaaccctatggggaagctgtgatactctgccagtgagaaaatgaatggccgctgtcttccttgcccgtgagcacacctccgcaaaagagtctcttaaacagaaaggaaaccttccctttgtccatggtcctgcttgttcatttccgtggcttgggatatctaccttggctcatcttgtttgcttaagtatcagccagtgtgtgatggagaagagagtattgttatgtcttcctctgaggaacagaagtctgatctccagggttcattctcaagattaattaaagctagcctagtctcagctgtgctgccagcccagcgtgctagacactcacagagcaaaggcttgggtggaaggaagacttactttttttgccttcagcttaagcactttttggcagatgaaaatcctgtcctaaatatctcttccaaactcccaggtggatgggctcgggagatgacagaccacagctgttccactttttttctctgcaccttcacgtgaccacctgtctccaagggtttgcaagctcaaaggtagcagaacatgcaacttcagccataccatgtggcctcctcgaaggtctgtctttgcagcccaggaaacctattgcttcttggttttaaatggaacatttctagtccagctgagccgacacaaaatctggttggatatcagtaatatggttctgggatgttgggcagacatggaaatgggtatttacagagtttgggactttgagggcttccttcctgcctccaggaccaataaagtaaatgttaattgctggagaagaaccaaggtgaggcactgatgtggcaggctgcttcagcagtgacgtctgttttcagagatcagcttcaccttagagagtgtcaaggtcagtggaggcccactttgctctcagcaaagtcaagacaggagaccagctgcctttgagcagggagtctcacatgtttaaaatttagcaattagagtttgtttcctttaactatgcccttgatctgtctttcaaaacaatgtccccttatagtttatatttaaaattttaacttcagcactttggaaggccgaggcaggaagattgcttgagcctagcagttcgagaccagcctgggcaacacagaggaccctcacctctacaaaaaaaaatttaaaaatcagccacgtgtagtggtgaacacctgtactctcagctgcttgggaggctgaggcaggaggataacttgaacctgggaggttgaagctgcagcgatccacgattatgccattgcactccaacctgggtgacagagagagactctgtctctaaaaataaaatataaaaataaaaataagatacaaatttaaaatgcctttctatttttatttatttgagacggagtctcactctgttgcccaggctggagtgcaatggcgcgatctcagctcactgcaacctccgcctcccgggttcaagaaattctcatgtctcagcttccccagtagctgagatgacgggagtgggccaccacatccagctaatttttgtattttagtagagacagggtttcaccatgctggtcaggctggtcttgaatgccggacctcaagtgatccacccaccttggccttaaaatccctttttaaagaggcatttgagaattccacaatatttcctttaaacaactcgaaagggacactttgttttcataaaatgcggttgggaagcaatttcgaaagagtcaacaaaggcatttcatcccagggtggatggagcagagccgggtctcattctttttctccatctctccctccttttggtcttgcctgccctttgacagaaacaatttaatatgtagctgagcaggggaaaagggctcctagttagaaaagccagttaagacagggttcccattaacttggaggggtcaaccagccagcttagccagctcacagaggtctcatatgtgtgctctgattgccaacaaaaagtagcagcagacaattcaaggggaaagacccaggaaagtctccactccagggtctaacaacctgagagccatctcatcagtaaagagcagggcgtggagtacagggagctgacatttagactggttaaaagctagtataatctgaacagcgcattgttcctgaagcctacctactcctgatttcatagctaatctatccatcactctctggctgtcactcacccataaacaacagtggatttttataaacagtagatcaatcatgatcaaaggaaactgaacactctttccacatggctcccacacacacctcaccctgctctgtccttttgggtggtgccgagaagcctttgagatcaccccagtctttgaggactaaatggagacaaggaagcttgggacatccaggaaaagtcttcagcagccctgactgcaaaaacagtttcaattatgtgatgtgattggtggttttaacatgtcaagagtaggtgtgcacatggtccacagctagaatttttattattattattattttttttttttgagacagagtcttgctctctcacccagactggagtgcaatggtgtgatctcggctcactgcaacctccacctcccaggttcaagcaattctcctgcctccccagtagctgggattacaggcacgcgccaccatgcctggctaatttttatatttttagtagagatgggttttcactgtgttggccagactggtctcgaatttctaacgtcaagtgatccgcccacctcagccttccaaagtgctgggattacaggcatgagccaccatgcttattattattattattattattattattattattattattattattatggtatttttgaatgtaattattcttaataatatgtcatctctgcatgtccagtatttcgataaaacagttaaaactgcatttgccttctaatgagactttgtgactggctgtgtttctctgtcagatgaatttaccttcctatttgctgttaaaagtgattgtataatcctaatcctagaaaacaagcagcaaatgtttctttttagtgactttttaaaaaatttacaagtgtaccattttatagctatcttcacacaaaatcacattctcaatcaaagagactcagatcgaagtctgttcattaggccagctacgtgaactcacctctgtcccctgcctctgaaaaatatcctacatgctcaggaaagagggccagagtcctaagtgacataacctacactttctaagttccctaaagccctgaactagaaataggctttaaaatttcacaatttgttttaaaactctaagcccaacagaaagcctacaaagtcttttctagatgttaccaaggtcttggctatcacttgtctgagagcaaaagaaaaaaacaaaagaaaaaccttgaaaattggcaactactggtgaatcccattttgtccacagactgatttttttttttttttaaagacggtgtcttgctctgttgcccaggctggagtgcagtggcatgatctcagttcactgcaacctccgtctcctgggttccagtgattctcctgcctcagcctcccaagtagctgggattacaggcacctgctaccatgcccggctaatttttttgtatttttagtagagacgggttttgccatgttggccaggctggtctcaaactcttgacctcaggtgatccacccgcctcggcttctcaaagtgctaggattacaggtgtgagccaccgcacccagccacagagactaatttttaatggccccatctggtttcttccagattttgtagcctagtttaaacagaatgtctaagtcatcgtcaagcagatgacaaaagggtgccctaaaagtgccataaagatgcaccaggtctcagtgatagcaaagctgactatagacaaatgcccagagtttagaaattaggcccccaaaaccaacttgttaccatcttctcatctttcactcaaatccaaaacataagaaaattccagttgcttaagttagagtaaatcagacgctaacatcagaaaaaaattagctggttgttcactatgtaccaagccctgttctaagcacttaatatgaatcatctcattcaattcccataagagctctctgaagtaagtgctacttttattcccattatacagatgagcaaactgaggcatagcatacttgagtcacttgcccagaacctgcactcttttttctttgtttgttttttgtttttgagacagagtcttgctctgtcgcccaggctggagtgcagtggcgtgatcttggctcaccacaacctctgcctcctgggttcacgccattctcctgcctcagcctcccaagtagctgggactacaggcgcccgccaccacgcccggctaattttttttgtattttttagtagagatggggtttcaccgtgttagccaggatggtctcgatctcctgacctcgtgatccgcccacctcggcctcccgaagtgctgggattacaagcttgagccaccatgcccagccagtacctgcactcttacccacttctccacattgcatgaccacctacagaaagtgtgagcttgagcaagtgcctgaccttccagagaccatgcttcctcgtttgcaaaacagggataacaccaagtacctcaaggaattctgtaacgatcagatgaaaagaaatattgaagacaatttgtcacattatcagacaaagagaggtacccagtacatattagcatcccttcacctttaatcagagcaaaagaagaccagaaatgttttggttgttaaacagctgatcattttccaaaattgctaatattaaactatggcttctaatcctgccatcggtagaaagcttggccagcactaacaaaaccagccatgtgacgcaagatgaaagcaaatcggagtgcagaaaagtaaatg

SEQ ID NO: 96267 - DNA, 56838 bp, Homo sapiens
accagcctgggcaacacagtgagaccccaactccccaaaaagaaaaaaggtaagaatttggattcttgctcacaaccaatcctggaaatgtcctacttctgaacttatgtgagataattttttttgttgtttttttgagatggagtctcactctgttgcccaggctggagtgcaatggtgcgatcttggctcactgcaacctccacctcccacgttcaagcaattctcctgcctcagcctcctgagtagctgggattacaggttcctgccaccacaccaaactaatttttgtatttttagtagagacaggctttcgccatgttgggcaggctggtctcaaactcctgacctcaggtgatccacctgccttagcctcccacagtgctgggattacaggcatgagccaccatgcctcgctggaattttaaaattttatgtaggaacagggtctcactatattgcccaggctggtcacgaactcctgaactccagtgatcctcctatttcagcctcccaaagtggtggggttacagaagtgagccacttagtctggccacatttgtatgttttctgtatgcctattactagctcccaaacacaccaatattcattcaaagtgactttcttttcaaatttcttctctttctccctctgtcttcctccctttttccttcttttttttttttttaaattttgagacggtgtctcactctgttgccaaggctggagtgcagtggcaccatctcggctcactgcaacctctgcctcccaggtataagcaattctcctgcctcaacctcccgagtagctgggattacaggtgtgcaccaccacgcctggctaatttttgtattttttagtagagatggggtttcatcatgttggccaggctggtcttgaactcccaacctcaaatgatccgcccaactccctccgttttatttctatacccgctcccattcccttctcccccatgccaggtaaccattctatggtgttaatatataaaattgttatgagttcttgcataaagtgaactgttagttgtaatattttaattaatataaatgattttccccacacatgcattcttactgctttcactgggtactattttttatgattgagccatatggctaagtgtacatcttgtctgtggtttttaactattgttacttcattgtctacatccaccacatttttacctctctccaggtgtagatatccaggttgtctccgaccccatgatgtcaaaaataattcccaataatggacctttatgaaaatctctttaggatattacaccaagcagtgcaattgctaggtcagagagtacatgaacacttaggtatgttcttgctctccagaataggtgcatcaatttacactttttttttttttttttgagacagagtctcgctctgtcgtccaggctggagtgcagtggagcgatctcggctcactgcaagctccgcctcctgggttcaagtgattctcctgcctcagcctcccgagtagctgggactacaggcgcctgccaccacacccagctaatttttgtattttttaagtagagacagtgtttcaccatattggccaggctggtctcgaactcctgaccttgtgatcatcccgcctcggcttcccaaagtgctgggattacaggcatgagccactgtgcccggcccttccatacaaattttaaagtaagcttgagttcatcaaaaaatccaactggaatttttattgggattaatgtaatctgctttttcacattaaatttagaatgttcacttttataatattgtcatctcattggaagcacagaatgtttcttaggttattttctatgtcttcattagagtttttaaagctttcttcaaatagaccttgtgtaaccttggttaattccttgatattttacatttttatacctattgtgaaatgatatgctttggattttcattggctgatcttatttataactggcgaccttgctgaatctcttaggagttagaatagtttgttgattgttgaattttttaggtagatatcatttgcaaaggagaggttttctcttctcttccaatccttacatgctgtaatcgtttatctttccttatagtattaattaggatccatactactataagcctccccagtgagtcgtggtctcaaaaggaaggcatttaatctaacatttctccactaaatataatgtttactgtaggttttggtgtttgttttgagacacagtctcactctgtcacccaggctggagtgcagtggtgagatcatggctcactgtagcctcccacctgagcctcccaagtaactgggactacaggaacatgccaccacacctggctaactttttgtatatctatttttaatttttgtagtgatgggattttgccacgttgcctaggctggtctcaaattcctgggctgaagcactctgcctgcctcggccttctaaagggctgggattacaggtgtgagccagcacacccggtccctactgtaggtttttattatataaactttcaccaagtttaagtactgtattgctaacttagccaggcatggtggtgcacacctgtagtcccagctacttgggagatgaggcaggagaatcgcttgaacccgggaggcagaggttgcagtgagctgagatcgcaccactgcactgcagcctgggtgacagagtgagactctgtctcaaaaaaaaaaaaattcattcatttttatggctgaataatattccactgaatggatataccatgttgtttgttttgttctgttttgttttttcacagccaattttcatactgttgtttcacattctcacagccctcagcacaggccacgtcccagcccagctctgggactctggttcagggctcagagcctctggtctgggctgatcgaaaacctcctttgaccttatggcagtaggtggaccttggctctgcttgtccctactcagagctcagggcagtgccctgtacagccgccccacttccacgaaggcctccacgtggtagtcaatgtcttcctcattgtgcaatgctgagatctgtatccggatctgggccttgcccttggagaccacagggtagctgaacccaataacaaagatgcctctcttcagcatgtcatccgccatgcaaggtcagctgggcatcacccagcatcacaggacggatggggtgactggctcctgagacagtgaatccagcagcttccatcttactacagaaccactgggtcctggcagccatagactggacgatggtgttgctctccatgagcagatctagggccttagaggtgcagccaacaacagcaggtggcagactgttggagaagagatagggctgggcagcagcagtgacaccaggggcccaggccctgtcgtgtagccccctgatgcaccacccagggccttccccagggtggagttgatgatggtgacctggcccatcacacccagcagctcatctgtgccctgtcctgtgagtcccaggaaaccagtggcatggcattcatccacaaagaccagggcgccatatctagaggcgaggcggcagatcttctgcaggggcacgatgtcgccatccatggaaaaggccccatcggtggccaccaggaacagccgatgcttctgggcctcctgaagcttggtttctaggtaggccacgtccaggtggcaatagtggtacttgtgggccttgcacaggcagatgccgtggatgatggaggcacagttcagctcgtccgacaggactgcgtcctcgggtctcagcaggacctcaaagaggccggcgttggcgtcacaacagctgggatagaggatggcatcctcccgctggtggaagcgggctatttttgcttctagattcttgtggatgctttgggttccacggatgaagcggaccgagctaaggccagctccaaagagcctgcagacctgcctgaatcacctcagggtggctgctcaggcccaggtagttgttggcacgttaagttgaggattcctccggagacgccgtccacgtggatgtgcggcccctgacgggacgtgatgacccgctcactcttccaggtgccagctccgcggatcccttccagctccccctccagaatgccgcgcagctgggccagtactgactgcgcgctgcggccgcacggcaccccggaaagcgcggcgcgccaggcgtttccagcccacattgctcctacctcgccagagcgcaccttcctgcccgaaagccgtgcgcaccgcccacattgtttatctactgatgaacgcttggattctttccaccttttggctagtatgaatgttactatgaacactcatgtacaagttcctgtgtggacatatgttctcaattcttctgggcatacacctaggagtggaattgccaggtcaaatggcaactgtacaactccctgaggaacttctggactgttttccaaagcagctccaccattttacattcccaccagcagtgtataaaggttctgatttctccagatcttcagaagatacaatttttattaatattatagccatcctaatgggtgtaaagtgttctggtttgcatttctctgctaatgatattgagtatctttgcatgtgcatactggccatttgtatatcttctttggagaaatgtctatccagatcctttgatcaatttaaaaattgggttgtcttttcaatatcgagttgtaagatttctccgtatgttctggacacaagttccttatctatgatttgccaacattttctctcattctatgcgttagtattctatgggttggtgcaattacttttgcaccaacctttttaagggtctcttttaattggtgggttaaatccacttatactatttacaatgttctccacatggtcaaatgcattgggtaacctatacgttcaattttctccctggacatctccctcctgatatcctctgtcctgctccagtctggactgaatatagtgctgcaaagctgttatcttgccacaatgctaggttggttccctgatttttgctatctctgctcttccttgatttacttccttaatttctgtggagtgtatccttcagcagcctttgaaaaaaacggcatgaagagtgaagtttgagattttgtatgcctgcaatgttttgttttgagatagagtctcactcttgttgtctaggctggagtgcaatggtgcacaattttggctcactgcaacctctgcctcccaggctcaagcaattctcctgcctcagcctcccaagtagctgagattacaggcgtgtgccaccatgcctagctcatttttgtatttttggtagagacagggtttcaccatgttggccaggctggtcttgaactcctgacctcaggtaatccgcctgcctcggcctcccaaagtgctgggattacaggcgtgagccaccacacccagccaacctgcaatgtttttaacttcacacgtgaagacagcctgactggtcatagaattactatttcctgggtttagtcaatgagagtttggttacaaatggatactttgttagctgtatcaatttggttcctgaggttcagagaacaactaggaaatattcatttgacaagggatatctcaaaaaatttatcatctatttgctgcatgagtttggagagctgtaaattcaaataggtaggaatctgtcctcagaactctgaaggcattgatccaccatcttttgtcatccagatttgctaatgagtctaacacaactgtaaatctgttcctaagtgattttttttttccggacacttgcaggattttctatttactctgaaacttcacagtgctatgccttgatgtggatctttttcattcattacacttgacactctgctgtgcctttcaatctaaagattgaagttctggaatagccactatattagtccattttcacactctataaataactgcccaagactgggtaatttataaaggaaagtgtttaattgactgaagagttcagcatggccagggaggcctcaagaaacttacaatcatgggggaacgcaaaggggaagcaaagcaccttcttcacaaggcttcaggagaaagagtgaggagttaaaggggcagagccctttataaaaccatcagatcttgtgagaactcacccactatcaggagaacatcgtaggggaaaccacccccatgatccaatcacctcccaccaggtctctccctagacacatggggattatggggattacaattcgagatgaaatttgggtgaggacacagacaaaccataccagccatttatgttatttctaataacccactgcccccatttcttttttaacttttttcactttctaaaactgttagtctggttttgacccctgtatttatcttctgtggctttcatcttttctctttgtctctttcagttctactttcaggaatattttctcacctacatcttccaacactattaattacttttgaattttaaatatttttaattttaaaaagccctattgttttaatagtttcacttccaattgttttatgaatgcgatttctccagatatctttcaaactaatttttttattcactagatagcactgtcttatattttaaagattctgaaaaacacaatttttaacgcttatgtagtccgccatcaaaacatcaatgtactgaagattttaagcagcatgaggcaccatcacgtttttgtttcttccccctcatttccccgcccctaccagatctgtttttgatgtttagcctagaagtagcaagaaggatgaactgaagcagattagagatcgagctggtaatccagatgagaaataatgaaagtcttctctagggtaatagtggtgaggtaaaggcaaaaggatagctgacagacgttaggaggtgaaatggcacaggacttggtgaaaaactggttaggagaagaggaaagagaaaagcccaggttatcctcagatttatggtttggacaacaggaagaatagcaatttctccaagtcgagtcctattataaatattttcatttttgtatttcactttgagtctcaatttaccaagataacttcctttcaatcagcaaaacacctgtttactacttactaacaatattaaagatgcaaatatttacgaaacatatttttctcactttacatagatgcctatcatttcatttgtaaaaaaggttaattctatttactcattaaaatacttacatttaaatactccagcataatacattaggtgtattaaacatatagatgctcctcagatgaagaatatagtctaatctggttttatacacaataaagacaatttaaaatgtaaaaaactgggcttaaaaaatgcagccaaccacctgttttattaagttttaccaagtatttccttctaaaaagtccttatcggagctatttctttaaagccaacatttactacattaacagatgggttctttaaataagaaattttactttcaactcactgattttatacktagaggctttaaaattttttagaatatgtgaagaccggaattaaaccattctcaccatatttttccaggactgtttgctaactggcttgtttttacataaagctttaaacatgtctaccatgggtagtaaacaagaaggactatttgaaactataaaacctaccaaacaaagtgccaaatgcattatcactgctttttccttcttttataagaatcattactatgaactcgtactcgttggtgcacagaggatgctattttcatactctctttctttgtaaaggtcttctctatagctccaggtttccaaagtaacaactgtgcatcttctcctccagtcaacaaagaatcatcttgcacattccaacagaaagaacggactgtagcagcatgccctccctgaaggctagtcacatgggtcagtcctgacatgctgcagttcatcaaatgaatccttcctttgtttgttcctccaataacatgcaatgtgtctgtcttttcatgatataggccaccaatcaaatagtccaaagcatcttctttcatgttaactacttctctgacatcctggatgttcaaacgtgtaactggttcatcagtgtccagatgattaagatcccaccaataaaatccttcatcatgtgtcatgcagtaaatctgtttataacctttcccagaccaaccaatacagcttactgatgaaattgagttacaggttgtaaccagtgcatcctcctcattatcaatattaatatcaaatacatttaccaggccatcagatgaacctgagactaccatgttgggattgctgggatggaaacgtacttgagtgacatcatcactatgtgtctctgaatatgcaccaagtgagtctttagttgtagataaattctgagaattcatccttgcatcccaaaacaccaacaatgcatcatcatcaactttttctgtaccagcacaaataatatgatcattacaattaatatcaaaactgataaaaatattggaagggtaacccttgaagagctgaacaggtttttctctggctactcgagcatcccagcatttcacagtgccatcagtacatgctgaatatacactgtcacaggaatttgcaaatctgactccattaagaagtccaggatatccactaaattctcgtagtacatttaacctttctttatcatatattctgattgatccattagaacataaaacagcaaccaagttttcctttcctgcttggacagtctttgatgtgtctataccaagaaggtaagtgggctctttggttcctaaggaacatttaacaatgtgcagattagcaaattgttcctcaatcttttccatgtcaacagcagcatccaagggtagtaaaactctgtaaaaaataataataataaaaataaaaattaatgcttaacaagrgagacacataaaaaaatttaacttgaagtttctctaaaattgcaattaaatcaagaacattttcctctgagggctggcatgaatcaatcaatcaacagaaatgtattctaatactataatcatttccttcctatgatgtaactaaaactcagttgccttctaattcaatcactctttaatactgaattcactaccaggagtggtggctcacacctgtaatctcagcactttgggaggctgaggtaggaggactgcttgaggccaggcattagagaccagcctgagcaacatggggagacccccccgccgtctcttcaaaaaataaattagcagggcatggtggcctatgcctgtagtcctagctactcaggaggctgaggtaggaggactgcttgagaccagaagttgagactacagtgatccatgatcatgtcactgtcatacagcctggggaataaagtgagatcctgcctcaaaaaaraaaaaaaaaatgctgaatttactatatatattttatgctagtaagagaataaaaaacatgtacatacgccacccagtagttccttttagctcaaacccaattactggttctactcaagtcatcttcaggattggcaaggatctccactttggaataatyttytcctggccccagctgccttacacaactttagaatttaaacatagatatgtaggcmaaaaaaaaaaaaaaaaaaaaaaaaaaaaaaaaaaaggtttcccaaaaatattcatgccttaatccctggaatctgtgaatatgttaggttacaaaggaaaactgaagttgtacatggaattaaggttgcttatcagcctaatataaggctaaccttaaaatagggagattatcctagattatctgttatcaccgtggcccaatatggtaacaactgtcttcaaaagtggaagagggaggcagaagagtcagaggaagaggttcccatagaagaaaggcaaagacacagagagatacaatgttgctggttttgaagacagaggctgagagtggcctctagaaactaaaaagcaagaaaagattgtcctctaagcctccaaatggaaatgcagccctgttgacatcttaattttagcccagtgacatccattttggacttcagacctccagaaccgttaagataataaacttaatgttatttcaaacaactaagtttgcagtaatttgttatagcagcaataggaaacgaatacaacagaggttcccagtatagaatcctggagaagtccttctaaggcagtagcagcttgtgatagtagaactgggatttgaacctaggcattctggcttcaggcttcacggactgtgctctaaaccaccatactagattgcctctccagggtgggctgtatgtaggacaagttcaaggccagaaaaacatgcatgcctagtaacactataataaattcttgacacyagagcagagtacgagtctgaggtggagggagtcatggcaggacaagcgtttaagtttcttccactctttgaccgagtattggttgaaaggagtgctgttgaaactgtaaccaaaggaggcattatgcttccagaaaaatctcaaggaaaagtattgcaagcaacagtagtcgctgttggatcgggttctaaaggaaagggtggagagattcaaccagttrgtgtgaaagttggagrtaaagttcttctcccataacatggaggcaccaaagtagttctagatgacaaggattatttcctatttagagatggtgacgttcttggaaagtacgtaaactgaaataagtcactattgaaatggcatcaacatgaagctgcccattccaccgaagttctgaaatctttcatcatgtaaataatttccatatttctcttttataataaactaaataactaatgaaaaaaataaaataaattcttctattgtgctttctcatcagtgaatattctttctagcctgtctaacaaattcattttcattcttaagatgaaatgttttttctgttgctttagtgatatcttcttaagcatctgtcttttcatctttaaaaggrgaaatgagtactaactcaagaactgttaggaggattaactaatgcatgccatgtgttctgcacaatgtatggcatatcatagtacctacacaatagatgtaataggtcaggcatggtggctcatgcctgtwatcccaacacttctggaggccgaggcagcgatcactgaggtcaggagttcgagaccagtctggtcaacatggtaaaaccccgtctctactaaaaatacaaaaattagtttggtgttgtggtgcacacctgtwatccagctactcgggaggctgaggcaggagaactgcttgaggtagaggttgcaatgagccaaggtcttgccactgcactccagcctgaacaacagagtgagattcctactcaaaaaaaaaaaaaaaaaaaaaaaaagatggctggacatggtagctcacgcctgtaatcccagcactttgggaggccaaggcgggcagatcacctgaggtcgggagattgagaccagtctgaccgacatggaaaaaccccgtctctattaaaaatacaaaattagccaggcgtggtggcacatgcctgtaatcccagctactcgggaggctgaggcaggagaatcgcttgaacccaggaggaggaggttgcggtgagccgagatcgcgccgttgcactccatcctgggcaacaagagtgaaactccatctcaaaaaaaaaaaaaaagatgtaatataaaaattaccagtatcaccatataagggagaatttggatctatcagagagctccaaatagcacaattacatcaaacagcaaaaaatattagtaagttggatttgggttttttaaaatttattttatttttttgtatttttagtggagatggggtttcaccgtgttagccaggatggtctcgacctcctgacctcgtgatccgcctgcctcggcctcccaaagtgctgggattacaggcgtgagccaccacgcccagcctggatttgggtttaaaatagaaataagcattccctccaacttttaattttcaacatttatttttacttatttttcctttggagatggcatcacagctcattaattttcaacatttataagtgcgcacacacaaaaagttctaatgcacacacacagttcaccttctaggttcactgttaacttcttgccacatttgctttctctctctacacacacacacacacacacaccccactgctttttaaaaatgaaccttttgatgagagttagctgcagacaaagtatcactccattcctaaatacttcactataacagcatctctccaaccttctgtttttcatgtcatggaattttttgaatatcctattcttcaacaactttcatccaaagagttcaggatctattaattgtccttgcctaaatcaatgattatgctagaatctgtaaaacagtccttttctatcattctttctaccttagcaggcattcttctataaacaagagcttttttcctttctctgcttctttgactaggaaatcacaattcttaaaaactgtgtatcataatctatcgctttgttgctttttgatgctcaaagtgtctggacttggccattaagaccctttaagccagcttctgaagccttctgataggaccccatcagtctgtaagccccacatgagaaactccgtggaagcattaggtagctctaaaaatggtgttcttccttcaacttaagtattcagacatgaaatgaccattttccagtaacgctggggtagtcacctccacagctgctgaggtagctagcacagtacaactgttctgtggttttcccgccagacaaaatagccttaccttgaacacgtcaggcttgctcctgcctcaggactgcagcaacagctgtttgcctggagtattctttccctgcatgtctgcatgagtgactccttcctgttattcaggtctcagcatatgtcacctgcccagagagagtctctccactgccaatcaacgtgaaaaagcccctgtcatttcctatcacatccttaccctgtttcactaatttaaaaattaaaaatgatggccaggtgcagtggctcattcttgtaatcccagcatgttgagaagccagggcaggcagattgcttgagcccaggggttcgagaccagcctgggcaacaaggctaaaccccacctctacaaaaaaatgcaaaaatgaggcaggtgtggtagtgcacgcctgtagtcccagctacttgggaggactgcttgagctcgggaggtggaggttgcaatgagccaagatcatgccactgcactccagccaggacaacagggcaagaccctgtctcaaaaaaaaactgacacaaaatttaaaatgtttaattatgaagtatttcaaatgtacaaaggtgtagaaaaaaatataagacacccaaacatgtaccacctatacttaacaaatattaacattttttactgtatctgcctcagtttaacaaaatggaacattacagacacaagtaaaacttcactccaataattaagaatttagaataatggcaccatatttatatgtatctttcttgcaatttgctcttttcactcaatataatttttaaaaagtcctgttttagtggtgaacttattacctaactctttcttgcttatttgttaataagtggttgctgaatacattaatgcctaactgattcaactttcacacattaaaatcaccacgtaaggacgctgcggtcaatgacagaccacatttatgatagttaagattataatggaggccaggtgtggtaacccatgtgtgtgatcccagcactttgggaggccaagccgggcagccaggcagatcactttagcctaggagtttgaaaccagcctgagcaacataaagaaaccccttctctacacaaaaaatacaaaaattagccaggcatggtggtgcacgcctatagtcccatctactggggaggctgaggcaggggaatgcttgagcccgggaggctgaggctgcagggagctgtgattgcaccactgcacttcagcctcggcgacagagcaagacacgtgctgtctgtctctctctctctctatatatatatayatacacacacacacacatatatacatacacatacacacacacacacacacacacacacacacacgagctgggaaagttccatcatctaattgtggtccctgcaaattcatggcacaatgcattactcatgtgtctgtggtgatgcgtgtataaacaaacctattgcactgccagtcatataaaagtatagtgcatacaattatgtacagtacataatacttcataaagacaataaaggactatgttacgggtttatgttactcgtttaaaagtccaatactatactttttttttttttgagacggagtttcgctttgtcacccaggctgtaatgcagtggcaccatctcagctcactgcgacctctgcctcccgggttcaagaaattctcctgcctcagcccccgaagcagctgggattacaggcatatgccacaatgcccagctaatttttgtgtttttagtagagacagggtttcaccacgttggccaggctgatctcgaactcctgacctcaggtgatccacacacctcggtctcccaaagtgctgggattacaggcatgagccaccatgcccggcaagactatacttttaatcgttattttagagtggactttctctacttattgaaaggaagttaactgtgaacagcctcaggcaagtccttcaaagcgtattccagaatgcactgttctcatagaagatgacaactccatgtgttattgctcctaaaaaccttccagtgggataagacatggagtagaagaccacaaaattgatgatcctgaccgtgtgtgggcctaggctaatgtgtgtgtcttttttcttctttttttttttggaggcagggtcttgttccatcactcagcaaagtagcgccatcatggctcactgcagcctcaacctcccaggctcaggccaccacatccagctaatttttgtatttttggtagagacagggtctcactattttgaccaagctggtctcaaacttctgggctcaagcaatcttcttgcctcagcctcccaaagtggtgagattacaggcatgagccactgtccccagcctgtgtctcaatttttaacaaaagagttttagaagtaaaattagaaaataataaaataaaaattaaagtagaaataggcttatggaataaggatatatgaagaaaatatttttgtacagctgtacaatgtgtttgtgttttaagctaagtattattacaaaagaggaaaaaagtatcacgccaagtgctctctacaggtataccatttgttatcatttataccataattttattatacctttttatgtttagatctacaagtatttaccattgtgttacaactgcttaaagtattcagtagagtaaaatgctgtacagtgtagtgtaggtcataccgtacagctcaagtatgtagtaggctatactatctaggttgggtaagtacagtatactccatgatgttcccaggatgaaactgcctaatgacccatttctcattgttaggcaatgaatgactgtaatcataactggagttcaccaaatgctaggctatgtgctcgaaacttctatccagtttttaaatcctcatcatttaaccctatgaggcagatattattatcactattttacaaaggaaattgaagctcagagagactaatttgcccttgctctcatagctactaagtgaacatattggaggagtctggtttgaaattcaagttgtaacttcaaaacctgtgaatctgtgttcattccaatgttaagctattgatcttctatgtaagtattaaagtactgctgtcaactttaatccagggatatgcccatgaggctttagaggaggaattacatgtaaattctatgtatcagaagagaaaggaagcagtgtatgattgtaaaaacatgtaataacccagaaaagagttacaataagcaatcatcctttacttttaatttttcatgtgatctacttttctctttaaaacttttttttgagacggagtcttgctctgttgcccaggctggactgcagtgacaccatctcggttcactgcaagctctgcctcccgggttcacgccattctcctgcctcagcctcccaagtagctgggactacaggtgcccaccaccatgcccggctaattgttttgtatttttagtagagacggggtttcaccatattagccaggatggtctccatctcctgacctcgtgatctgtccgcctccgcctctcaaagtgctgggattacaggcatgataaaactttttattatggaatgtgcatggagtagagaacagtaacagaaatccccacatgcgcattatccagcacaattatattccccaaaagttatcagggatggagaagtcagttatacatattttactgaagggcaattaagaaaccccaggccaggcatggtggctcacatctgtaatcccagcactttgggaggccgaggcaggcagatcacctgaggtcaggagttcgagaccagcctgaccaacatggagaaaacccatctctactaaaaatacaaaattagccaggtgtggtggcacatgccagtaatcccagctacttgggaggctgaggcaggagaatcgcttgaacccaggaggcggagtttgcagtgagccaagatggcgccattacactccagcctgggcaacaagagcgaaagtctgactcaaaaaaaaaaaaaaaagaaaagaaaaaggaaagaaaccccaggccgggcgcagcagtggctcatgcctgtaatcccaacactttgggaggccaaggcgggcagatcacgaggtcaggagtttgagaccagcctggccaacatggtgaaaccccatctctactaagaatacaaaaataagctgggtgtggtggtgcatgcctgtaatcccagctactcgggaggctgaggcagaagaatcacttgaacctgggaggcggaggttgcagtgagctgagattgtaccgttgaactccagcctgagcaatagagtgagactctgcctcaaaaacaaaacaaaacaaacaaacaaacaaaaaacaacttaatatagaattgcctctggctgggcatggtgacttacacctgtaatcccagtactttgggagactgaggcaggaggatcacttgcagccaggagttcaagacaagcctgggcaacagagtaagtctctttctcaaaaaaaataaataaatcaataaaaaataaaaaaatctgtctagtaagtttctgtatgttttaataatgtatttatatttttgaatatacaacatagtcaatggtccaaaattaaaaaggtccccaaactatcttagaacatctctgtcctcaagtccctttcctgtcccaggaggcaatgttactagtttcttataaatattaatattttcagagattgtcaatttggagtacagtgtaaatactgcagtgaagtatctcaacaaaaaccagccagtgtggtgcatgcacacacacacacacacacacacacacacacaaataggtttaagaagcaaaacccctagtgctggcaatttggatgaagaccatgccttctgcctttaagaagttgagaaacagaaaagtaaacaattacaatataggaagacaggtggctgggtgcggtgcctcggtggctcacgcctataatctcagtgctttgggaggctgaggtgggagatcacgaggttgggagatctaggccatcctggccaacatggtgaaaccccatctctactaaaatacaaaaaattggctgggtgtggtggtgcacttgtagtcccagctactcaggaggctgaggcaggggaatgaggcaagggaatcgcttgaagccgggaggcagaggctgcagtgagccgagatggcgccactgcactccagcctggcaacagagcaaaactccatctcaaaaaaaaaaacccaaaaaaacaaaaacgaagactggtactaggacagaggtgatagaaacacaaagcagaagtaagcagaaggtacaatgcttggcataaagaaaatatgcaacaaatattaatttccttcctaattttcatttcatttgatttagtcatttaaattcatttcacattttaaaagctacgattcttacagctgttcagaaacttaacacagtttagttacttttatattaactatttaaaaaaacaacatgcaaccttcatgaacacaatatcaaataaacaactctcaaatctgaataaactacagccacaccaaattgagccggtgctttcttagattttatttttcattttataatgaaaaatacacctctaaagagcatatggccgggcgtggtagttcacgcctgtaatcccagcacttcgggaagccgaggcgggcggatcacctgagcctcaggagttggagaccagcctggccaacatggtgaaatcctctctctaccaaaaatacaaaaattagccaagggtggtggcgcccacctataatcccagctacatgggaggctgaggcaggagaattgcttatacctggaaggtggaggttacagtgagccaagatcgcgccactgcactccaggctggagacagagagaaactgtctcaacaaaaaaataaaataaaataaaataaaataaaacaaaaccaaaaaagcatatgaacttcaatatgtttcaaaaaatgactgtgtttcactgcccaaggttctcagtgaactctcccaagattcttatcttggataccaatcaaaatgtttaggatttaaactattaaaaacgcccttgagttccttggagaaagaagagtttaaaaggaaaaacaaaaagacataggagccaagaactccattggccaatctaaaacaatcttaacaacaaaataacaatactcatctgagtgcagtggctcacgcctgtaatcccagctacttgggaggctgaggcaggagaatcacttgaacctgggaggtgaaggctgcagtgagccaaagtcgcaccactgcactctggccggggcgacagagtaagactctgtcttaaaaaaaaaaaaaaaaaaaaaaaaactcttggattacaatccaaagaataaaataaatatccatgagtccatactgataaaaatgaatcagtaaataaataaatgagggagaaggaacaaatcttccttacagaactcaagtataacatatgtagatataccccctgtagaaagtagagctgaattctcctccccttgaatgtaggctggacttagttacccgcatccaaagaatagagaagaatagagtacagaaaaggtaaaagatagtaacctaattgtggagaagctcagatgacatcactgtgaccaactgatcaagggtaacatcatcagcaatatgtcatgttcctatcatgaacccccggtatgatgtgataagaaaggcatttcattcacctctgttatgttattccccacagtctaatcatgagaaaacctcaaactaacccaatttgaggaatattcttttcttttcttttcttttttttttttttttttgagagggagtctcactctgtcacccaggctggagtgcagtggtgcaatctcggctcactgcaacctccacctcctggttcaatcaattctcttgccttagcctcctgagtagctaagattacaggtatgcaccaccacacctggctaatttttgtatttctagtacagatggggtttcaccatgttggccaggctggtctcgaactcctgaccttgtaattcgcccgccttggcctcccaaagtgctggggttataggcatgagccactgtgcctggctaatttgagggatattctacaaatacttggccagtactcttcaaaagtttcaagatcataccaggcacagtggctcatgcctgcaatcctagcactcggggaggctgagacaggcagatcttgaggccaagagtttgagaccagcctggccaacgtgctgaaaccccatctctactaaaaacacaaaaattagccgggagtggtggcacacacttgtagtcccagctactaagaaggctgaggcatgagaatcacttgaacccaggaggcggaggttgcggtagacaagattgcgtcactgcactccagcttgggcaacagagccaggccctgtcgcaaaaaaaaaaaaaaaaaaaaaaaagctttaagatcatgaaaaagaaagaaagaccaacaaatcatcacagattgggggagatcatgatgatgtgatgatgaaattcaatatggtatccttgattagatcctggactagtaaaaggacattcatggaagacctggtgaaatccaaataaagtctgtcatttagttaatagtattattccaatgttaatttcttagttaatagtattattccaatgttaatttcttagttttgacaaatgttccatggttatgttaacattagggaggctgggtgaagggtatacaggaactctgtactatttttgcaacttttctgtaaacctaacattatcccccccaaaaaaaaattttttttaaatttttatttatttttattttttgagacagggtctggctctgtcccccaggctagagtgctgtggtgcaatctcggctcactgcaacctctgcctcctgggttcaagcaactctcctgactcagcctcccgagtagctgggattatagacgtgcaccaccacgtcaggctaattttttgtatttttagtagagatggggtttcaccatgttgcccaggctggtctcgaactcttgagctcaagtgatccgcccacctcagcctcccaaagtgctgggattacagacatgagccaccgtgcctggccaacaaaaaatttttaacatatcattgatgtttatagttctagacagaaaaatatttctggtactaacacactaggaatgtcccaatgctgaaaagcccttcggtcaaactcatctctagacctgagatgattctagcaggccaatcaggactaccaccaacaatctctgccctagtcacgtccctaatctagcttcataataaactggaaattatacagcagagccaacagaatctctttccatatgccaatatccccttccccaaagcagtactaaggaaaggtaaaaataaaatttcaagtttttttttttttttgagacggaatctcctctgtcgcccgggctagagtgtagtggtgggatctctgctcactgcaacctctgcctcccgggctagagtgtagtggtgggatctctgctcactgcaacctctgcctcccgggttcaagcgattatcctgcttcagcctcctaagtagctgggattacaggggtgcaccaccatgcccgactaattttgtattttttgtagagaccgggtttcgccatgttggccaggctagtctcaaactcctgacctcaggtgatccatccgcctcggcctcccaaagtgccccaaagtgttgtaatcccaacaagcaagagccaccatgcctagccaagtttcaagaattctcacgaatactcccaaatttggaaagaagcaaactgagggagttggtaggcaacctcaaaaaatctctcgaaagtagtaagtactcctacttactactgcaggagctcagcaaaggaatgaagagttggtagggctattttctaatgtctccaggctcagtttgggaaatgagaagcagcccgtaagagtggaatatacctgggacttgttggaatgggatttggtataggacattcaatgggatctcagatgaaaggacagattccaggtcccccagcaaggactgtgtcagccccagtatgtcattagtttttgccagtggaagcaatttatgctacagttagggtaggattaagaggtaatgggttttctccaccttttctttgctcatctgctggctcgatggagaagactccttggtcctacaggatggtatagccataaaatgaaaggagtcgcagcctaccaatcaccagatgaaaggctwtctgctgatcaggaaaacctacatttggctgcatcagtcaatcagcggtgaacagatctgaaacatgtagttttaaaactccaaatctgcttgcagaggtggcatcctgtaacttcttaggggacaagtgagaaaaaaacccaaaaaactccaaaacacaatgattccaacctcttaatgttattcattgttttaaaaaacttaaagtaaatttcaagagccagaagctcttgtattaaaatacctaaattttagtcatttctttcatactatttattttttgtgtattccagctcttttttatactgctgaatttttttttttttttttgagacaagagtctcactccgttgcccagactggagtgcagtggcgtgatctcggctcactgcaacctccacctcctggattcaagcaattctctgcctcagcctcccgagtggctaggattgcaggtgcccaccaccatcccagctaatttttgtatttttagtagagatggggtttcaacatcttggccaggctggttttgaactcatgaccttgtgatccacccaccttggcctcccaaagtgctgggattagaggtgtgagccactgcactcggccactgctgaaatttttaaacatcttttttttttttttttttttttaatacaaacacggtctcacatacttgaactcctgtatgtaagcaatcctcctgctttggcctcccaaagcgctgggattataggcatgaaccaccacgcccagcctattactgaaattttaatgatgatgacaacctcatgacaatcccaaagtactagtatatccattttactgatgagaaaagcacagctaatatgcagtaaatctagtttctgaattcaggcattcttattccagagcccatgctattaattcctatactatactgtctctatataagcatgtagcatattaatctttttaaggggggagtattagcagagccacatggaagcagtagctgctaatgtgtaaagtgacaaggccaggggcaaacctgaaaaatctactggcagccacaaaagctttatacgagacattcaagtagcttaatatttatcaggcatatcctttcttttctttttttcttttttttttttttgagacagggtctcactctgtggcccaggctggagtgcagtggtgcaatcacagctcacggcagccttgacctccctggctcaagcaattctcccacctacctcagcctcccaagcagatgggaccacaggcacatgtcaccacacctggctatattacacatatctgatgtcagcttatctaaagcaaaactgcacaggagaatcttaacaatctggttattaacatttcagagaaagagggaagagtaaaataggaacaatcacacatatgcgttaccagtatgtcctagaggaaacaataccttgggataaaaagcatacactggtttaatttcaggagaatcgtttccagaaaacatttataatttagagaaatgtatgtgtatgttttaaactaacacagaattagctctaagacaatttgccaaagagccatttgttttaaattcagaagaactgctgaatatttagtggaaggtatgctaaactgacatctgctacaactctaatataattttaaatttcacattcattaatgactaagacaatgtctctgtaaattaatcctgcttagctagtctgaatatggtattcttattcacataaacgtccaagatagtggttgcagcaacatatggcatcccatgcattaaatacattaaaattctcaggaaaagcacaatttttaaagtacaggaatctgttactaaggaaaagggggaggactgggaggaaatgacacatactttctcatgcagtgtgagattatgctgcaggttccagatataacattcaaagcatctttttaaaaacaaaaacattttcctcaataacatcctgagatgtccagttttgcatgtaaatcttgcatccaaacgtcaccctttacggtaattccacaaatgcccagaatctttcaacaagaacaattaactgcctttttcctttccagaacaaccagctggttaaccaaacagagaaaccaaatttccctaagtcaccagatgtcttaatttggaacagttagaagcaattcggaataatctaattcttgaattggtactacatgtttactatttcttcattttctaattttgaaaagacgcttttaagaattaagcaaatgctatctttaataactgcaaaaaaaatgaggaaaaacaaaaagaaccatatcctgttacagaatgatgttaacattatctaagagccagctacttaaatcttggatacattatagttagaaactgataagctctaacaacattaaatctgctctaaagttcttaagaattaccctactcaagaattcaaaaacagccgggcccagtggctcatgcctgtagtcccagcactttggcaggccgaggcaggcagatcatgaggacaggagttcaagaccagcctggccaacatggcgaaacctgtccctactaaaaatacaaaaattagccaggtgtggtagtgtgtgtctgtactcccagctactcaggcggctgaggcaggagaatcacttgaacctcagaggcagaggttgcagtgagctgagatggtgccactgcactccagccttggcgacagagcaagaccctgtctttaaaaaaaaaaaaaaaaagaatacaaaaacaattcttggccaggtgcagtggctcacacctataatgctagcactttgggagcctgaggagggtggattgtttgagcccaggagtttgagaccagcttaggcaacatggctaaactccgtctctacaaaatttagctaatttttgtattttagagctaaatgtacagggcgtggtggcctggtggtagtctcagctacttgagatgctgaggcgggagaagcacctgagcccagggaggttgcagctgcaagttgagctgtgattgcgccactgcactcccgcctgggtgacagtgagactctgtctcaataccaaaaccaaaccaaagaaaaaaaacaattctggaaaggttatgacatgacaggcctagaacataacaaattcagcaaagaacagtcatgaagtccctttcttcatgcaggacaggatagaaggagataggtggaaatacagcccaataactaattataataataaaaatagtgaggagtgttataaaaaataacaacatagggtaaggcaagaaaaatgaggcaggaaaagccatttctattcaatcattaaaggaaacttcccccatgaggtgacatttgagctgagaccaggacaaaatgagggaggcaagggagtggattacatggagcaagagctgcctaggcagagagaaacaacaagtaggccagtgcagctaaagtcagagaaagaaagaagggtgtagaaaatgaggctaaagaggtaactggagccagaggagagctccatcggtcatggtaagaactttgaattttattctcaagtgagaaagaaagccactgtaggctgagagcaggtaagagacactgagaatgggttccttgggctgctgcctggagaacagactaaagggcaagagtataagtagttagtttagaggtttgtgcaaagttctgagaaagagttctaacagaagtggctggatgtaggtcacaaatatgaaagaattttctggtaaaactgcaagtggtgtgagagaagggcagtcaaaaatgattcttgtctcaaaaaaaaaaagattcctaggtttctggcttaagcagcaaggtaaatatgttgttggtatattattaatactttaattacaagcttttttttttttttttttttgagacagagttttgctcttgttgcccaggctggagcacaatggcgcgatctcggctcactacaacctccacctcccaggtacaagcgattctgtctcaagcctcccaaggagctcggattacaggcatgcaccaccatgtctggctatatattttttgtatttagtagagatggggtttcaccatgttagtcaggctggttgcaaactcctgacctcaggtgatctaccaacctcagcctcccaaagtgctgggattatgggaatgcgccactgtgcctggcctaattacaagcttttaagataagatgattaactggacaatttgataattatccagttgcttatacaggccttactgataaactgkggtatgttaatacaatagaattctctttttttgttgtttttttgagaccaagttttgcattgtaacccaggctgcagtgcagtggaatgatctcggctcactgtaacctcccaggttcaagcgatactcctgcctcagcctcacaaactgctggagttacaggcacccaccaccacgcccagctaatttttgtagttttagtcgagacgaggtttcactatgttggccaggctggtctcaaacccctggcatcaagtgatccgcccacttcggcctcccaaaatgctggtattgcaggcatgagccactgcgcctggcctagaattctacatagcaataaaaaacatgcaactggtacatgcaacaatgtggatgaatctcagaattggttagatgcctgacacaaaaaggtactacaggatttcatttatacaaagttttaaaaaaggcaaaacaaatctataatggtagaagtaagaatactacttattttggggggagatagaaactgagaaacagaacaagaattctaggtggtgattatgctcagatgcatacatttaaaaataaaaccatggtgctcgcttctgcagcatatatactaaaattggtacgatacagattagcatgacccctgcacaagaatgacataccagtttgtgaaacattccatatttttagaggggtgtgtgtgtgtgttagagagagacagggtctcactctctgtcacccaggctggagtacaatggcacaatcttgcctcactacaatgtcagcatcccaggatcaaatgatcctctggcctcagcctaccaagtagctgagactacaggtatgtgccaccatgcctggctaatttttgtatttctataagagatggggttttgccatgttgcccaggctggtctcaaactcctggactcaagcaatctgcctgcctcagcctcccaaagtgctgggattataagcaggaggcagtgtgcctggcttgtaggcgtattttaacaaagaagaacattcagacaacaggaaagaattcttggaaattaagaataagaaagcagaaatacaaaatacacagaagagctaaaagatatggttaaggaatactcccaactaaagtagaagaagaaagagaaagaatgaaatcagaggattgatcaatcaatctaagtcaaacatcctaaaaatgaaaagtccagaaagaaaaatagaaaagaaaaaaacaaacaaacaaacaaaaaaaacctgagtcttcagcaaaaaggatagcaaaagaaagccataccaagccacattatcttgaaatgtcataatgctggggataaaggaaagattctacaagtgtccacggagaaaaggggtctcataaaaaatctgaagaatcttaacggcatcagacttctcaatagcaaccctcggggaaaaaaggaataatgccttgaaaattctgagtcaaaattatccctaacctggagtctttttagccagtcaagttaacaatgaaatgtgggtctaggtcaagttaacaatgaaatgtgggtctagaacagagatattttatgtgtgcgtatttttaaaaatcatggagcgaatgcctccctacttctgccaagccttacgctgtggaaagagcaccaacggtcggcaggtggtggggaagagcatggagagaaacctcctgttggggcctgctgggactgagtggagcagcaacaaggagaaaactctccagcatcccaggcctgacgctaagcacaagatagtaacagctcatagctgaaggaatttgaagtttttggtatataaatgttaactatagtaacaccaaaacccaaaccaggctagactgttcaagccccaacactcacagtctgatagaagcacaggtatccatttccaaggctaaatgctatttagcttagtctctactattcttctatacatgatgtacagaatgcaattttaaagagacagagaaataccaacaagttatcaagaaatgaggcaaaaaacagaaaaaaacccagagaacactcagatatatactatacacctactaatagtgtaagtacacactcccactgcttcacttgacaaggcttaaaagcaaacaaaaaaactaaaataattatgaattggttatttttaagcacccctcaaaacagaagacaacaagtattggcaaaaatgtaaagaaactatagtacagccaaaatggaaaccagtatgaaggttcctaaaaaaattaaaaataggctgggcaccgtggcttacggctgtattcccagcactctgggaggccaaggcaggaggatcacttgaggtcaggagtttgagatcagcctggccaacatagtgaaaccccatctctagtgaaaatacaaaaattagctggacatggtagcacgtgcctataatccaagctactcaggaagctgaggcaggagaatcacttgaacctgggaggcggagcttgcagtgagccaagatcgtgccactgcactccaggctgggtgacagagcgagactccatctcaaaaaaaaaaaaaaaaaaaagaaaaagaagaaatcagtatgtcaaagagatatctgtactcccaggttcactgcagcattttttcacaacagctaagatatagaatcaatctaagtgttcatcagttgatgaataaagaaaatgtggtataaaaatacaaaaattagccgagcgtggtggtgtgcacctgtcatcccagctactcgggtacacatttgtgtacatacacaatagaatactacctcagccttaaaaaagaacaaaatcctgtcatttgtgaaacagggataaatttgcaggacattatattataaactaaagccagatatagaaagccaaataccacatgatctcatctagatgtgtgtatatatacaaacgtacatatctatatgtgaaatctaaaacagtcaaacccatggaagcagacagtagataggtagttaatcagggctggggaggagggagaatcagggagatgtcgatcaaagggtataaaatttcacttggaaagaggagtaagttcaagagctctactgtataatatggtgactacagttagtaacaatgtactgtacatttgaaaattgctaagagggggcaggcacagtggctcatgcctgtaatctcaacactttgggaggccaaggcaggcggactgcttgaagtcagaagtttgagaccaacctggccaatatggtgaagccccatctctactaaaaataaaaaataaaaataaaaaaattagctgggcatggtggcaagtacctgtagtctcagctactcaggaggctaaggcatgaaaattacttgaacctgggaggtggaggttgcagtgagctgagactgtgccactgcactccagcctgggtgacacagcgagactccatctcaaaaaaaaaaaaaaaaattgccaagagttgctaggagagtagattttcaatgttctcaccacacccaaaaaaatgtatgtaaggcagtgggtatgttaattggcttgatctagtcattccgcaatgtatacacatatcaaaacatcttgctgtactccataaatatatacaacttttatttgttaattaaaaaatacatttttttaaaaagaatgtgaagaaactggaacccttctatattgctggtgggaatgtaaaatgtagcagcctctgtggaaaacactttggcagtttctcataaagctaaacatatgttcgtgcaaaaaaacttatacataaatttcatagtagcattattattattggagacagagtctcactctgttgcccaggctggggtgcagtggcacaatctcgcaatctcggctggctacaacctctgccttttgcagcactttgggaggctgaggcaggtggatcacctgaggtcaggagttcgagaccagcctgaccaacatggtgaaaccccatctctactaaaaatacataaattagctgggtatggtggcaggcacctgtaatcccagctactagggaggctaaagcaggagaatcgcctgaacccaggaggtgtaggttgcagtgagatgagatcacacgattgcactgcagcctgagtggcagagcaagactctgtctcaaaaaaaaagaattactacagtcttcgcatcaaaaactatgcaagccagaggacaaaggaatgataattttaaacaccaaaaggacagaaaaacctaccaacacaaagctctgtacccagcaaaaatgccttctgaaaaagagtataaaagaaagactatcagtctggtccaaaggcagtgagttatcccaactgattgctcacagtcagttacaggtcaaactccctgttccactcttcccctcttctcactactgcacttgactagtcttcaaaaagacaaacaagaaatacgatcagaaaaacacaaactgagaagattcactgccagcaaaactgttgctgttaaactgttattcaggcagaaacagtatgataacaaattgaaatccggattgacataaagaaataaagagcactgggaatggtaaacatgagggtaaatataagacattttttccttttaaatttttccttgaaagataattgctgtctaaagtaaaaactagtaataacaaaccaagggatttatgacaggtcaaagtaaagtgcaccagtcagatgcggtggctcatgcctgtaatcccagcactttggaaggccgaggtgggtggatcacctgaggtcaggagttcaagactagcctggccaacaaggtgaaaccacgtctctactaaaaatacaaaaaaagtagccaggcagccgggcgtggtggctcatgcctgtaatcccaggactttgggaggctgaggcgggtggatcacctgaggtcaggagttcgagaccagccaggccaacatggtgaaagcccttctctacaaaaatacaaaaaaattaactgggcgtggtggcacatgcctataatcccagctacttgggaggctgagacaggagaatcgcttgaacccagggggtggaggttgcagtgagccgagaccatgccattgcactccagcctgggcaacagarcgagacttcatctcaaaaaaacaaacaatcaaacaaacaaaaaaaccaaaagtagccaggcatggtggcaggtgcctgtaatcccagctactcgggaggctgaggcacaagaattgcttgaacctgggaggcagaggctgcagtgagctgagattagctcacagcactccaccctgggcaacagatcaagactccatctctaaataaataagtaaataaataaaatgcatgacaataatagtgacaggatgagaggagggaagtggaaggataatgttgtacaattcttacaccataaaatggtatcacattattcgaagctagattttaacaagtcaaaaaggatataatgggccaggcacagtggctcacgctgtaatcccagcactttgggtggccaaggtgggtgggtcacttcgacctaggagttcgagaccagctgggcaaaatggcaaaactccatctctacaaaaaatataaaaattagccaggcacagtggcaggtgcctgtagtcccagctactcaggagcttaggtgggaggataacttgagcgtgggagacagaggttgcagtgaacccagatcgccctattgcactccagtctgggtgacacagaaaaaccaggtctcaaaaaaaaaaaaaaaaaaaatgcatatagtaaaccctagactaaccacttcaaacaaacaaacacacaaaatattaaacagtaaattcacaaaccaaaaccaatcatagagaaaaagtacccaatcaaaaagaaaaagatgaaaaaagaaataaagaactgatgagaaaaacagaaaatataaaaacaactggtaagaaggtagatttaaatccaactatacctggccgggcatggtggttcacgcctgtaatcccagcactttgggaggctgaggtgggtggatcacttgaggtcaggagtccaagaccagcctggccaacgtggtgaaaccctgtctccactaaaattacaaaaattagccgagtgtggtggcatgtgcctgtcatctcagctacttgggaggttggggcaggagaatctcttgaacccaggaggcggaggttgcagtgagctgagctcacaccactgcactccagcctgggagacagagtgagactctktctcaaaaaaaaaaaaaaaaaaaaaaaaaaaatccaaccacaccaacaattacattaaataaaaataatatgacaccttatttaaaagacagagattgtcaggatgggggtggtggggagagagaagcaagacccaactatatgctatctgaaagaaacccattttaaacataaagccatagataggttaaaaggaaatggatagaaaaaagatataccatgcaaatattaataaaaagaaagctgcaatgttttactaatatgagacaaatgagaagtcagaacagagaatattaactcaaaatggatcatagacctaaatgtaaaagcaagaactacaaaacttataagagaaaaaagggaatctatgacctttggttaggcaaagatctcttaaaacacaaaaagtacaaaccacaaaagaaaattttgacttaattaaaatgtaaaacctgcttttgaacagtcaagaaaatgcaaactacaggccaagcatggtggctcacgcctataatcccagcactttgggaggcctgggaggtggatggcttgagtccaggagttcaagatcagcctgggtgacatggcaaaaccccatctccatcaaaaatacaaaaattagccaggcatggtggcgcatgcctatagtcccagctactcaggaggctgagatgaagaggtcactttagcccgggaggtggagcttgtagtgagccgagattgcatcactgccacttcagcctgggtcacagagtgagaccctgtcaaaaaaaaaaaaaccacaacaaaacaaaaaacaaaaagaaatatttaaaaaaaaaaaaagaaaatgccaactacagactgggagaccatatttgcaaatcaccatctgataaagttgctatatccagaatatataaagaattcttgcaaccaaattataagacaaataattcaattaaaacatgggaaaatatttgaacagacacttcaccaaagaagatatatgaatgacaaataagcacgaggagcccaataatattagtcatcagggatatgcaaattatattaataattacctattattacacatttgctaaaatgcctacaattaaaaagaactaacaataccaagttctggcaaaaatgcaaaagcaacaggaactttcatacactgatggtaaaatgttacagccactttggaaactggtttggcagtttgtttaaaagttaaatacatacttacccagcaagcccacttttaggtatttactcaagagaaatgacaacttatgtccgtacaaacacctgtacacgtgttcatcactattttatttataatagccaaatacctagaaaaaaacagaaatacgggtaagcttaagcacaaaaaaataaacaacaaagactctccctccccgagaaatatctgtcatctgctgaagggaaaaacaaattgtggcatacatatataatggaatctgactctgcaagaaaaaaggaactagagatatatgtaacataaaagcgtatatattgtatgattccatttaaataacattctggaaaaagcaaaattataggaactggttgttaggggctgaggttgtggggaggccattgattattaaggggcacaaggaaactttttgggtgatgaaaatattctgtatcttaatcagggtgctggttacacaactgtgtattcatcaaactacatacttacaattcatcaaactacatacttacatgtcaattcatcaaactacatacttacaaagtttaaaaaggtaaattttatggaatgtaaattacactttaacaaacctgatctcccatgcccaaaggcaaacaaaacataaaaagtcataggcaaaactaatgtatgatgatggaaattagaatggtggttatctttagtgggaatgactgggaaggggcatccaagaggtttcttgggtgctggtaccgatttgagtgttggtggcacagatgtcttctgtttgtaaaagttcactgagctctaccctagatttgtagaccttacagtagttatattttaataaataagtacaaataaataattagtgctattttaactgctcattgtagaaaatgtggaaaatcacattttaaacacaaagaagcaaaacatacaattttggagtagaagaggactttttttttttttttgagacagtctagctctgtcaccaggctcgagagcagcagcgtgatctcagctcactgcaacctctgcctcccgggttcaagcgattctccttcctcagcctcccaagtagctgggattacaggcatgcactgccacacccagctaatttttgtatctttagtagagatggggtttcaccatgttggccaggatggtctcaatctcctgacctcgtgatccgcccaccttggcctcccaaagtgctaggatcacaggtgtgagccaccacacccacccatgaaggtaaaaagtgagagacctgattagacaaaaacataactaaaataaggtaaaacgtattaaaaatatagttaaaattgaaattggaagaaaattttcataacacactatcaaaggttaatacccttactatgcaagaaatttatccaaacaaaaaataatagctaaaagaagcagtaagtcataaaagggaaaattctaatgaacaagaaacgtaaaaagatgttcaacctcagccgggcgtggtgcctaatgcctgtaatcccagcgctttgggaggccaaggtgggcagaacacgatcacatgagctcaagagtttgagaccagcctggccaacatggcaaaatcccatctctactaaaaatacaaaaatgagctaggtgtggtggtgcacgcctgtaatcccagctgcttaggaggctgagaggcatgaaaatggcttgagcccgggaggcagaggttgcagtgagccaagatcacaccactgcattccagcctgggctacagagtgagactgtctcaaaaaaaaaaaaaaaaaaaaaaaaaaaaaaaaaagttccgtcttactaacagttgaggaaataagatgcattttcacctatcaggttggcaaaaattaaaaacactgataacatcaaggctgatggggtgtcaggaaatgggcatctgtaaacattctaggttgggcacagtggctcacacctgtaatcccagcactttgggaggccaaggcaggaggatcactttgagaccaggagtctgagaccagcctgggtatcacaaagagaacccgtccttacaaaaaaaatacaaaaattagctcrgtgtaatggcgtatacctgtagtcccagccacccaagaaactgaggtcagaggatcacttgaggctaggagttccaggctgcagtgagcaatgactgtgtcaacgcactctagcttaggtgacagaataagactttgtctctaaacacacacacacacacacacacacacwytcwctctctctctctctctctctctctctcctctctaaatgttaaactttttgacaagtattctggtactatataataaaactagaagtatgtgtctccttgaatccaacaatctcccataagcatctatccaaaattaaatatatgcgtatgtaaggaaggatatttattaaagaattgtaataacaaaaaaacctaacagcctgaatatccattaattgggaagtggtcaaattagagtattgccacataaaacaacattaagtagcttttataaaaaaattaaagtccatagtttaccttagggttcactttttgttttgtacagttctataggttttgacaaatacatgtaatgaatccatcattatataactgtttcaccaccctaaaaatcctgtgttctgcctattcatccctctgctcatcctgaacctttatcaaccatttatctttttactctctctctagttttgccttttccagaatgtcaaatggttagaatcataaagcaagtggctttttctggtttccttcacgaaggaataaacacatggagttcctctatgtctttcagtgtcttaaaagctcatttcttcttataagtgagtatcactgaattaaatttcactgtatgaaaaaaaaaaaattyagctgggtatggtggtacatgcctgcagtcccagctaccagaaaggtgaggtaggaggatcgcttgagcccaggaggtcgagtagagaaagttatttcaatacttgactggaaattttagtaacttttttgattaaatttctctaataggctgagcacagtggctcacgcctgtaagcccagcaccttgggaggctgaagtgggaggctcccttgagcccaggagtttgagaccaggccaggcaacatagcgagattccattctctacaaaaagtttaaaaatcagccgaacgtggtggtgtgcacctgcaatctcagctacttgggggagctgaagagggaggattgcttaagcctgggaggtcgaggctatgcgatcaatcaggtgaaccatgatcactccagtccaggcaacagagcaagaccttgtctcaaaaaaaatctaaaatagtttaaaaacttagtttcttttttagaatttataactgtactcataaaatatctgatgagaattttcgctgaccaaagaaatgctgtaattttgttctaacagttttactgagttgactgttattcttaggctgcaacattcattcatcatttcaactcagctataaagaaatatataacaagaaaattggcaagctctatgaagaaaaataaaccagaatttaaggtatgtaacgtgatgataatagatgagatggggtcaagatcttttagataagatggctaggacagaccctagagatgtaacatttggggagacaacctaatttaaaaagtgagcaatgcaaatctctggagaagtagctgtgatcctagcaatttgatgtcaaccttaagaaaaagaaaaaaataataataaaggccactggccgggtgcggtggctcacgcctgtgatcccaacactttgggaggccaaggcaggactgcctcagcctaggagtttgagaccagcctgggcaacatggtgaaaccctatccctatcaaaagtacaaaaaattagccaggcatggtgacgtgcatgcctgtggtcccagcaacttgggaggctaaggtgggaggattgcttgagtctgggggcacctatactccagcagcctgggtgacaatgtgagaccctgtctcaaaaaaaaaacaaaaaacaaaaaacgatgtttgcctgtagtaaggactttacacaaactcttattagtcaaagtttgaaataccaactctccatccctggtgatgtcctaaaatgttcttcccttcatcactttcttgggttgccttctccttgaatcccactgcaacccaagcttagtagaatgtttaataattaaacatcagtgttaggcactcttctaggtgctagagggacagtgataactagaacttgattctgccctcaaagcattagtggatttaagcagaacatttgtccctttccattttcaaatattaattttgcatataccagatcaagtctttagtataatcacttccagatctttaactccaaacttcatctctttattctctttctgaagctcttgtattcttaaatgcttgctacatgtgctgccagaacttaaaattcagattatccaaaatttacttcattagtttctctcttcaacccatgctcccaatttccatgaatgatagcaaagtctgacaatcagtggttcttcctttctccctcaggaacagtttactttcttgacttagcgttcaggatcttccacagtccacaatgtctgttactcatgtctggtcactgaacattttcatatgctgactatgaggacagacaagcatgaaaagtactggaagcaagggaagaagagaaagtttagtattgctgatcataatgtgtgatgttggatgggaaaggagacgacattgaagcaagcagcagggcaggtcttagagttgtctatcttgtatacccaactaaaacgtcaaactttattttttttatttcttctcacagaaccaattcggtaagaaaggagttagaacattcagtgtgttacagggaatgactaaagcagtatcttatttttacctacagcagctacgttaaactatttgaataaataaatgaattggaaggggtcggtagcaaaaatattacatattcagagtcataaacacatttttttttcttgagatggagtctcgccttgtcacccaggctggagtgcaatggcgtgatcttggctcactgcaactgctgcctcccaggttcaagcgattttcctgtctcaacctcccaagtagctgggactataggcatatgccaccatgcccggctaatttttgtatttttggtagagacggggtttccccatgttggccaggctggtctcgaactcctgacatcaggtggtccacctgcctcggcctcccaaagtgctgggattacaggcgtgagccactgcacccaacccagagtcacatattaaattgctcacatttacaatgtagaagatggatttaaatagggagaggtaaggctgaaggttgggagaccatagaggccattaaaaagtccagacaaggggctgggcgcggtagctcacgcctgtaatcacagcactttgggaggccaaggcgggaggatcacctgaggtcaggagttcgagaccagcctggccaacatggtgaaaccccgtctctactaaaaattacaaaaattagccgggatggtggcccacgcctgtaatcccaactactcgggacgctgaggcaggagaattgcttgagcccaggaggtggaggttgcagtgagccaagattgtgtcattgcactccagcctggccgacagggcgagactctktctcacaaaaaaaaaaaaaagtccagacaaggatacggagtgcttgctttggcagcacacatactaaaatcagaaggccacagagatgagcatggcccttgcacacggatgacatgaaaattcatgaagtattccatatttttaaatgtattgtcctttttttttttttttgtgagacacagtcttgcactgttgtccaggatgcagtgtagtggcacaaacacagctcattgcagtctcaatcctcccaccccagcctcctgagtacctgggactacaggtgatgccaccatgccccagctaattttttaatattttttttgtagacacaaggtctcactatgttgccagacctggtcttaaaaaatcctctggccttagcctcccaagtgctgggattataggtgggaaccactgggcccagcctgtactgtctatttcaaaatagataggagaggactgttgcatgttctcaccacaaagtgatcaacatgtgagatgacggagacactaattaacttgatttgatcattacacgaagtatacgtatatcaaaacatcacactatatcccagaaatatgtacattatgtgtcaactaaaaatcaaactaaaagagataatggagttcccaacagtaggaatggagaaaaaaggcgaatttgagaaatatttttcttttctttctttttgcttctattcactgtgaatactgtattatagtttgactatttatttatttatttgcacagagtcttaactctgtggcccaggctggagtgcagtggtgcaactgccactcactgcaggctcaatctcccaggctcaagcaatcgtgccacctcagccttccaagtagctgaaaatacaggtgcacacaaccacgcctggccaattaaaaaaaaaaatttttttttaatttttagtagagatgaggtcttgctatgttgctcaggctgttcctgaactcctgagctcaagtgattctcttgcctcaacctcccagtctcttgtacctgggattacaaatgtgagccaccacacctggccagagaaatattcagcaagttaacattagtgaagcttggcactgactcgatttggaagcacgggggaggaacaggtgcagaaggaatccaggctgattcttgcattggatgaccaagcggagttgagtcagaaagtaaatccaggccaggtgcggtggttcacgcctgtaatcccagcactttgggaggcctaggcaggcagatcacctgaggccaggagtttgagaccagcctggccaacctggcgaaaacccgtctctactaaaaacagaaaaattagccgggcgtgatgggacacgcctgtaatcccagctacttgggaggctaagacaggagaattgcttgaacctgggaggtgaaggctgcagtgagccgacagtgcaccactgcactccagcctgagcaacagagggagactctgcctcaaaaaaacaaacaaacaaaaaaaaaactaaaaacaaaaaaaagtaaatccaaaaatcaagaaaatggggggaaaaaaaacaaagaaatgcccttagttttactcatataagcctgagggacttctggggatggccaaggacaaacatttgtatacatcagtctacaactcagagggaaagtacgggattctgttatcagactataggaagtagcagcacttaaaaactaggaaagtaggccgggcgtgatggctcctgccccttatcccagcaccttgggaggctgaggtggatggatcatctgaggccaggagttcaagaccagcctggccaacatggtgaaacccgtctctacttaaaaaaatacaaaaattagccaggcatggtggcgcaaacctgtagtctcagctactagggaggctaaggcacgagaatcaattgaacccgggaggtggaggttgcagtgagccgtgatcacaccactgcactccagcatggatgatagagcaagactccgtctcaaacaaacaaaaacccaaactaggaaactggatgaattatacagatgaattatacagaatgatagcagatgaattatacagaatgatggcaagcagcaggccaagcaccctataatagagaaaaatgaaaaaagaatgggaagaaaaccagaaaagtagccaaatgacagctaatattaactgatcattaccattctcggttaccatgtcagcctctgcacatgaattgcttcaatgaaccctcccaataatcctaaaagatagtccttttattacagtgttttagatgaggaagctgagacaggtattgcatgatagctgagaatgggtatagagtcagactgccagagcacaaatcctggctttactaactatatgtttcagtttcctgtagtttaaacaggagatagcaatatcaatgccatagggtttcataaattaattaccatgttaaatggtgcctggcacaaaagcagcactcatataccactaggtgggagtatagagaatgttaaagaaatgcaatatgtaatgtcaaatgataacctgcagaataaactagtatttgacaggatttccaccccttttatgtataaatatgtgtgtaagtatatatatatatttatgtatgtatatagactagatgcttctaaggtgaattcacaatacaaatgttcccctaaaaatgctaccctaattcatcaagcagaaagacactttaacatattaatgatttttaaaatttccactgttaattggtagatgaaataagattaagccagaatgaggcttttcctgacactggatagtttataatcatgtaaacatatctctcagacaataaagcaatattttataaatatttattgacagctacagactttgttttgcattttgaggttgattcactatttaattttccaaattaggagaccattcaaaaggactacgttgaaatagaaatcaaaacacatccctaaatgtaaatatttatagcttgtataatattcatgtaaagatatagcagaactagttcttttaaccactttggtgttataatgagggaagatcagaatctactaagttctaaactcatttcctctctactgaacacagtaaaagaccctgatatcagagaaataacaaacaaaaggcataattattgaactatccagaaaaaaacggatattaagaggataaaaagttcacatgtgctttgtagatcagatgtgaaggataaaaagaactgaaaatcaygtacggtcagttgcaacttcactaaacataagaattagacttaagctatcaaaccgttttaaaagtttccttcctggcccttggcattgattactactgccatctagcaggaggtccaaaaattaaaattacgagaactgtaaaaaatcatcaggacataattccaatctccaaatagaaagatgtttaccatattaataattacttaaatttcaggccgggcacagtggctcacacctataaacccaacactttgggaggccgaggcaggtgtatcacttcagtccaggagttcgagaccagcttggccaacatggcgaaaccctgtctctactaaaaacacaaaaactggccaggtgtggtggctcacacttgtaatcccagcactttgggagcccaaggcgggtggatcacctgatgtcaggagctcgttaccagcctgaccaacatggtgaaaccccttctctactaaaaatacaaaaattagctgggcctggtggtgggtgcctgtaatcccagctactctgagggatgagacagggagaactacttgaaccaggaggcagaggttgcagagagccaagatcgtgccactgcactccagcctgggcgacagagcgagactccctctcaaaaaaaaaaaaagagaagtgaagggagaaatattcagggaaatagatagcttaaagaaaaaacaaggctgagcacagtggctcacgcctgtaatcccaacactttcggaggctgaggcaggcagatcacctaagatcaggagtttgagaccagcctggtcaatatggtgaaaccccatctctactaaaaatacaaaattagccaggcatggtggcacatgcytataatcccagctacttgggaaggctgaggcaggagaatcgcttgaacccaggaggcggaggttgcggtgagccaagatcgcaccattgcactgcagtctgggcaacaaaagcgaaactacatctcaaaaaaaaaaaaaaaaaattagctgggcatggtggtgcgtgcctgtagtcccagctacttcgaaggctgaggcaggagaatcgcttgaacctagaggcagaggttgcagtgagctgagattgtgccactacactctgtctccaaaaaaaaaaaaaatggattcacagcagaattctaccagacattcaaagaattggtaccaatccttttgacactattccacaagataacaaaggaactctccctaattcattctatgaagccagcatcaccctaataccaaaaccaggaaaggacataaccaaaaaacaaaactatagaccaatatccttgatgaacataaatgctaagatccttaacaaaatactagctaactgaatccaacaacatatcaagaagataatcctccatgatcaagtaggtttcataccaggaatgcagggatggtttaacatacacaagtcaataaatgtgatgtaccacataaacagaattaacaacaaaaatcacatgatcatctcaatagatacagaaaaagcatttgacaaaatccagcatccctttatgattaaaactctcagcaaaatcagcatataagggacataccttaatgtaataaaaaccatctatgacaaaccacagccaacataatactgaatggggaaaagctgaaagcattccctctgagaactggaacaagacaaggatgcccactctcaccactcctcctcaatgtactactggaagtcctagccagaggaattagacaacagaaagaaataaagggcatccaaatcaataaagaggaagtcaaactgtcactgtttgctgaagacatggtcaattaccttgaaaactgtaaggactcctccagaaagctcctagaactgataaaagaatccagcaaaacttttggatacaagattaatgtacacaaatcagtagctcttctatacatcaacagcgaccaagcagagaatcaaatcaagaactcaaccccttttacaatagctgcaaaaacaaacaaacaaacaaaacttaggaatatacctaacaggctgggtagtggctcaagcctataatcccagcactttggaaggccggggcaggtggatcacttgaggtcaggagttcgagaccagcctggccaacatggtgaaaccccatctctatcaaaaatacaaaaaaatcagtcaggcgtggtagtgcacacctgtagtcccagctacttgggaggctcaggcaggagaactgctcaaactcgggaggtggaggttgcagtgagccagagcaaggctctatctcaaaaaagaaagaagaaaaaaagaatatacctaacaaaggagtcaaaagacctctacaaggaaaactacaaaacactgctgaaagaaatcatagacaacacaaatggaaacacatcccatgttcatggacgggtagaatcagtattgtgaaaatgaccatgctgccaaaagcaatgtgcaaattcaatgcaatccccatcaaaataccacgatcattcttcacagaactagaaaaaacaatcctaaaattcatatggaaccaaaaaggagcccgcatagccaaagcatgactaagcaaaaataacaaatctggaggcatcacactaactgatttcaaactataccataaggccatagtcaccaaaacakcatggtactggtataaaaataggcacacagaccaatggaacagaatagagaacccagaaataaacccaaatacttacagccaactgatcttcgacaaagcaaacaaaaacataaagtggggaaaggacacccttttcaacaaatggtgctgggataattggctagccacatggaggaaaaatgaaactggatcctcatctctcaccttatacaaaaataaactcaagatggattaaggacttaaacctaagacctgaaactaacaattctagaagacaacattggaaaaacccttctagacattggcttaggcaaggatttcatgaccaagaacccaaaagcaaatgcaataaaaacaaagataaatagctgggacataattaaactaaagagcttttgcacagcaaaaggaattgtcaacagagtcaatagacaacaacagagtgggagaaaatcttcacaatctatacatctgacaaaggactaatatccagcatctacaacgaactcaaatcagtaagaaaaaaaacaaacaagcccatcacaatgtgggctaaggacatgaagagacaattctcaaaagaagatatacaaatggccaacaaacctatgaaaaaatgctcaacatcactaatgatcagggaaatgcaaatcgaaaccacaatgtgataccaccacactcctgcaagaatggccataagtgaagaataaaaaaacaagagatgctggcgtggatgtggtaaacagggaacacttccgcactgctggtgggaatgtaaactagtgcaaccactatggaaaacagtgtggagattccttaaagaattaaaaagcagaactaacatttgatccagcaatcccactactgggttatctacccagaggaaaagtcattatttgaaaaagatacttgcacacgcatgtttatagcagcacaattcacaactgcataatcgtggaaccaatccaaatgcccatcaatcaacaagtggataaagacactgtggtgggtgtgtgtgtgtgtatatatatgtgtgtgtatatatatgtgtatatatataatggaatactacacagccataaaaagaaatgaattaacagcatttgccatgacctggatgagactggagactattattctaagtgaagtaactcaggaatagaaaaccaaacatcatatattctcactgatatgtgggagctaagctatgaggacacaaaggcataagaatgatacaatggactttggggacttggccgggggagggggggcaagggattaaaagactacaaatatggtgtagtgtatactactcaggtgatacgtgcaccaaaatctcacaaatcatcactaaagaacttactcatataaccaaataccacctgtaccccaataacttacggaaaaattttttttttttcaaaacagcctcgctctgttacccaggctggagtgcagtggcacgatcttggctcactgcaacctccgcctcccaggttcaagtgatcctcctgcttcagccccccagtagctgggactacaggcacgcaccatcatccccggctaatttttgtatttttagtagagacagggttttgccatgttagccaggctggtctcaaactcctgacctcaggtaatccacccgcctcggcctcccaaagtgctgggattacaggcatgagccaccgttcttggccaaaaagtaagttttaaaaaaaagtcactgcccccccaaaaaagaaaattacaagaagctacattagctgggcactgggttgcatgcccatagtcccagctaggaggcttacgtgggaacatcagttgagcccaagagtttgagtccaccataggcaacatagtgagaaccctatctctaaaaataaatttaaaagtaaaacaataatgaaactacagaataaacagtcttttctctagaacagcaatgcttaaatataattcaaaacagcatcaaccatgaacatataaaactgaatgcaaaagtcacataaaattttaaattataagattagaattcaaagaaattttactcttctaaagcattaattcaggctttgtttccaaatatcacaggaatattcatttacctttgctattaaagatattccagtggaaaaattggcgaagctccaacctgtggtgacttaggttattttcacagtaataagaaagtctaactcagcaaccatttactgtgaatttgtttttctcttatagtccctgtgagactttatgggataggatgttttactcttctttataccttcctgtggtaggctgaacactggccctcaaagatacaaaggtcttaattcctggaatctatgactgtttcattatatgacaaaagggactttacaaagtatgttgagatggagagagtatccttgtttatctgggggggtccttaatataatcacaaatgtcctcataagagaggcagagggagatgtgactacagatgagaaagtggtatgatgatagcatgatgtcctgtgcagaaaagagccacaagccaaggaagacaggcagccactacaagctgaaaaaggtaaggaaatggattttcttctcacagcctccagaaggaattgggcctgcaacactttgactttagtccagtgaaactgatttcatacttctgacctccagaactaaaagacaataaatgaggctgagcatggtggctcatgccagtaatgccagaactttgggaggccaaggtgggaggactgcttgagcccaggagtttgagacccacctgggcaacatagcgagacctcatctctaccaaaaaaaaaaaaaaaaaaaaggaagaggtgactctcttgagtacatctgcactcccctttcttaagtgtgtacttttcaccaaaggaaaaaaaaaaaagaaagaaacaaaggcagaaagaataaatgtgtgttattcgaagtcactaaatctgttgtaatttgttacagtagctatatgaacaaaatacacccttttgacagtttggcgataatctgtacataatctgccctaaaayattgaacagaattaacataaagaccattccagttcagatttatcaaaattctcttgtattttctaccaagtaaatgaaaatatcttaaacacatggaaatcactgaaaatgtagttctttaaagcacatagggaaaaagtaaaaaagcagtagcatcttcagtcgtatttgcagctcatagtgtcagttgcagaaaaagtagtcatgactttagtacaaaagtacaactcaaaaacttcacgggtttggcacagtggctcgtgtgtaatccctgccacttgggaggctgaggcaggaggatcacttgagctcagaagttcgaggctgcagtgagctaagactgtgccaccgcactcccgtctggaaaaacaccctgtatttacamagtgagagaaaagaacccaaaaagtagttacatgggcttgatcttacttttgctttacaatagctacaacaatctaaggtaagaatacaaaccaggtaagtaacatagctgcattcacaggaaagtattcctgaatactgaacaaggagataagcagtccatagacgtttcagaggatttctcacttaaatggtacttgactgcaagttaccactgttttactcggccataggttgcagtgcagtccaggctccacaagaaagaatttgaaaagcagaaacagtcacgtggctttcatcgstaacatattttgtatctattaaattatttaatcctcagaactctaagtagtcaagtttggtatttatttcaattatacaggtgaaaaagctgatgctgacttgtccagtcaaaggtcagtaactggtgcctactgcgatgtctttcctctagatcattttaccttggtaacaatcgattaattcacttctaggtgtgttttattgacttttttttttctcttttttgagacgttgtctcactctgtcgcccaggctggagtacagtagcacgatcttggctcactgcaacctctgcctcccgggttcaagcgattctcctgcctcagcctcccgagtagctgggactacaggcgcccgccacatttttgcattcgtagtagagacgggggtttcaccatgttgaccaggctggtctcgaactcctgacctcgtgatccgcccgcctcggcctcccaaagtgctgggattactggcgtgagccaccgcgcccaggcttttattgactttaaataatttcaaattaataaagaaaacggccgggcacggtggctcacgcctgtaatcccagcactttgggaggcagaggcgagtggatcacctgaagtcaggagttcgagaccggcctgaccagtatggtgaaatcccgtctctactaaaaatacaaaaattagccgggcgtggtgccaggcgcctataatcccggctactcgggaggctgaggctggagaatcgcttgaacccggggggcggaggttgcagtaagccgagatcgccccactgcactccagcctgcgcgacagcctgagactccatctcaaaaaaaaaaaaaaaaaagaaaaagaaaaagaaaaacaaaaaagaaaacaggagcaacattttacaaattataccatcttttaattttacatccatggaagctgaatgccacaatttgtcagagacaagctaaagaaaacacaagaatgagtaatgtctaacactgcttcgcgtgaaaatgagaacactcacagtacctacctctttagatagccatgtggtttaaatgatataatagaccagttgctggtatcataccacatcccatactacgggtcgtctcttcccaagtgaaaatctgctttctggcctacaaaaggattatactaaacccttttagtggtggggagagtatccgtggagaggaaagagcaggaggaaacaggtctttccctgaaaatgagcaagggcgtttggcttttattgaaaaacgccccagaggaagtactgggaactgcaccggcaacagcagcctgacccgcagaagtttctttggccagggccagcacaggtttgacctggtggctccgacggcggagcgagactgccaacacgtgcacactccgtccagacctcccacttccctccgcgctcccgcgatagctgtccagcaactctagctttctagactcaaccacggcgtcgccgctcgtcgagagggctgcccatcccggggacccgcccagcctggcccagcaaaatgtaccttagtagcctcaacctgtaccggagaaaacgcaggctgcgcggcggcttagagcggtcaagtggaaccccgcctcgacctctctgattgggtaatgcgcacaagaaaatcaagaggattggtcggctgcagagaggcggcccgtaacgcgacgcgaaagaagtggggcatagcggcccggggaattcttgctagcttccgattggacgaaagcagaacgcctgccccttcgtagacccagcgtacgtacaacgctcacaccaccacgccgtacgctgcgttagcggaagtttaatggccccattggtgggatgcgtggccaataaagggcaagaataaggcggattccgccttcctcgtggctgactggatgcatccgctggtactgatttacgtgagtttcagcatttagacgttccgagtttccaccgagccagagttgggtagagagttattaagatgactaggagactaatgcggggagaaataatttagtagttagactcaggccctgaaactaccactcgtgttcagaaagtctacgtaataccttattgttttcacgcgaagaaaccagcccttcaggccgggctgaatgtggtttagggattctctggctgtcattgggtgaaaaagcgatcagtttgaaggtagctccgcctgggctctagggaactctgggatttgtagtccggaactttcgagtcctgtagctttaaatgtggttgttgctactgagttctttcatgttgttaataacacccattgacatttattgtggtttgttggactttttatcctttcgtttatcagcagcattaaagacaacatttaagaaatgtgtaaacactgcatgtatgttcgtaaacaataaatgttagtgtttccaacaatttactgctgtgcctagctgtatactatatgttcatgcttactgtactaagtagatactaaaattatttgtttctaaaacttttgctgttacaacaaaacagtctgattttcatattagtgtccatttacgattatttgaaccctacatttagcaattatgtgtactgtgatggcataggtagcagctgcttacatgaatcaagtgttgttatgacatgaagcagaactggctgctatcttcacaggaaaatagggctatgcttaaaatgtcaagcaagaccaccatcaggaggaatacacattgtatattattaaagactgtattatagtgtctattttcagcctttattaaaacagttttaggacaggcttttcctgagtctatagaatcctgaactcttctgtgagctaatttagcggtatttcatttttgtgtctagcaaaagtaaaaccattaataaataccaaaaacttgctgagtagacttttcgctttcgaaaaattttaatatttttttcctattttacatgtaatacaaactttcgactgtagaagaaaaaaacatgatttcggatgtatgtaatacttctacacttctagattaaaattaagtacactttacagaattaaagctaagcaaaaactgcgttcattactgatgcttgtaattattgcatttttgtttaaaatatcgaattatttttgtcatttttgtatcttatttctaaatgattagagaaggtttcaggttgtttgtaaaggaaacattaccgatttagctctttgttttgttttgttttggagacagggtctcgctctgtcatccaggctggagtgcactggcaggaggtgggatcatggttcactgcagcctcgacgtcctgggctcaagtgagcctgccacctcagcctcctgaattgctgagactactggcacacgccaccaagcccagattttttttttttttttttttttttgagatggagtctcgctctgtcgcccaggctggagtgcagtggcgcgatctcagctcactacaacctccgcctcccgggttcaagagattctcctgcctcagcctcccaagtagctgggactacaggcacatgccaccatgcccggctaatcttttgtatttttagtagagacggggtttcactgtgttagccaggatggtctcaaactcctgagcttgtgatccacctgcctcggcctcccaaagtgctaggattacaggcgtgagccactgcgcccggccatattttttgtgtagacagagattcgctatgttgcccaggctggtctcgaactcctgagttcaaacgaggctcctgcctcggcttcccaaagtgctgggattacaagcttatgctcgtttttattcccaataaatgaagagcgaaattgggtgtaaatcatcgatatatttatccttgtaatattctatgtgatgtagtaggtgaaacatatggatgggtgaagatgactctggcaaaaatgcagaattatatttttaatgcttttcattagctagcattttaatggtattttccttttgcctcttattttaaatcagtagttcatttaacatgttaattaaatgtcatataactaagaataaacaccattaaaaactgaatcaaggctactgtggttagcgctgtttagctgaatgatagatcagctgagtgactaaactgtggccacatttggctgatttaaattctaagtgttctctcagcacttttggaagcttctaaaatgtttcatttgtttatttttgagacagagtctccctctgtcacccaggctggagtgcagtggcacaatctcggcttattgcaacctccacctcccaggttcaagcaattctcatgcttcagcctcccgaatagcagggattacaggcgcgtgccaccacacccagctaattttttctattttcagcagacactgggttttgctatgttggccaggctggtcttgagctcctggcctcaagagatccacctgtcttggcctcccaaagtgctgggattacaggtgtgaaccactgagccggccaaaatgttctattttaaagaaaaaaattattattttgagaatttaaaaaacatatttaaacaggcaccattactacctttaacagtgtgaacctgtgaatcatctttgtactctgttgggaaatagtttaagaagtgaactcaggctgggtatggtagtgcacacctgtaatcccagcagtttgggaggctgaaatgggaggattgcttcagcccaggagacagaggttacaatgaatcatcatctcaacactgcactccagcctggatgacagagtgagaccctgtctaaaacaaaactaaacaaaaaaaagaaccaagtaaactcaaagtgagatgaatgaaacgactcttgagatgcaggaagagaatattagaacccttatttgtatgtcctttttattctcaacatttttctttacatttctgtgtttttaaattttttacatataacaatataagcttttttaaaaatctttttttgtttgtttgttttttgttttgttttgagacagagtttcgctgttgttgccaaggctggagtgcagtggtgtgatctggctcaccacaacctctgcctcccggattcaagcgattctcctgcctcagcctccccagtagctgggattacaggcattcaccactatgcctggctaattgtattttgagtagagatggagtttctctatgttggtcaggctggtctcgaagtcccgatctcaggtgagccaccatgcctggccctttttttttttctttaataggggcagggtctcactatgttggccaggctggtctcaaactcctggcctcaagtggatccttccacctcggcctccaaagagccaagattacagacatgagccactaagcctggccatttttgcaatgtatatgtaaaaatatatatgtattgagtaagtggtaaaatttttttgagaaatatgtgatcaaaaccatatttggagttgggacatgacaactgcaatttgaagatcttgtggggagagaagtcaaagaaaaaaacacaaatgttttagttagtatctaatatgaaagaatggtattggccagttagctcaggtggttagaactgtgaaaagaaaataatctcaggaccccaaaatcactaagccaaaaggaaaagtcaagctgggaactgtgtcgggcaaacctgcctcccattctattcctcaatgagatagctgcaaggataaaacaactgcttacctccttcatcacaatttgccacaaggaaattccttgtggacttcctccctacttcaagttattccacctttccagactgaaccaatgtacattacatatattaattgatgtctcgtctccctaaaatgtatacaacccagctgtgccctgaacaccttgggcacatgtcctcaggacctctggaggctgccgtgggcacatccttgaccttggcaaagtaaacttcctaaattgatgaggcttgtctcagatactctttggtttgcagaatgtattgctgatatgaaggaaaacttgagttcttatatctaaagtagaaaaaaaaataggctgaatgctattctttaatttgtcacttaagagctacttagaaaaaaaaaaaaaactttttatctgaagaatgcaagccctggccgggcatgatggctcacgcctgtaatcccagcactttgggaggccgaggtgggtggatcatgaggtcagcagttcgagaccagcctgaccaacatggtgaaatcctgtctgtactaaaaatacaaaaattagccaggtgtggtggcgggtgcctgtattcccagctactggggaggctgaggcaggagaatcgcttgaacttgggaggcagaggttgcagtaagccaagactgtgccattgcactccagcctgggcaacagagtgagactctgtctcaaaagaaaaaaaaaaataaaaacagaatgcaagcccctttaaattatcaggcccagggaggcatttgcaatgtaacagcattcttgtctcactctctgttgaactaaataattactcttgaagccatttgttatatagtctctagactgacgccaagtagccatacaatgccatgcatcctgtagttcaacagtgtatagccaatcactagccaatgttatttctgtaaaccaatgagaattcctaatgaacaagtttttaaattgtcccttctcctgattcatcctattttcttcaaaaacttgagcctctctctgttttgttctctggagcactcaaggcaacttggaagtgtcctgaaatgcaatcctcaagcttagccccctcaaaagttacttttgcctcaacttcttccttttaggttgatactaccatgaaaaaaaatgtaaagaaatggttttaaattgcagcgttaagggtttaagtcattaagaaacgatttaccattaaaaattatatacacccacacatacactcatatatattgttaaaatatgccatgaagtccaaattatacacaatacttaaataagtaactaatgagctgggtgcagtggtgcacccttgtaatcccagctacttgggaagctgaagcaagaggatcacttgagcccagaagttcaagaccagcctgagcaatatagcaagaccctctcttaaaaaaaaaaaattgtatgtcatactacttgcaagttctcacgcccagtcactgtatcagggctccatcaggaaaataaaatcaataggagacatatattaagggtttttttggcaaggagttgacatacagttgtggcagctccctaggtaagtgtaaaatcggcagagcaagccatcaggaaaggcaggctggaactcaggcatgagctgaagctgcagtctaaagcagaattttggctggacgcggttgctcatgcctgtaatcccagcactttgggaggctgaggcaggagcattacttgatcccaggagttcaaggctgcagtgagttaacgatcacatcactccatcctgggcaacagtgagactccatctcaaaaaaaaagagaaggaacagcaactcagagcagcctaagctatgtgaagtatgcaaaacttgttaggcttacagagacatgacttttgagacctcagtca

SEQ ID NO: 96268 - DNA, 18287 bp, Homo sapiens
cactggaacttgccaccaccagcaccatgccctaccgatatccagcattgaccctggagcagaagaaggagctgtctgacatcgctcaccgcatcgtggcactgggcaagggcatcctggctgcagatgagtccactgggagcattgccaagcggctgcagtcccttaacgccgagaacaccaaagagaactggcgcttctactgtcagctgctgctgacagctgacgactgcgtgaacccctgcatcggggacgtcatcctcttccaccagacactctaccagaagaaggatgatgggcgtcctttcccccaagttgtcatgtccaagggtggtgttgggggcagcaaggtagacaagggcgtggtctcccttgcagggacaaatggcgagaccaccacccaagggttgtatgggctgtctgagtgctgtgcccagtacaagaaggatggagctgacttcaccaagtggcattgtgttctgaagattggggaacacaccccctcagcccttgccgtcatggaaaataccaacgtcctggcctgtcatgccagcatctgctagcagagtggcattgtgcccattgcggagcctgagatcccccctaatggggaccatgacttgaagcactgccagtgtgtgaccaagaaggtgctgactgctgtctacaaggctctgagtgatcaacacatctatcttggagggcatcttgctgaaccccagcatggtcaccccaggccatccctgcatccagaagttttctcacgaggagattgccatggtgactgtcacaacgctgcaccgcacagtgccccccgctgtccctgggatcacattcctgtctggaggccagaatgaggaggaggcatccatcaacctcaacgccattaacaagtgctccctgtgaccttctcctatggccgagccctgcaggcctctgccctgaaggcctggggcaggaagaaggagaacctgaaggctgcccaggaggagtcaagtgagccgtggccaacagcctggcctgtcaaggaaagtacaccccaagcagtgagactggggctgctgctagagagtccctcttcatctctaaccatacctactaagtggaggtgttccccggctgttcccaacactccaggccccgcccctactctcttgaagagcgggccttctcctcaggtctccaggttggcttgcccgtgctcttgcctccctcgtgacagtggtgtgtggtgtcgtctgtgaatgctaactccatcaccctttccagcacactgccaataaacagctattcaaggttggaggagggggggcggggagagaactacagccagtatccccaatgaacatagatacaaaatttctcaacaaaataccagcaaactaaatgcaacagcacatcaaaaagacaatataccgtgatcaagtgggatttatagcagggacgcaaggatgcttcgacacacacaaatccgtaaacatgacacatcacaccaacaaaatgaaggacaaaaaccatatgattatctcaataggcacagaaaaagcatttgataaaattcaacatcgctttatgataaacactctcaacaaactagacatagaaggaacataactcaaaataacaaagaccatatacagccaacccacagctaacatcatactgaatggagtaaagttgaacgcctttgctccaagaactgaaacaagacaaggattctcactttcaccattcctattcaacatagtactagaagtcctagccagagcaatcagtcaagagaaagaaataaaaagcatccaaattggaaaagaagaagtgaaactgtctctttttgctgaggacatgatattatatctagaaaaacctaaatactctaccaaaaaaaaccccacttagatctgataaatatattcagtaaagttgcaggatacaaaatcaacatacaaaaagcagtagcttttatatatatcagcaatgatctagctaagaaggaaatcaagaaggcaatttcatttataatagctacaaaaatatataagaataaatttaaccaaggaggtaaaatatctctataagaaaaactataaaacattgatgaaagaaattaaagatgacacaaacaaatggaaaaatatctcatgctcctgcgtcggaatacatcattaaaatgaccatattgcttaaagcaatctacaggttcaatgcaacctctatcaaaataccaatgtcattcttcacagaattagaaaaaacaatcttaaaattcatatggaataaaaaagagccagaataaccaaaggaatcttgagcaaaatgaacaaagctggaggcatcacttattacaagactatagtaaccaaaacagcatggcatttgtataaaattagacacacagaccaatggaacagaatagagaacccagaaaactgatctttgacaaagccaatatgaacttatatcggggaagcagcaccctgttcaataaatggtactgaaagaattggatagccacatgcagaagaaagaaactggacacctatatctcaccatataaaaaaatcaactcaaaatgaattgaagacttaaatataagatctgaaactgtaaaaaacactagaagaaaacctagagaaaactcttctgaaccttggtttagacaaaaaatttatgactaagatctccaaagcataaacaacaaaaatgaaaatagacaaatggaactatattaaatcaaaaagcttctgcacagcaaaggaaacaatcaaaagagtaaacagacaatctgttgaatgggagaaaatatttgcaaaccattcatctgacaggggaataatatccagaatatacagggaactcaaacaactcaactgtaaaacaacaacaacaacaacaacaaccaaaaaaccaagtaattccattaaaaagtgagcaaaggacatgaatagacatttctcaaaagaagacatgcaaatggcaaacaggtatatggaaaggtgctcaacatcattgatcatcagataaatggaaatccaagctacaatgagatatcatctcaccccagttaaaatggcttttatcctaaagacaggcaatcacaaatgctggtgaggatatcaagaaaagagaacacctgtacactgctggtggaaatgtaaattagtacagccactgtattagtctgttttcacactgctataaaggactacctgagactggtaatttataaagaaaagaggtttaattgattcacagttctgtatggctggggaggcctcaggaaacttacaatcatggcagaaggtgacagggaagcaaggcatatcttacatggcagcaggagagacagtgagcaaagggggatgtgccacacttttaaaccatcagatctcatgagaactcactcactatcatgaaaacagcaagggggaaatccgcccccatgatccaatcacctcccaccaggcgcctcttctgacatttggggattctaattcaagatgatttgcatggggacaaccatattagagccaaaccatagtagccactatggaaaatagtatagaggttcctcaaaaaattaaaaatagaactaccatgtgattcggcaatcccactgctaggtatatacccaaaagaaaggaaatcagtatactgaggagatatttgcactcccatgtttattgcagcactattcacaatagccaagatttggaagcaacctaagtgtctatcaatagatgaatggataaagaaatatggtacacatacaaaatgaagtactattcagccataaaaatgaatgagattctgtcatttgcaacaatgtaaatggaactggaggaaatgttaagtaaaataagccaggtatagaaaggcaaacttttcacatgttctcactcctttgtggaagctgagtattaaaacagttgaactcatagagagtagaatgatggttatcagaggctaggaaaggtagtggtgagggacatggggatggaaaatggtacaaaaatatagttaggatgaataagatctagtagttgatagcatgacaggggggtgactacagtcaatcataatctattgtacattttaaactaaaagtataattggattgtttgtaacacaaagaaatgataaatgctggaggtgatggatcctccatttcccctgatgtgattattacacactgtatgcctgtatcaaaatatcttatgtaccccataaatatatacagctactatgtacacataaaaaatttaaaaaatttaaaaaaggagacatataaatgggaaacaggcatatgaaaacatgctaaacatcactaatcatcaggggaatgcaaataaaaaccacgatgagatatcatcttatcccagtcagaatagctattactaaaaagacaaaaaataacagatgttggcgaggatggggagagaagggaactcttatacacttttggtggaaatgtaaactagtagagccactatggaaaatagtatggagatttctcaaaactctcaaacgagaaattaccatttgatccagcaatgctactactgagtatctactaaaaaaaatcaatatatctgagggatacctgcacttgcatgtttattgcagcactattcacaatagcaaagacatagaatcaacctaagtgttcataaattgacgaatggagaatgaaaatgtgattgctatttagccaaaaacatttgcaaactattcacactattggagtgtatacatttcctctttgtatcaaatctaccatatcaggtaggtattattattcccattttacagatagggaaaccgaggcttgagaaagtttagtctctctcatcaggctcacctaggagataggagagagacctggggtggactcaggacctctgaatgtccagcctctgacccaaccacattatgcttccttctccctttatgggaattttcattgaattgggtcttgtctttttaatttccattcatttcctcctagagagtcctgcttcagagctcactttgttggggtggcttttaagaggcaccattcaaataacattggggtgagcttctcttgccataagagctagccacaccccccttcaggaatgaaagactcatcactctggctgctgggagcatggccctcactgcccacacctacaggtctgttatctgaagagagctgcctccctagggtcacgccttcttctgggggtagctcaggaataaatccaatgcctcattgcttggtgcacagagactgggtcccctctccccagctctgagtggccacccaatgtccagagctcccagccgggtcaacagaggcccttgttgggactacccctcttctgcccagtcctgtttccttcccaggcttttgttgggagattgcaaggacatattctagataatcctcagtcctcatttttcttgcttcacatccttctaccccctctttttccctcctagacgttacctcccctctaccatcctacatttccagtggagaatcacttgagattctctgttcctccccttcccgtggtcttagggccacctcatacctacattgctggaggttggctcatctccataaacgtgggttggctccaaggtcctcagtactgggagctccctgaccacaggaaggatctcaaataacacatttctgtcttctcagaatgtgtctgctcactcactgaggaccacaccctccttaccaggctatggaaacatttccaggctccagctcagcaggggtggcctctgtaacttgaaacaaccggcagtgatggctctgggccattacaatgttttttgtcttggaaagaatacttgaaaattacaaaaattatgccatttccattgcatgccaaaagcacccaaattgcattttaatcactgtacaaaggaagccctgatacttggcttgtagattcaaatgtgtctggttttaatcaaggcgtgtgctgttcttccagttccctcacatcgggctaacgcaaaagacaccagaatccatcaccagtgctacgtcaaaasagccccagagtccacacttgcctcggcaagcggaggggaagctgccgcccatatacaaagtccgggagaaggtgagtcctgaacactggccactgccatgtgctcctgtggacctcccagggggcagcgccgctggcacgttgggccaaacaattcttctttgtaagaaactgcgcatttactatccttggacccctaagggttggtagtatccccaccccataccctggtgctctscggcaggaactacttcctgctatggacaatcaagttaggctcctccacgaacaagaagcaacacccccttccagcccacagctcattaacatgcacctcctgcctccccggccaattcctgagcaacttccaggccctgcagtggcacaaaggagaagccagggtccatttcatacctgccagggttccccccaggccttgggccagggctctcatctcctgggacccttactggccagatgacagagtkggtctacacggcctcaaaagtccttcccagtttttggctccatgagcctgtacacttttccatccttgcatccaaataaggtgttttgaaagataatttttatgactttggggaagctggaaataaggtggggtttcaaagcccggcgctgatgagcacgtggatatcctccccctcctgtgtctgctccatctctggggccaggtttcattgtctttcttagaggtcgctttgcctcatccatcttccttccacatcacccgatcccagttctgaaagcatgcagggttctaatgtgtgctctttcccttccatcccacttttccagcaagcagtgaataaccagttccccttctccgtgcatgacaatcggcacagcttggagaactctggatgctaccttgactccgtgagtatttctttccaaattattaataaaacagggaacaacacaagggatcttgattttctggggtgtgttgaagatagaggattggcctcaaaactggaacaaggtcaaaacaaagcgaggtcttaaacaagactcataacagattaaaaaaaaaatgttcaaagctctcagaattccacgccgctttcaagatctacaccagtgttctgcctaggtgtaagtgcgcttcatccttctgcaagtgccttcccataaattgtctcttttgcgagctttcttgtgaggatctgccatgggaaggagggactgctatgcgtatctctggatggcagaaccaggatccacgaggaaaggtcagaaggaggaggagcttacataatataaggaaggatttccttgtaactggagttgccttttctctacaggttgtgagttccccatcactggagaacatgaagtctgatacagtggtggttcacacagcactgtgtgatagaaatgtagtgtaaactgtatgcataattttaaatgctttagtggttacattaagtacaaagaaacaggtgaaatttactttaataatatattctattggctgggagcagtggctcagccctgaaatcccagcagtttgggaggctgaggtgggaggatcacttgaggtcaggagcttgagaccagcctgggctacatagtaagaccccgtgtctacaaaacattaaaaaattaaccaggtgtggtggtgcatgcctgttgtcccagctactcaaaagattgaggtgggaggttcacttgagctcaggagttcaaggctgcagtgagctatgatcacgaacactgcactccagcctgggtgtcagagtgagatcctatctcaagcaaacaaaaataatttatttagcccaataattctccaaattgcccattcaacatgtaatcaatataaaaaattaatgagatattttacattcttccttccaaaccaagtctttaaaatacagtttgtgttttacacttatgtaacatctcaacgtagacaactcacatatcaagtgcccaatggctacatgtggctaggggctaccagactgcacagcacagggaaacctattagatagaaagctgtatcaagtgatacctgcaaatcctcatggaacctgaaagtccatgataatgaaggtgttattaatggcccaccatttataaagcatctgccatataccaacatctcgtattattgtattcaatcctcacaacaatcctacaggctaattacacttatcatctcaatttagagatgagcaaattgagatccagtaaagttaaacaacttgccccaaatccctctttcttctagactacagtgtcttaactaaatagaagtgycttaaccccagaaatctggttttcttctggcagaatgttgaaaacaggaccagaatacccactttgcctgcctctgtacatggggtgcttaatattgttttttaaataaccaaagcaacatatgtcctttaaaaaactgaaatcatacagaattgtataaaattaaaaataaattcacacccttattttccttcctcacaatctgaccttgacgattcactgctagtaatggttttgtgggtaaaatttgagagtttttccaattcacatgcagatgtacacacataaatgtatatttgttaatgatataaacaggattctaccacttgtattttgccaaggttatgatagtcttctagaaagccttggaagctttccaactttctctatgttctggaatagcttatataacatttggattttcagtttaatggaagttttcagtttaatggaggttagacagaatttgcctatgaaataacttgggtttggtatattttttagagtaaggtttttatgactttttctttctttcttgattattaatctattcaaactttctatctcttcttgggtagattttgctgatacgtatttgcctaaaatttatctaattcatttcaaatgtacggtataacatctctcaaaatagtcttattttgttgttccttaaaatttgttttcagttgaatgtttagttcacatacttgcaattgtttttgttaataatttattaaaactataagtagtctttagattattggtttgactacatcccaaaggtttttccaattaaggtctcattattatttgctttcaaatagcctatgatttaatttttaatttttccctttcctaaaaaaattggaagaatgttttgaattatctatatggttaaaaattttagaaataatctattcattgctaatatctagttttatgggttatggtaaatttcagagtataatctaagattctcactttttgaattatgagattatctttgttgtcttgtgtgtgattaactttaacaagtgtgtcgtggctgtttacaaataatatatattcccccctgttggttacaaagttctttatatttattaatttaggactgtgaattatttaaatctttcatatccttgtcttaatttttgtattgatctgtcaatttctgcttctaagattattcttgagtttctaaagttttttttgcctgatatagtttaataccttatctttctgcatcaaaaatttttgttgttttattttcatggtggcttttgccgtttatcaatatgaagtgtttctctttatatgcattaatgcctttagccataaattctatctacattatgatactggcattgtcactattactctctttttgctaatgtttgttctttatgttatgggccattcctttgtctccataatttgtagtcattttgctttgcatttgtcttctattataaatataatgcagcagagttttaaaaaaaatcgaagaatctatttctttatatgagaatttagcccattcacattattatgacaatttatgcttttggttttatttctgccatctcatgtttcctatttattatgcttatatttttctttttttcttcttctcctgactttgctagattgattgaatttatttgctcactctgacttctactgatattctacaagtacttgccctcaagtacaaatatttaataattatattaacactatattactgtatgtataaaaattaataactgtagcttttccccaagaataaggtaagtcttccagcatgctttatctcactcacttcctgttccagggctgctgtgttggtggccaggttgtattcccccaagccctgtaggtgccattcctggacttcagctgggagctcaaagatgtggccctgatttccctaatcaagttgaaatcctgggatttcagttgcagattcttttctttctgtttccctccctcctttccattttgtgaatttgtacaattcagtacatttcatagtcacattattagcaagcatttagatttcatcataaattttacttgctgctttccttgaagctctttcccctattttcatcatgcctttcttttacttgtttttcaatttgctggagtatcctcaagtcattctttagaagccgacttggacattgtgccccgcgtcatacacttgtccctccagtcccactctcctcttctccctactctggttctgggggctgatctatgtggagtacatccctccccagtcccctcagtcctggagccattgcacagccccttggggtgtccttacacacacccacacgtatgtagacagtccctttatagactgtcctcaaattactctaattggaatgtggcttgcatctcctgctgcaaatctgacactgacccttcatcacagaaacctcactttactgacgtgaaatctatgtaacgtaatgtccatttcctctcagtcactcatgtcagtatagtgttttctttcttagttttcatctagttgtgaacaaacagaatgtacaattttgagtacacagtaattatcaggttcrcacgtaaggtgctgagagtgaatgaggaagcctgtgggccaggacctaaaggtgctgggtccttcagggagcccttagggttgggaaagaattcagcctcctcagacttttcagagaaagaatcatcattggtcccactgagtgctggggggcagctcagtgctggggagcagggaaggtcgggggtgttgggagtgaagggaacctacctgggtccctagggttgaggctggctaacagtctgtttctggctggattgtctctggttctgctttccatgtctctaaaagtgcaggccccttggtggcaccagaagactgtgaggacaataacagaaccctgccagggttttgtgagtgtcaattcataaccttcaacaggttgttaaaggagaccttgagacagtcgtcatagtgtgcatttgaacatatacatgtcaagtaactgattttaagaaagacctcagaactatgtgactgaggctgggcacggtggctcatgcctgtaatcctagcgctttgggaggctgaggcgggcagattgcctgagcttaggagttcaaaaccaacctgggcaacatggcaaaaccctgtctctactaaaaatacaaaaacttagccaggcgtggtggggtccacctgtagtcccagctactcaggaggctaaggcatgagaattgcttgaacccgggaggcagaggctgcagtgagctgagatcgtgccactgaactctggcctgggtgacagagcaagactctgtctcaaaaaaaaaaaaaaaaaaaaaaaaagaactatgtgaacttgaatattttccttcgaatcttgtaattcttctctccagggcctgggacgtaagaagatctctccagataagaggcaacatgtttcaagaaattttaatctctgggcatgtgactatgttccatcttgtcttgatggcttttcaaataaccaaatatcatacgtatataaagaagccatggtggtctcaagcttcagacgctttccacgatgctataaagagatatggaacgcttttacatttcttcctgagagaagctatacagaggttttgaaaaagaagcccaaagtraggttcactgttgacaaaaaggttrtttcttcactggagtcctaatcctcccagaagatttttgatgaattttgtaatactggtatttcatcagacatcctaaaagtatatgttttctgatccagcaccactatttaatttttaaagtacttttatgatttttataaggtcaaaaaacattcaaatccttgtgaaatgaatttgtgatgacatacgcatgtgtaaataaacttttcagatggccacatttacttttggggagttttaaaaagtacatccttaatatacggtcacattttcattttgaaatttcaaaccatacagaggaaacaaaagtcctccttgatttcaccacatctccaatcctgtatgtcctcagaagtaagttaactacttgtttttaatctgcatttacaatcatatacatgtgcataacacataaacttttcaacattactatgttacacagtgcaaaatattctacaacttttttttaattttgttttgagacagtctctgtcacccaggctggagtgcagtggcaccatctcgactcattgcaacctctgccttctgggttcaagcgattctcctgcctcagccttcccggtagctgggattacaggtgtgcaccatcacgctgggctaatttttgtatttttagtagagatgaggtctcaccttcttggccaggctggtcttgaattcctggccccaagtgatcctcccacctcggcctcccaaagtgctgggattacaggcatgagccaccgcgcctggccttctacagctttcttttgatacttaataatgtgtcttggaattcttgcagtgttataagaatagactgattttttaaaaaatcgctgcctatattcccaaatacaaattcactctgttttaaataattatcttaatagacatttgaatcatttctagcgtttttgctgttagacacagtgttacatgaacatgcttgatcagcctctctggatacatgtttccctgcacctctggagtagatagactctgaaaagttgctttgttagtgcttggttgacagtaatgcacaaagtgttgagaaataatgcattggctttgaaaaagactggaccaattgaactcctaccaaccgtacctgtgaatttctgttttatcccctctcacattatcatttaaatatttaaggatatttaaggggaaaaaaggtaccttgttattttcttattttgcatttctctatttattagtgaagttgagtatcttttcccacacagtggcctcctctatttcctttctatagactgacaatgtccccatcattccatgccaccattttcttgtttatcttgaatttttttctgtacatgaattttagaataagcttgtaaagtaaacaaacaaacaacaacaaaaataacactgccaatgtgataggcatttccccaaatttagcttttaatttatgggaaaaccaacacctttatactgtatcttcccctttgtttgaatttactttatgtccttcagtaaggtttataattttcctcacatgggtctgatgtgtttcttttccatgtttattcctgtatattttgatattctattggctattttgatattctatggctattttgaatgttttaattgcacttttagattggttttggcagatgcatgagaaagctattgatttctacatatgaatcttctacttggcaaaccggctaaacttctaataataaataaataaatattctataaaataaaaagaaagttctaataatgtttcagttgattctcttctcgatttttctaaatggaaaattatatcattcataaaagtgataattcttttatgtcatttccaaaatttatatttttcgcatcttattgcactggataggacctccagtacaattggaatattattacagagagtatatatcctcattttctttttcttttctttttaagagacaggatctagctctgttgcccaggctggagtgcagtggtgccatcatagctcactgcagcctcaaactcttagtctcaagtgattctcctatgtagtgagaactacaggagcatgccaccacactcaactaattaaaaaattgttttttgtagggatgggatctagctatgttgcccaggctggtcttgaactcctggcctcaagaggtcctcctgtgctgggattagaggcataagctaccatgcttggtcctgatttctttttatattaagatgttaagcttttgtgtcaaatatatttctttttttaaaaatttttattattattattatactttaagttctagggtacatgtgcacaacgtgcaggtttgttacatatgtatgcatgtgccatgttggtttgctgcacctgttaactcgtcatttatattaggtatatctcctaatgctatccctcccccctccccccaccccatgacaggctctggtgtgtgatggtccccaccctgtgtccaggtgttcacattgttcaattcccacctgtgagtgagaacatgcagtgtttggttttctgtccttgcaatagtttgctcagaatgatgttttccggcttcatccatgtccctacaaaggacatgaactcatccttttttatggctgcatagtattccatggtgtatatgtgccacattttcttaatccagtctgtcattgatggacatttgggttggttccaagtctttgctattgtgaatagtgccacaataaacatacgtgtgcatgtgtctttatagcagcatgatttataatcctttgggtatatgcccagtaataggatggctgggtcaaatggtatttctagttctacatccttgaggaattgccacactgttttccacaatggttgaactagtttacagtcccaccaacagtgtaaaagtgttcctatttctccacatcctctccagcacctgttgtttcctgactttttaatgatcgccattttaactggtgtgagatggtatctcattgtggtttgatttgcatttctctgatggccagtgatgatgagcattttttcatgtgtctgttggctgcataaatgtcttcctttgagaagtgtctgttcacatcctttgcctactttttgatggggttgtttgatttttttcttgtaaatttgtttaagctctttgtagaatctggatattagccctttgtcagatgggtagattgtaaaaattttctcccattctgtaggttgcctgttcactctgatggtagtttcttttgttgtgcagaagctctttagtttgattagatcccatttgtcaattttggcttttgttgccattgcttttggtgttttagtcatgaagtccttgcccatgcctatggcctgaagggtattgcctaggttttcttctggggtttttatggttttaggtctaatatttaagtctttaatccatcttgaattaatttttgtataaggtgtaaggaagagatccatttcagctttctacatatggctagccagttttcctatcaccatttattaaatagggaatccttttcccatttcttgtttttgtcaggtttgtcaaagatcagatggttgtagatgtgtggtattatttccgagggctctgttctgttccattggtctatatctctgttttggtaccagtaccatgctgttttggttacttgtagtatagttcaaagttaggtagcatgatgcctccagttttcttcttttggcttaggattgtcttggcaatatgggctcttttttggttccatatgaactttaaagtagtttttttccaattctgtgaagaaagtcattggtagcttgatggggatggcattgaatctataaattaccttgggcagtaaggccgttttcacaatattgattcttcctatccatgagcatggaatgttcttccatttgtttgtgtcctcttttatttcactgagcagtggtttgtagttctccttgaagagttccttcacaaataccttgtaagttggattcctaggtattctctttgaagcaattgtgaatgggagttcactcatgatttggctcactgtttgtgttattgatgtataggaatgcttgtgatttttgcacattgattttgtatcctgagattttgctgaagttgcttatcagcttaaggagattttgggctgagatgatggggttttctaaatataaaatcatgtcatctgcaaacagggacaatttgacttcctcttttcctaattgaataccctttatgtctttctcctgcccgattgccctggccagaacttccaacactatgttgaataggagtggtgagagagggcatccctgtcttgtgccagttttcaaaggaaacgcttccagtttttgccctttcagtatgatattggctgtgggtttgtcataaatagctcttattattttgagatacgtcccatcaatacctagtttattgagcatttttagcatgaagggctgttgaattttctcgaaggccttttctgcatctattgagataatcatgtggtttttgtctttggttttgtttatatgatgggttacgtttattgatttgtatatgttgaaccagccttgcatcccagggatgaagccaacttgatcatggtggataagctttttgatgtgctgctggtttaggtttgccagcattttattgaggatttttgcatgagtgttcatcagggatattggtctaaaattctcttttttgttgtgtctctgcctggctttggtattatgatgatgttggcctcataaaaagatttagggaggattccctctttttctattgattggaattgtttctgaaggaatggtaccagctactctttgtacctctggtagaattcggctgtgaatccatctggtcctggactttttttggttggtaagctattaattattgcctcaatttcagaacctgttattggtctattcagggattcaacttcttcttggtttagtcttgggagggtgtatgtgtccaggagtttatccatttcttctagattttctagtttatttgtgtagatatgtttatagtattctctgatggcagtttgtattcctgtgggatcggtggtgatatccccttgatcattttttattgtatctatttgattcttcttttcttctttattagtcttgctagtggtctatcaattttgttgatcttttcaaaaagccagttcctggattcattgatttttttgaagggttttttgtgtctctatctccttcagttctgctctgatcttagttatttcttgccccttctgctagctttttaatgtgtttgctcttgcttctctagttcttttaattatgatgttagggtatcgattttagatctttcctgctttctcttgtgggcatttagtgctataaatttccctctacacactgctttaaatgggtcccagagattctggtatgatgtgtctttgttctcattggtttcaaagaacatctttatttctgccttcatttcgttatgtacccagtagtcattcaggagcaggttgttcaggttccatgtagttgagctgttttgagtgagtttcttaatcctgagttctagtttgattgcactgtggtctgagagacagtttgttataatttctattcttttacatttgctgaggagtgctttacttccaactatgtggtcaattttgcagtaagtgttatgtggtgctgagaagaatgtatattctgttgatttgaggtggagagttctgtagatgtctattaggtctgcttggtgcagagctgagttcaattcctgggtatccttgttagctttctgtctcatggatctgtctaatgttgacagtggggtgttacagtctcccataattattgtgtgggaatctaagtctctttctaggtctctaaggacttgctttgtgaatctgggtgctcctgtattgggtgcatatatatttaggatagttagctcttcttgataaattgatccctttatcattacgtaatggccttctttgtctcttttgatctttgttggtttaaagtctgttttgtcagagactaggattgcaacccctgcttttttttgttttccatttgcttcgtagatcttccttcatccctttgttttgagcctatgcatgtttctgcacttgagatatgtctcctgaatacagcacactgatggctcttgactctttatccaatttgccagtctgtgt

SEQ ID NO: 96269 - DNA, 13184 bp, Homo sapiens
tgtgtgtgcatatatggatacatacatatagctagacacacacacacacacatatgcatatacaaaatgtgtgtgtgtgtgcactttgaagttttatctttactcttcacatttaggtctgtatccatctggagtttttttgcatatggtgtgaggtaagcatctaatttcttctttttttcctatatgaatatctgattattctagcaccatttattgaaaagactgtctcttcccactgctttgaaattccatcgccatcataaatcaaggatccctctatgaagaatctggtaagggtctggtctttcaattctgactcattagtctatctgtctgtcactgtgtcagtataacattgatttttaaaaatatgtcttggaacctgctaaagtgaggctttcaaccttctttttcttcaagagtactttatccatccttggccctttatacgtatcaatatattttagaatcatcttgtcaagtctcaagagaaaaaaaaaccctgttcattttttgctgcttctttttagatcagattagaagctgcaattgctggttggggttgctgactgagatcacactgcatctatagattgtttcggggagaactgacatctttataatattgagtcctccaatccaggaagccacaagccatgttaagtcttttttatacctaatgctagctcctgagagctaatctacttttgatatgtgagtgccaaggttacttaaatttggcacttccttttccccaagtattccaaatcctacaaatatagtctattttcctctcaactcctaagatgatagccctaaaatagaatgctacatcatagttccatggtccagaattgtgcttgatccaggaactgaggaggaaacccaaatgatctgtggctctgaggatatgaaaaatatctttcaggtaattgagaacaaatataatcttacactcaaaatcacaaacacacacataaaaggctttcaagtgatgaaatccccaaatcataatctagaaacaatatttttaaaataattcctacttgagaattgagagagagagagaagttagcatagaatgagtacctattagcgaggcttcctccaggacctaggaaccctaaccagctctggattcctgatatgggaataagcaaaggaattttcagtgcagtaagaaatgattaatgggctttagggactgattgatgaagagagaaagcaaagcagaaaaacaaactctgaagttaataaatggaaaggaaaaaaataccatcctgaaatacttgacctaggaagataagggactgtttatggtaatgtaaagggttataaagaccaggaattttaagttgaaaataataggaatattttcacatatattcctccatcttcaaactcagaaattattccccaggagaaatggagaaaacaaattcttgagaaaactagaagagaaaagcaccagagaagagactgtgggaaaaaagtattgtgaccagtgggaatgggctagaaatgatctaatacatcttttccattctctagttcctgggattctatacattagtgcagagggaatgatattatcaagcaatgagaccaacgagaagtgttttgttcaattttcaaggcgctgttaaaaaaatacagcctctaaatgggaactggatacctggtcttaaaaatatacagagagcatcctgctcttctgcagtgagtttatgttcccgtctgttccctctgcaggagtcagcaggcggcctgacggcatggcaggggagacatgccaggtaccatgaaatcatggggttggaatgtggagtttgggtggtgggaggatgggggttctgtgttcaaaagcactagagttagaaaagaatgaaaacgaaaggagcttgggcttcccatgggtttggacaagagacaaaccacaaagaaaacagcttctagcctagcccacaggcattcattcaaggggaagcctggagcatcaacctacaattccatcacagtatgcagaggattaaaaaagaagcatgttagaaagtaggtcttcatttcatttcaggcatatttccctggtaaatgccacttccagcctatacatttattggctcatttttataacagaaccagcagtaccaaatccctggggagcttcagctctaggatttgacatatactagaagagagggtgggtattcaaatcaaaggtagagcatacttatcattttgacagacatagctgaaactattcctgttgtaaggtactgagcacatccaaaatgtgtaatttccttaattttcttactgtactcaaaagcaattgaaaattcccaagttattaattatggcaaaagaatttttgtgattaggagagcttctgtctttaatttcaagtgaataagatccatcaaaagaaggctgcctactagctttgaaacactttcagcttcagtacagtggtgagaaacagacttcaactaaagatttcaagactcttcttacaaagtcctgcttgtatccagctgtaacagcaattgttcattcatcacacttgttttaactacagtcaaaggtaaaccacaaacttggctcaatggccacactatgtcttattggttacataaatggcattttatcacagattgtaataaaaaagtattcaataacattaccaggtaattgggatgaaaatctctttctataagtctatttattcttctcattgtatataaattttaaaatattgtttaaagctgtcactccttagctctgttagtgtttctcaattctatcatctacattgccctactatttcaatcctacattcctgaaattatcttcaacattttcttgaaaatgcctctattggcaattaaggattgaagagctgaaacagagaagacccggcgtgacactggtgctcctctgaaggtttggccatgcctcagcattgttctgctacagtcagctctttcctccggaaagcactggagagtccaggtctgttaagaaatgctcactcagcaccaagaaaaatgggttcatcatttctaagcatctgcttagaaataaaaccagatgctcagacctaggaatcaatagagtaaatattaattcagtataagagaaagaaggtcctacatcacctccaaataagaaaaaatatggaggccaacaattaaaactgaaggaaaaatatttttaaaaagaaagaaaaaggagtgactaaccaattagactgtgagctccttaagggcataaatgataagcacttaatatgtattgttagttcagtaaaagagtttaaaaggaatcaacttaattcttaaaaatattcccccacaggcttatttaggccattttcaaatttcaagagttacacatctattttccttacacgtgctgtacctaccatccttctatcatgtgatggaatgcttttgcacatgtattttccttcttgtgatgaaatttagctatcagaaacatgccctggccctttcatgtacttcatctcatgtagtgaaggtaggaatcataggcatcattttctagggaaggacactgctaagttaaataacctgcataaagtcacaggcaggtgagtcagatctggatctgagctcttgccactggactccaaattctatattccttccatcacactgaactgaatgcaatttagaacttcttggcttcaagcatcccactcccacccaacccctctccccaacacacttctcagaaggggaaagtgtaccatggagatgttaatgaaaaggccaagggcatacaactagtggcacagctggagccacaattcagaactccagtgctctggccaccacaccacataatgttcttccccaggtgccatgttttgaaggtgtgaccccctcaaaattcaaattgaaaatccccactgtggtagtattaaaaggcagggccttttagaaagtgattaagtcatgagggttctgtctcatggatggattaatgcccttataaaagaggcttcaggctgggtgtggtggctcacacctgcaatcccagcactttgggaggccaaggcaggtggatcacttgaggtcaggagtttgagaccaacctggccaaaacggtgaaaccccgtctctactaaaaatacaaaaattagccaggcgcagtggtggatgtctgtaatcccagctacttgggaggctgaggcaggagaatcacttgaacccgggaggcagaggttgcagtgagatgagatagcgccattgcactccagcctgggtgacagagcgctactccatctccaaaaaagaaaagaaaagaaaggaaagatttagagaaagtatacactgttttgtccttccaccccctctaccatgtaaggacacagcattcctccttgctggaggatgcagcaacaaggcaccatcttgaaaacagagagcggccctcaccacacaccaaggctggtgcctcgctcttgaacttcctagcctccagaactgtaagaaataagtatctgttcttcataaattacccagtctgtagtattttgttatagcagcacaaatgaactaagacaccaggtttttaattttatactgttcttttcttctgtagttatttcttttgtacctaaacatctctttgggctattttcttcaggtctttttttctgtctccccagcaggaagaaatgataaaatatagagtcatgacactttggctcccaggaaggattacatcatcacctcagggcagctaatctatatttaaatgcaaaggttatacgtaagtaaagaataaggaggcaagtctttttttgtcttagatgcttaaaactaaattaacaattatctaaacatgacataaataattagaaaattaaatgtagtgcaaaatattttaattcctaataacactacttgctaaaccaaatcagcaagtgtcatattcttgccataacatactaactaacacagcatattattatcttgaacaggacagtaagtacaggtaatcgatcaagaagcactacaattttaaaagtacaaaaaatgatataaaatgttttaaaaatttagtttttcctcatacgatgttttttttttttttgagacagagtgtctctctgttgcccaggctggagtactgtggacgatcagagctcactgcagcctcaaactcctaggctcaagcagtccacccaccctcccaagtagctgggactagacgcacacacaactacgtcggctaatttttttttttggtataattctatttatatgaaatatccagaataggcaaacccataaacaggaagtcagttggtggttgctagggatggggaggagggaggaaatggagagttcttgtttaatgggtacagggtttcattttgggatgataaaaaatgttttggaaatagacagaggcgatggttacacaacattgtggatgtttagtaccaaatgtcactgaattgttccctttaaaatggttaactttatgttatgtgaatttcacctcaatacaaataaataataaatacgttgcaaggaaaaaacttggaaagaggccaatcaaacaaaaaagttgtaatgaaaaagaaaagacattaaacatttttttaaacaggaggttttgggcatggagctggttgatcttaaaaatcctatcccattcattcacatcaagctgtccaaaccgagtaactggaaaggtcccacgatgctgagctctaaacatcaaacacaaaactagaattctggaattatctggtattttccctttcctgaaaattccatcttcaattggttctacgggttcaagagccatatttatgaatcaacattcagggcacgtactctggttcagggacaatgaatggtacgaagaatatctaggatatgtagctgttgaaactgcagccctctcaatgactctaatactcaaggagttaaaagaatccagccccaggagttttagatacaaaaatagtaacaatccaactgaatttgactgcatttaaaaaacataattatttccaaatctaccgagcagctgaacagtcttcagtgacgcctacagtcactggaattcaaagactcctgctcccggcagcgctgggtcyttttatgcctatgggatttatctcagctcctacctctacttctatgactacgcccttcagaacgcccgttgtacgggctagaaagtgtgcctgagctccgccctctgtccttatccctggtcttttcttctcttgcctccctcctgcttgaggacctgtgctcgtgcttgggtttcyccttcttcagctccctctctcggttctctgcccaaccagagtaggcagtcctggccttggggagcttccgcccctccctgggcactgacttctgagcyctctcctagttcttgctgctgtgcttcttagggccagggttgtcctcttcctttactgtcttgcttctgggtgacgaagaggatggttgctctgcctgtacctcccagtcagttgtctctttttctttttttcctttttgtctttttttgcgcttttttgttggtttttcatcttcagagctctcagacaaacttggtgagggggtacgagccccacagcccttctcctggagctctttggtcacatcatccatttcttctgagtccttaggaacgcaatagttagacacatgatccactcggatagttcttcctttgatcttgatcccattaaaattgtcaatggccagaattgtgctcctctggtcttcatagcagaggaaacagaatcctttggatttcccagtcttcttgtcccacatgagattaatgttaacaatctccccatactgtgagaacacacagatgatgtccccttcagtcagctcataaggaagccctcccaggaagatccaggcactgtccttgtactcggagtgccaggacaccttatcggccaccccaagctggacctctcgctcattcagctcattgatcagcttcaccttagttaaagggttcatctccacgggcccaaactcagcgttcaggtatcagtgcccaggcaaggcagtgtggcacataccctggctaattttttaaatttctcgtagaggcaaggtcttgctatcttgcccagattggtctcaaactcctagccttaagtgatcctcttgccttggcctcccaaagttctgggatgacaggtgtgagcaattgcacccagccttcataagaaaattctaacattgattttcaagtgttcattctgggggtatatgatattttcattatctcttgtggccaactaaaggcttatcataccaacaattatcactgctcacacatccacattgacacctgcctgattcccctcttcagctgattatctgagaacattcatcctttggccagcagctgagatatgtggctatccacaccaagtcgtcagactgttactaaacatgcgaggattaattacactagttttaatacttttctaactgtgtaccctttttcaaatataatattcttagatgtgcctaataagtggaattgtccaaagaaaagcttgagaggtggatggataatagcagagtcagtgggggagctctggtgggtccctgactgctcttttgacctcaccccagtcaagcacaaagggggcttctcagagcacagtctgaaaaccgctttcagacattttcaaagtattaatattttgttgaaattgaaactgtcttcctcagggtattggggaatatacaggagaagaaagatactaaaatatgggatagaggtgcaaatatcacatatactgacttagcataactcttctcatttcttcctctgagacaagactctgactttgtggggtggtcaatgcccttcccagtcattctccaatcacaccacctggggaactcagctgactacttgcctttcttctgtagagtactcctctctgcattcacactcttccaccatcctagaatgccctttcacctcttttctgcgtggggaactctccttggtcattaagccctaacaatctctcactgattctgagactcttaaacatgcttcttcctcctaccaaacacacccacacctgttccatgctccaccacacacaccaccaatgtctctctttctctctctcactcagaagaacagatgcctccttcatcaattcttcattattgcacatatcacattgataacttggtaaatatttttttatttgctccatagatatattttcccgcctagaatatgagctcttctagggcagggactatcttttccttctttatatacccagtaaatagcacagtgccaggtatgttgtggtccccttataaatgttaactgaatcatgacaaatcctttctcccatactttagttccaaatgtaaagggtaaaataactataaagaaaataagtcatatgtttcagttgcaggcaattgttaaacaagttacgttctaagagtttgtttaaaaattggttctttgaaactcagaaattgggttctttaaatgggaagcagaccatcaaagtctctctgagcctacaatattcttgaagaatggttttaacagcatgatttcagctgtacctaaccagcatccataaaattgtttctgtgggaaagtggaatccgaggtccattttggacaccagaaatctattcagtggtggctttgattttgtattagaaaggacttaaggggagcaattatgcatgcagaggaggttgtatttgcatatacagtaaattgtttttagttagattgtatgattactttgaggtggagtaacaggttaaacatcctcatgcattaattgcctttcttattgatattgtatggactgtcagaggcagcagccctggccactgctggtggaaaagtaaagagcagaaagaaggtgagaggaagggattacagcagaggctctcaaagtgtgtttccagtaccagcagtagcatcatggcttgggaacttgttaaaaatgcagtcttgggttccaacccagacctactaaatcaggaattctaagagcggggcttatcccagaagaagaaatgagaaaatttatgcggcccgggctttaacaagcctcttcagtgattctgatgtatgctaaagtttgagcgaggtttttgggcaacaataatctagtcttaaaattcacttcaactgcagaaaatgaggtacagataaaaacattatgaatgaaaaagagaaggtcccttctaagccaacagttctcaatcttggctgcactgcaatcacttgggagctttaaaaaatactgatgcctgggcaccacccccagagattctgatttaatcagtctgggatttggcatgagcaatgggagttttaaaagctccccaggtgattctaacatgaagccatgaatgagaaaccactgttctaagccaactgctacataattatcttccaaagctgccaacctgctaggaaacactgaaacacacacacacacacacacacacacacacacaaataaaaggactaaaaatgtgaagagtaagttcacttgctagtaatttacatttcaaggtaatgaaatctctaatgcaatgatttaatcatgtataggcagaggcccctttggctcccagcagtttggatattacatgcggcagccacgaaggacagaagattatgacgctgtggtcgtagcctctatgctggtgagagaagacatctatgacaacaagtaggcatgctatcttcgatggctaggtagacttacttggcaaagtccaattccataaatctctatggctcagggattcagaaagcatatatagcctggacatcaccaaggaagtaacaccactgaggagtgttcaacatcagtaatggattggagacaaaattatctctgcatagagatactgtttttacccatgtccctgcttggcaaactccctacttccttctgatctttcctaccagaaagtctggattcaacactcgagcactgtaagtgggtctcatggttagctcagttggttggccaagacctggactaatatcatgtggccttggctaagtgaagctgagatgccagtaattcttatatataatgtatgatataattccctatctcaagtgttctgaacctttgagagacagtgtgaatttcttacaaagtactcacaatccaaacaggaaaacacatttctaaagttagtttcctggcataaaatagtttacaaaaaagggaatttttttgactgttatttcacctcttccaagagcaaataagtctcatgttccagctaatcatggctccctttctcatccaacctgtagactgatataagactacagggtgttccaaccacatttgcatcatcagacccttctgtcagctcaggttgttaactcagccttatagtaagttcgaagaatgacaaaaccaagcactaaaatatgattgtgataactagcttggttataaaccatggctgagaagcagaatctagtgccacactgccgggattcaagactttgcccagttacttatgtggcgttgaacatgtacaaaatagggataataatagtacctatctcagagggtggttcggaggactgtgacaagtttattagtataaccctggcacagaataagctctcagtaatctaaccatatctggagatcaaaattttattttattttgacccaaccattcaatgtatggaaatctgtcctatagaaatactcacacaagaatgtaagaagatctggtgttccccctgatcatttaattacaaaagaattatactggtacatatacaccatgaaattctatgcagccatagaaaggaatgagatcatatcctttgcagggacatagatggagttggaagacatgattctcagcaaactaacccaggaacagaaaaccaaataccacatgttctcacttataagtgggagctgaatgatgagaacacatggacacatggtggggaacaccacacactgaggcctgtcaggttggagagggagagcatcaggaagaatagctaatggatgctgggcttaatacttaagtgacaggatgatctgtgtagcaaaccaccatggcacacatttatctatgtaacaactctgtatatcctgcacatgtagccttgaactttaaagttgaaaaaaaaaaaagaattataagcaactaatgtccatcactaggggaaatactaaataagttatagttttctttttatataatgaaatactatggaatagatacgaaggtaggtcctgttaagtactgagaattggcacagggtggaggtgaggagcccaaatctagagtcagacatgtgagtccagtgccagccttcttgtgcactggctgtgcttccttgtacaaatcacggaacttccttagctgtaaaatgggaggaatgacagtactcccctgaaggttctatatagacatttgttaaatagataaatgctgacaaggaagacagcctacatacctaacttactagtggttatacaaggaaatgggagtaatgatttcctttttgactttttgtattgtttaactttttaaaaaacgcatgtcatttttctgtcaccaaattttaaaaataagcctgggccagatgcagtggctcacacctgtaatgccaatactttgggaggccgatgtgggaggatcacttgagccaggagtttgaaatcagcctggtcaacgtagggagatcctgtctctaccagaaaaaaataaaaatacacaaataaatacaggaaaattagccaggcatggtagcacatgcctgtagtaccagctactcaagaggctgaggtgggagaactgcttgagcctggacatcgaggctgcagtgagcaatgattgtgccaccatactccagcctgggcaacagagcaagatcctgtctcaaaagaaaaatcggcctagtttttcggcatatggtggtctgattgaattagttgatatgtaactaaaagagtctcatactaacaggaatgttggttattaccattttcattttaaataatgggaaattaagacagacaatgttaaatgatttattaagttcagatattaagtaatttgtaaaatgaaactaaaatagaaacaatgtagtgtaatctaaaggacttgagttttgaggatcagacagtgctaggttcaaaatccttctatgcctcctagcgccttttgcaaattatgtaacctctctgaaactcagttttattatttggacattgaggttaatggtaataatagctaacatttattgagtgcttactaaatgggaagcattatagcaagagctataaatgtattatctcatttgatcctcataaaaactctgaggtacttgtttcacaaggatgaaggaactgaggcacagaagggttaaatgagtggtccatacctagtaaatagtggagccatgacttgaacccaggtcgattaacttcagccatatgtacttcagagggagattatgagaagatagcaaggcactcaagaaattatttgttttacccctttgattcactagaatgtatggcctaaaattttaattttatgttataataaacttctaaggggtgtgtgattctcttacactgctcacgctaaagataactgactgcttgatatacttgtttcattgagaagtggtggcccataccagggcaggtgacaaggacagtggttcttattcatctgggcagcagcttcagtgctaattctaaacacaggtggtgagagagacagccaacaggaagggggaaggaatcactgctgacatgtgcaactgggaagattgatggtttccctctctctttttccccaatgtgtcggcctgggagcagagacgtagaagccgctgtgctgaggacagtaaaatacacagcacagtgtctgcctggctgcaacactgattaatgagaccaaaatgacacagaaaacaggcagtgcttcggaaggataattcacaggcatttctttatttaatcatttcaacaaaagcagttcccataaactgcccggtttgaactagaatctagaattccccgtggttagagcaacacaggggtatatttggtgggatgcgtggatcaaaga

SEQ ID NO: 96270 - DNA, 15933 bp, Homo sapiens
acctgaattcttcaatgactttacctcacctatctcagtgttattcttgcataggcttatctaccttgaaagacaacaaacaatgtaaggatatcaaccatgtcattttggtcactgtatttcccccaaggactggcacaggatctggcatattgtgagtactttataaatgtctcataattcaacccagaaattccacttttaggaatttatcgttaggaaatatttgtaaaagtatacaaagatgtattgcaagagagttcatcaaagaataatttattggccaggcatagtggctcatgcctgtaaccaacactttgggaggccgaggtgggcagatcacttgaggtcagcagtttgagactagcctcgccaacatgacgaaactccatctctaccaataatacaaaaataagctgggcgtggtggcagacacctgtaatcccagctacttgggaggctgaggcaggagaatcacttgaatctgggaggcggaggttgcagtgagctgagattgcaccactgcacttcagcgtgggcaacagagtgagattctgtctcaaaaaaaaaagaataatttacgacaacctgaaatcaaatacctaacagtaggcaacaagttgaataaatgatgttctactatattatagcacattatgcaattattaatgatggcattggcccacattaattaaagaaggaagatattcacgataaattactagctatgggagtcagactaaaagaatatgtacaatgttgggaggtggcagactctcagttattaaaaatacaggctttgttatcaagattcaggatatgaacagagctctgagaattattaactgtgagaatttggacgcattaattttcagtgtctcagtttcctcagatataaactaaggaataaacagtacctaccttatagggttgttgtgaaggttaagaacataatacataaagcacttaaaatggcttactgtaagcactaaattcagtgaaaaacatcacatacccctcattccattattttaaaaattatcttcaataattttttttttttttttttgagacgcagtctcgctctgttacccaggctggagtgcagtggcaagatctcggctcactgcaagttccacctcccgggttcaggccaatcgtctgcctcagcctcccgagtagctgggactacaggtgcccgccaccacgcccggctaattttttgtatttttagtagagacggggtttcaccatgttagccaacatagtctcgatctcctgacctcgtgatccgcccgccttggcctcccaaagtgctgggattacaggcgttagccaccacactggcttcaataattttcaatttaaaaatttggtatttgctgataaattatctttaacaatttcaatagcagtccctttctctaaagggatttttgagatttttgagatttttcagcattgctcttaaaacattgataaatgttagaactaggcttgaaaatgtaattctacttttttttttttttttttgagacacaatcttgctctgtcgccaggctggaatgcagtggcatgatctcagctcactgcaatctctgcctcccgggttcaagtgattcccctgcctcagcctcccaagtaactgggactgcaggagcatgccaccacacccggctgattttttgtattttagtacagacagggtttcaccatgttggccaggatggtctcgatctcctgacctcgtgatctgcctgcctcggcctcccaaagtcttgggattatagagatgagccaccgcacctggcctatgtaattcttcttaataatgttatcaaaaaaggattcacagaaatcaaaaagtagagcaaggcccctgttactttccatccctagtagctccaaagggacaccattccatatcataaaaccagctcaagaattttgctttgataaggtatcatattaaatactttttttttttttttgagacagtttcgctcctgttgcccgggctggaatgcaatggcaagatctcggctcactgcaacctccaccttccgggttcaagtggtcctcatgcctcagcctcccaagcagctgggattacaggcatgcaccaccacgcctggctaattttgtatttttagtagagacagggtttcaccatgttagtcaggctggtctggaactcctgacctcaggtgatccgcccaccttggcctcccaaagtgctggaattacaggcgtgagccaccaggcccaacctctttttcctttttcaaacaaagtgttgcagagtctttgtctccttaaatgatcaattgttgtgattctattttggaaaacaaacacatgtgcacaagtgcacagaaaaaaatggaaaagcaaacattagaatagtaatatttattgtggatggtgagactacgggcaacttaaattttattcttatagagtgaagatgactgggtggtaggggatggagaaaatctgttctgaatagtactaaatatagctggcagcttaaaccaggactttcttttttttttggagactgagtctcactctgtcacccaggctggagtgtaatggcaggatctcggctcactgcaacctctgcctcatgggttcaagcaattcttctgcctcagcctcccaaatagctgggattacaggcaggcgccactgtgcccagctaatttttctatttttagtagagacaggttttaccatattggccaggttggtctcaaacttctgacctcaggtgatctgcccacctcagcctcccaagtgttgagattacaggcgtgagccactgcgcccagccaattaaactattttcatacacatagaattaaaaacagagttgtgaagaaggaatatcttttagttgttaagaaaattgtgattctataagcctgtgacatgagtgggttttgggaaaataaacaacagtgtggcacaaataagtaacacccatcagttctttaactgttcttcatcaaaacgatgggctattttcactctcaagattcttctatgaatgaacacaatcaagcgacattcctaaattcagtaaaagtataccaaagcagacagaacagtgtggtaaacaacagtttatctttttttctccactaagaaactagttttatattatgtataatccttgcaaaatgttttataaatctctagcttattaagagcgattcatacatgattaaaggttttgtgagtcatcttgttcaaaactattgcttagacaacatcgatcacaagctttttttccttctcataattaacagtatttattaatggcaaaaagctgcatcacatggagtgtggcttatttaatcatttcctactattagacactaattttgtgtctaacattgaaaaacattctcaaaggttacagactttgattctaggccagtagatctgaatcttaatggatcatgtttgataatctcattaaattacatattttctccccataaaagtggcatattaacagatatctataacaattttacgtacaatttcaaagagtatctggtcccctgaaagcctcaaatgaattcaaattacttctggttaagaattcctgttctatggccgggcacggtggctcatgcctgtaatcccagcactttgggaggccaaggcgggcagatcacctgaggtcgggagttcaagaccagcctgaccaacatggagaaaccccgtctctactaaaaatacaagattaggcaggcgtggtggtatatgcctgtaatcccagctactagggtggctgaggcaggagaatcgcttgaacctgggaggcggaggttgcggtgagctgggatcacaccattgcactccagcctgggaaataagagcgaaactccgtctcaaaaaaaaaaaaaaaaaaaagaattcctgttctaggctgggggcggtggctcatgcctgtcattccagcactttgggaggccgaggcaggcagatcacttgaggccaggagtttgagaccagcctggccaacatggtaaaacccggtctgtactaaaaatacaaaaattagctgggtgtggtggtgcaggcctgtaatcccagctacttgggaggctgaggtataagaatcgcttgaaccacggaaagggaggttgcagtgagctgagattgtgccactgcactccaacctgggtgacagagcaagaccctgtctcaaaaaaaaaaaaaaaaaaaaaaaaaaagaattcctgttttagactatttaagcatctgatctggctcatttattttttactaggaaatactcaccacaattggcttagtattttcattttccccccatctatagaaggctgatgtagaattgctccaaatcactacttaagaatacataactaaggtttattaagtactaacgaggtctcaggaactgttctaagaactttacacatagtaattaaaagaaggcccacagaagtaatgaaaaacatctaccaaatgggtatgtgcatacaggctctcgggaggggacctaggtatcagctcaatggacaggacatttatggagaatgaaacaaatattctcatgtcctaagaaataagaatgcatttcacagaagaaagcagaaacacccactcgcctcgaccttgacttaaacaggcaacagcaattcattcctcctcccgctcggaccccttttcttaaagaattgggcaggactggctaataagggaaccaggcttttcttgcagcccagcctcgcatagggcacaatgcccccaccgcccacccacacataaccagagtaacataagagagatggtgttgttaactcttcccagtatcaaagaaaggccagggtcatggatgcccggggctagaactggagttcacaatagcttcctggaagcaatgctgtggttctgaaacctgcagctggactcttcagagttgtgagtgcacgtgcgtgggtccgggtccgcgaggaggtggtgtgggagtcccttccaggagcaagcctgggcgggagcgggggctcgttcagttctaatattcctatcccaaggtcgggtctgagccttgtttcgctgttgcccaggctggagagtagtggtgctatcatagctcgctgcagcctcaatctcctcctaggctcaagccatcctcccgcctcagcctctcgagtggctgggaccacaggagcacgccatcacacccggctcattttttaaatttctggtacagatgggagtttcgctttgctgcccaggctggtctcgaactcctggcttccagcgatcctcccgcctcgctctcccagagctctgggattacagatgtgagccacctggtccggcctagtctgcgcgtttctgctgggagtctttggcgtgcagaaactgaccgagggccatttctctgcagctgggcccggtgtgggcagaggatgctggggtcagtcacgcactccacggccacaacaaccttcgctcatacaatagtctctgcacccaagtcagccgcacagactccgtcacgtcccagccccggccccgtcacgcccacgacacacacacccgggcctgaggcgcgggctcccgcccctctgcgatactgcagtggccccgcttacctctctttaccccctgggccgcagcgcttttcctacagattaccaggaccgacgctccgggccaggactgctcactcggggcgcgaacccgaggcacagcgatgcccgaacggaggaagccgctgccgggtcacgccacaatccccggggcctaacgggctgcgcgcggaggctgctgggagggccgggcgcgctcacggagtgcgcaggcgcggccagtctcaagggtccgctcgctggtgcagcccctgctctgcgtgaacccggagccggagctaggtccgtcccagcgaggctgcgcttcgagtcccttagcgcctggggacggcgcggcagggcctggaggggagcggggacagatggctggcgcgttaaagaggggcgcccgcgaccgcctctctatagtgccaactagggagccctgtgagcgaggacggcgctgcgagtctgtccctggcgcgctcctgggtgggattctttcactgggtgtggctgttgggatttgagaccgtgtgactccggagattcggggaagccagttcctatattttccatttctgtatttttaaatggtaaaaacaatgaaaaggagaacaatattttgtgaaatatgaaaatcatacatgtcaaatttcagtgtccataaataaaagttttattggaacatagccgtgtttgattgtgtactgtctattgctatatttgagctacaaggacagactcgagtagttacacagaccagatggcccacgcagcctaaaatacagtcagttctcactattcacagtagttatggtctataaacttgctacaaacacggaattagtgaataccattccactgcttctaggggaaatacagggttagtttcctgtaagcatctggtcacattttagtcaaccgatgaatgcataagcttattttattgtgtttattttctttttttctttttttttttttttttttgagatagggtcttgctctgtcacccaggctggagtgcagtggtgggatcttggctcactgcaacctcctccrcctcccgggttccagcaattctcctgcctcagcccccagagtagctgggaatacagatgcatgtcaccatgcccagctgatttttgtattttgtagaaacggagtttcaccatgttgaccaggctggtctcaaactcctgacctcaggtgatccacccgccttggcctcccaaaagtgctgggattataggcatgagccaccgcgcctggccttattgtgtttctatttaaacactttaatatatattattgattcattaacattgaactcatggccaacagctccataactcatgcctgaatgaagcttatctaacacatgtattttttctgtaagacacatgaccgctttctcattcataggaacatcaacagcactttagtactactacatttggggtccctttgaaacagcaaaatcaccagcaaaaaacaaaaatatgagaagccaaggtactaaatggactgcaaaaagggtacctgtttacagtatgagagctgaaataagaagatagagggtcactttgtttgactttggctgagaacatgcctgttaagggactcaaaaakgttcaccgctcttcggatgtccacaaatgaccacaaaggtgctgcaaatattgactctgggtttataaaaaagttttagcaagtagatgaattcacaaattcagaatctgtgaatgaagattgactgtatttactatcaggccctttaaagaaaaagtttgccaatccctgtttttatatgtccctcttagttatacagctagtgtttaaaaactacttgaaataattattttccctgtgccaccaattatgtctataattgattgtaccccattaaataagcacaaagaaaaaagaaagctttctttatagaagaaggccagctaataactatcaagggtttgattttacgtggcttagacacgctgcttcaaatgcatttaagatgtttggttttaacaaggattttgcaacagtatagtgttttccttaagttcaatgtcatttctatgtcatggcagctgtcacctgcagttaggtaagacagtgacatcattaacatggatgcattttcatggcatgaaggctagccattgatggggtaatataacacaatttatcagtaaacgctgagttttctttgaagtcagtctctgatttcttacagtgcttgatgtctgccttgcctgctagtgaccaattcccctgcgtctttacagagccttgttactcactcagtgtaaagacagtgggggaaacaaggtttcccaaagtatccttatgtgcaaaagtgtttcttactactttggaaatactaagctgagtttaatgtttattctttttctaccaacagacacaaaaaggacaagcacatgccttagaatattcaatacaattttctacagcgatatggttaaatactcttctgtcttcactacttttttgtttttactttacttggaaattttaattctctaggaataacggggcaggagtctaaaataatactttgtgggagtgaagtatatatttttttccaagtaaaaaaaaaaaatcaggccaggcgtgatggcttaggccaggcgtgatgactcatgcctgtagtcccacatactcggaaggccaaggcaggaggatagcttgagcctgtgagatcgagattacagtgagctatggatcggccactgcactccgggctgggcgacagagcgagaccctgtctcaaaattaaaaaaaggaaaaaaaaaaaaaaaagtctgcgctccccggggcccaaggagaggacccaggagaggagtctggctccttttgcctcagacgagtccagggcgccgggttaactggtctaaagtcccaggcgctttctgggactgctcagccaccggccgctcccggcaccaggggacgccggacgccctctggacaatcggcgcacttgccacgatcttggacgggcctcgggcctcgaccttaagattccccgctccagctccgagatgtcagcaacgctgatcctggagcccgcgggccgcggctgccgagacaagccggtgcgcatcaccatgcgcggcctggcttcggagccgctggacacgctgcgcgcgcgtccctgcgcgrcgagaaggctgggctcttccgctactgcgccgacgcccgcggcgagctggacctggagcgcgcgcccgtgctgggcggcagctttagggggctagagtccatggggctgctctgggccctggaatccaagaaacctttttggcgctttctgaagcgggacgtacagattccctttatcgtggagttggaggtgctggacggccacgaccccgagcctggacggctgttgtgacaggcgcggcacgagcgcgacttcctcccacaaggggtgcggagcgattcggtgcgcgcgggccgggtgcgcgccacgctcttcctgccgccaggacctggacccttcctagggatcattggcatctttggtaatggagggagcctgttggaatatcgagccagcctccttgctggccatggctttgccacgttcgctctagcttgttataactttgaagatctccccaagaacgtggacaacatacccctggagtacttcgaagaagccctatgctacatgcttcaacatccccaggtaaaaggcccaggcactgggctttggggcatttctctaggagctgatatttgtctctcaatggcctcattcttgaagaatgactcagacacagtttccatcaatggatccgggatcagtgggaacagaggcataaactgtaagcagaatagcattccaccattgggctatgacctgaggagaatcaaggtagctttctcaggcctcgtggacgtcgtggatataaagaatgatcttgtaggagggtataagaaccccagcatgatttcaatggagaaggcccagggccccatcattttcattgttggtcaggatgaccataactggaggagtgagttgtatgcccagtctctgaacggttacgggcccatggaaaggaaaaaccccagatcatctgttaccctgggactgggctttacactgagcctccttacttccccctgtgcccagcttcccttcacaaattactgaacaaacacgtgatatgggttggggagccagggctcattctaaggcccaggtagatgcctggaagcaaattctagccgccttctgcaaacacctgggaggtacccagaaaacagctttccctaaattgtaatgcgtttgtctgttgttgacatgagagagtcaagatcagattctagtgttcaataaccctatgtgaatcagctgtctcctggataacattaaagccatgtctttgtcattaaaaaaaaaaaaaatcggccgggcgcagtagctcacgcctgtaatcccagcactttgggaggctgaggcatgcagatcatgaggtcaggagttcgagaccagcctggccaacatggcgaaaccccatctctacaaaaaatacaaaaatcagccaggagtggtggcgggcacctgtgatcccagctacttgggaggctgaggcaggagaatcgcttgaacccgggaagcggaggttgcagtgagccaagatcatgtcattgcactccatcctggaagataagagcaagattctgtctcaagaaaaaaaaaattagtaaactagaaatctctgaacaaagtatcatacatgtaatttaattttcccatagatacaggtaaagagaagttgttgagttacagcctctatctagcacagcaatctcctcaaaacacaaggtagccgcccggagaggccacagaggagatatctaagagatataacactggggatgtttgcaattggaaattaaatgacattttagaaatgtagttatcaatgtcaagccttgatagacatcagtctgaaacataatacatgttttatatataataaatttaaacagcttaaattctcatccattcaaaatgggagaaaaactaagtaaatgtgataaatgtattgaggtgtttggctttcaatcaatgcttcctgatactcgaaaagtcttcacagggaaggaaccaaataaatgcagagtatggaaaaaatgaagccatacacatattattgtgtggtaaatatttccattgaaagtcaaatctttacactcaccgaagcatttccataagagaaaagatgtatattagaaatgtaaatgtttttatagcaattgaaatctttacagaggtagagaaatctggtaactgttattagtgtagtagggatttaagctaagttcttgtctcatggtagtcatccaggttcttgatgttttgaacaaagaattggacaaaatgcacaaagcaacaaaacaatgaagcaacggaagcacagatgtattgaaatgaaagtacactctacagagtgggagcaggaccaagcctcaaagagtgctggttacagaatttcctggggtttaaataccctctagaggcttcccattggttacttggttacaccctatgtaaatgaaggagtggcccacaaccagtctgattggttgcagaagacaggaccaatcagagactaaatagtagttaccaagttacgccctatgcaaatatctgattgattgcgggaggggaccaatcagaggtactttccatttttcatctgccacacagtgcaaaggtagtaacctctgatccttttgttatttgggtgtggagagacggggttttccttttgattcagttctaagaagtcagcgggaatggccttaggttccctgcctccagacctattctcctgtctcacctccatttatcactaaagagttcacaatacatgaccctccagaaaagagacatgtgacattaatatgtcagactcaaccagtgtcttcacactggaatgactttattagtgtgaagctggagtaacattttatcattagcacagaacgagaagcattgcagatgatagagccttttttggtcaccaagtgacgcagccagtacactgttgactagcagtgatggtagcaggccttcttgccttggtcctgatcttaaagggaaagatttcggtatttcatcactaagtaaaaaatgtgttgttggttttttgaaacagggtctccctctgtcgcctaggttggagtgcaatggtgccatcagggctcactgcagcctctacctcctaggctcaagtagttctcctgactcagcctcctgagtagctgggacaagtaccaccacacccagctaatttttaaaattttttgtagagatgaggtctcactatattgcccaggctggtctcaaactcctgggctcaagtaatcctcctgcctcagcctcccgaagtgctgggattacaggtgtgaggcaccatgcccatcaaaaaatgcgcttaaatttctccctggatatcctttcttagaagtttccttgtatctctatttttccaagaggcttgatgataattggatttgaaattctatcatcttttctgtatcttttgagatgatcctggggttctttctaaattaatacgttaatgtggggaatcatattaactgatttttaaataataagtcaaacttgcatttctggaataaatatctcaagttggtcataatctagttggctaaaaattaataaagttgtttccttaatgatttagataagaactttgcatctaccttcatgaatacaactaccccataattttcttttctcatactgtctttgagagattttgaaatcaaggtgatattttctttctttgatttttttttttgagaaaaagtctctctctgttgctcaagctggagtgcagtggcatgatctcagcctactgcaacctccaactcctgggttcaagagattctcctgcctcagcctcccgagtagctgggactacaggcacatgccaccatgcccagctaatttttgtgtttttagtacagacggggtttcactatgttggccaggctggtcttgaactcctgacctcgtgatccacccatctccacctcctaaagtgctgggattacaggtgatcatattttcattaaagaagtcactgtttctgcctttttattctctgggaaagtttactatgtaaggttggaattcttcttaacttgaatgggttggtagaacttttcaattaaatcatttggaactgaaattctctttctgggttgctgtttgctgatagtcattccaaaaacttctatgccaaaaaagccacacactaggtatcttggttcatagtttactcagtgtaacacataataaatatctccctgaagccaaggaagaggccaccttccacccttcagggaacagcagtgagttcagggaacagtaatctctttctcaattccagctggtcttacctatagttcttgtgtgccagattcccttttgtatgttttgtacctttgtggatttgattacaagtggggtcgcaattgtggatagcctgaagatatgagaaatgtctattgtgggaaggtaatgaaggagagttggtgaccagcaggacgagagctttagccatggggctaataagacagagccaagtcagcagggacataagatgtaagagggctctggtgctcaggtagaactggataaaggatgggtgagctggagttaaacgttccatgtcataacaccaggaaagcaataaaaatgtttttattgtggcaaaatatacataatataaaaagtcaccattttaaccatttttaaagcataacatttagaggcacttagtgaattcacagtgtttttttgtttttgtttttgtttttgttttttgagacagagtctcgcattgtcgcccgggctggggtctggagtgcagtggcacgatcttggctcgctgcaacctccacctccacctcctggattcaagccattctcatgcctcagcctcctgagtagctgggattgcaggtgcccaccaccacacccagctaatttttgtattttagtagagatggggtttcaccatgttggccaggctggtctcgaactcccgacctcgtgattcgcctgcctcagcctcccaaagtgctgggattacaggcgtgagccaccgcgcccggctgaattcacagtgttctttcatcaccactatctagttccagaatatttaatcaccactcccctaaaaaaagaaataaaaataaaagccactgataaggtttggctctgtgtccctacctaaatcgcatctcaaattgtaatccccataatccccatgtgttgaaggagggacttgatgggaggtgattggatcataggggcagtttcccccatgctgtttttgtgatagtgagtgagttctcaccagatctgatggttttataagtgtttgacagttcctccttcacactctctctctcgcctgctgtcatgtaagatgtgcttgcttccccttccgtcatgattgtaagtttcctgaggcctccctagccatgcggaactgagtcaattaaacatccttcctttataaattacacagtctcgggcagttctttatagcagtgtgaaaacgaactaatatacctacatatcttctaagttgctttccattccttacttcctccagccatggcagctactaatctgctttctgtctctatggatttacctgttctagatactttcatacgagatgagcccttttatgtctgactcctttcacttagcataatgttttgaatattcatccatgctgtagcatacatcaatactttatttctttttctagctgaatactattccattgtatgaatgtaccacattttgttgatccatcagtagatagaagtgcgttgtttctaccttttcgctattgtgaatattgctgccataaactttgtggacaagtttttgtttaaacactcattttcaattcttttaggtatatactcaatatatacaagtgggccaggcatggtggctcacacctgtaatctcagccctttggaaggccaatgtgggcagatcacttgaggccaggatttcgagaccagcctggccaacatggtgaaactctgctctactaaaagtacaaaaattagctgggtgtggtggcgtgcacctgtaatcccagctacttgggaggctgaggcatgaaaatcacttaaattcaagaaggggaggttgcagtaagccaagattgcactccagcctgggcaacagtgcaagattctgtcttaaagaaaaaaaagtctttaaaaaataatatatagcatatttatatatatatacacacatacacacaaagcatacatatatatatatatatatatatatatggaattcctgagtcatacagtaattttatgtttaatttattgagtaaccaccaaacttttttccacagcagctacaccatttacatttccataaacaatgtatgatagttccaatttcgctacattctcactagcacttattttcctttaaaaaaaaaattattggccagacacagtggctcacgcctgtaatcccaacactttgggaggctgaggtgggcagatcatgaggtcaggagtttgagaccagtgtgaccaacatggtgaaaccccgtctctactaaaaatacaaaaatcaggtggacgtggtgctgcacgcctgtaatcccagctgctcagcaggctggggcaggagaaatgcttgaacccaggaggcggaggttgcagtgagccaacatctggccattgcactccagcctgggcgacagagcaaggctctgtctcaaaaaaaaaaaaaaagatttgtccttgaatgttcatagtagttttattcacactgccaaaaactggacactacccattctctatcaactggtaaacagataaacaaattggaagatgtccaaaaaatgcaatattactcagaaaacaaagaataatttactgatatatgcaacaacatgaatgaatctcaaaagcactgttaaatacaagaagctttacataaaagactacatactgtatgattctatttatatgaaattctagaaaaagtacaactattgtggacaggaagcagaacagtggccctcaggggctggggcaggggatggggaggggccggactgcaaaagtgcaagagtggccgggcgccctggctcatgcctgtaatcccagcactttgggaggctgaggcgggcggatcacctgaggtgaggagttggagaccagcctggccaacatg

SEQ ID NO: 96271 - DNA, 46364 bp, Homo sapiens
  misc_feature (1)...(46364): n = A,T,C or G
tcaaaannnnnnnnnnnnnnnnnnnnnnnnnnnnnnnnnnnnnnnnnnnnnnnnnnnnnnnnatcaacttactatatcttggacttttttgtgtgtgacggagtctcactctgttgcccaggctggagtgcagtggcgggcgccatctcggctcactgcaacctccgcctcccgggttcaagcaattctcctgcctcagcctcctgagtagctgggattacaggcatctgccaccatacccagctaaattttgtatttttaatagagacggggtttcaccatgttggccaggctggtctcgaactcctgacctcaagtgatccacccacctcggcctcccaaagtgctgggattacaggagtgagccaccacgcccagcaagacattttaaaaaacattttttcccttgtgtatgtcacacaaagggtagagactttgaaaagggcaacttcactttcagcaaatgtgctagccaaaacataccttttaagacataaaatatgaatgcagtacttagtgtagttgataaggtggtagacagtttggttgatttgtcttttctatttttcccttctctatttggttattaagtaatatgtaaataggtagaccatttgcagtgttctcttatgatagtaagatagtgccattagagtgcaatgaaatgttgcaccaccacaccaccctacctttgcaatttatataagtgcatgtcactagaatgactgttggcatttatcagctaagttctgaatggcttgtgcagttgaggtctctgagaggtcactccatccccttaaagtggtaggtttccatttccatcatcaggatagaggtaggagttcacacaagaaatgagacaccaggatgttgacttcaagcagacaggaaaggagattacttttcctagccctcattctctggggtttgaatgctaaattgcttaccagtactctaagtaaaaagagaaagataacttctgccatgtggtagcatgcttggaacattccctcttggaatccaatctatttggagaagccacatggagaacaactgagacccatcagttaacaaccccagctgaattcccagccaacaaccagcaccaactacctgccattacatgagtaagccatcttgaatattccagccttcagataacaacagcgctagctgttgggggtgcagaattgaacatgggtctagttaacctacacagagtcttgggttgtttctatatagaagagacataaagccaaaacatcaggtgaaagagattatctagttttattcctgaccatattacttttttggggggttcggagggggaccatattccttttatttgttcagagtaaaaactttaaaaatgttccagcctggtcacagtatgctgaaatccagagtacccataattgggcctgcatgttaaagagggtgaggtgatacccccatatttagccagagattttcaagggacaggggaattttgtgggatcacatttggggttataaggtccacaaggaattttccaaggaggtttttccctttgttgctgagaagacctgggtttaattttattaaaggaaatatccatttccttacagaaactccatatgattttctttgctaagaaatatgtacaagctcaactccactaataaaggaatgtaaattaagatagtttgagataacattgttgcctttctcattgcaaatatttatagtatccagtgttgccaaaggggaaatgtacactcttatttactgcaaatgtacaacatcactgagaggcattaatacactgcacttccactcttaaggatatatcccaggcgtaaccaggtagctcaaaggtacagttaaaatcattttcattttagaattatttataatttcaaaaacttagaaacgatctaaatgtctaatacacacaaagagaagttgtacattctggttcttccatacagtgggcattggaggtagttaatggacatggaaaagtttcatgacatattcaatcaagggactcagcccggccaacatggtgaaaccccatctctactaaaaatacaaaaattagccatgtgtagtggcacaagcctgtaatcccagctactcgggaggctgaggcaggagaaccacttgaaccggggaggcggatgttgcagtgagccaagattgtgccactgcactccagcctgggcgacacagcaagactgtctctaaataaataaagggactcttcttcaagtcatgtgccattgataatgtggtacaaaataggaccaaaaaatatttaaagcaaaaagaaattcactcattaacttaagtcattccaaaaacatttgtttagcattctaatgtaccaggcattgcattagacatttaggttaagaagtaaaaaattcagtccctgccttaaggactcaattcagtacgttaagcctatgaaaacctaaaagagagacttccaagagaaggtgataccagacttgaattttaaagaataactaggaataagccagatgaaaaatttggggaaggttattccaggatatgaagtctccagaatggttggacattttaaccttagaagacaactgaattcaactatgtctcttaaataattaggttgttcttctagatagaactatagagcattaaaagggttgctttgtttatatgtgttgaaaaatgcatgctatcacccccacttaggttacactctttattttttttattttatttatttacttttgagacagtctcccttggttgcccaggctggagttcagtggcgcaatctcagctcattgcaacctccacctcctgggttaaagcaaatctcatgcctcagcctcctgagtagctgggattacaggtgggcgccaccatgcccagctaattttttttgtatttttagcagagacggggtttcattacattggccaggctggtctcgaactcctgacctcaagtgatctgcctgcctctgcctcccaaagtgctggaattacagggatgagccactgggcccagccacactctctttgtagatactcttccctccccccgccctcccattagacgcgagagtcttgctgtgctgctcagggtggtctcaaactcctgatctcaagcgatcctcccactgcggcttcccaaagtgcttggaactgtgtaagtcgccacaccagcctataggcactttttatgtataaagaacctgagtttgggtaactgtgatcccatgacattaaatagtatcgtgattacttaaaagctcagcataatgttttttacccttgtgcaaaggagaaatggaactgaccctgtgctcacacgataggctgccgaaaacagatcatcctgaatacttggtttttttaatgaatgaaagttatgtggctgggcacgctggctcacacctgtaatcccaatactttgggatgctgaggccagcagatcacgaggtcaggtgttcgagaccagcctggccaacatggcgaaaccccatttctactaaaaatacaaaaaaatagcagggtgtggtggcaggctactgtaatcccagctactcgggaggatgagacaggagaatggcttgaacccaggaggcggaggttgcagtgagccaagatcgcacctctgcactccagcctgggcgacagagcgagactgtctcaaaaaaaagaaaaacaaacaacaacaacaaaaattatgttagcataattaagtgcccatgccaaaattataattgttacatgaaaatggtgagtgatcactccccagctgggcctgggacgccacagctgagagacagacactcatggcaaatgggaccgctcttctcattctgccttccttcgggccccctggtctctcctccccgcccgtgggaggtggtgcgtgggaggcaggggtacagaatctagcccaacatctctgcccccgccctctgcctcatggtgtcggtggatgtggggggccttctgatctagtttatttatttattttttaaaattttgggggccaggcgcggtggctcacacctgtaatcccagcactttgggaggctgagacgggcggatcacctgatgtcaggagtttgagaccagcctgatcaatatggagaaggcctatctctactaaaaatacaaaactagccaggtgtggtggcacatgcctgtaatcccaggacggaggctgaggcaggagaatcgcttgaacgcaggaggcagaggttgaggtgagccgagatcgcaccattgcactccagcctgggcaacaagagcaaaactccgtctaaaaaaaaaaaaaaaaaaaaattgggccagacgcggtggctcacacttgtaatcccagcactttgggaggacaaggtgggtgagtcacctgaggtcaggagttcaagaccagcctggccaacggggtgaaaccccagctctactaaaaatacaaaaattagtagggcgtggtggcaggtgcctgtaatcccagctactagggagtctgaggcaggagaattgcttgaacctagtaggcagaggttgcagtgagcgaagatctcaccactgcactccagcctgggtgacagagtgagactccagctaaaaaacaaaaattaattttgttttcaaaaaacagaaaaggaaaaaaaatggtgagtctgggaacggcaagtaggttgttaatgggacttgactagagatgaagctagaggccagacgaggtggctcatgcctgtaatctaagcactttgagaggctgaggtgggcagatggcttgaagccaggacagcctgggcaacatggcaaaaccctgtcttaaaaaaaaaaaaaagcccagcacggggtcacgtgtctgtagtcccagctactgggtactggagaggctgaggtgggaggatggcttaagcctgggaagtctaggctgcagtgagccatgaaggtgccactgcactccagcctctgtgacacaatgagaccctgtctaaaaaaaaaaaaaaaaaaagagaagagactagagaggtgggatggaccactgtaaacctggctttggactttcagactggactctaccctgaaggcaacctgctgcctttagaggatttcaatcaataacgtaacaggatttcactagcctcttaagaaaatcccagacagtcggggtggttcatgcctgtaatcccagcactttggggggccaaggcgggcagatcatctgaggtcaggagttcaagaccggcctgaccaacatggagaaaccctgtctctactaaaaatacaaaaaatcagccgggtatggtggcgcatgcctttaatcccagctactcaggaggctgaggcaggagaatcgcttgaacctgggaggtggaggttgtggtgagcccagatcgcgccattgcactccagcctgggcaacaagagcgaaactccatctcaaaaaaagaaaattactagcagctacccaaccctcactatatatttgggtagaatcatccattatatagaactgatggagtgcagtgtttacattattctataatttggattttaaagatgaaaaattgtgtgggatgagatgattaacatattttcattccagaaaggggcttagttttaggccttttcctaagaatgttgagaaaccaaagattaagaaaaatgtcatctccccatagatatcacactatctttagtgaggagctgtgtataagtattacttaactgttaagcaaataaatgtatttggaagattcatgttgctgtgtgtggcacacagtcctaggaaactggtgtgacacagtcctagaaaagcatatggtcacctttgtcatacatgcagccaggctcaaatatagaaaatgacaatttgaagctgtaattccccaattcagtgggtcttaatcttcagtcattagattcacctggaaccttaagcctcacttgatacagtttataaatgctaatacccgataggtgcagcaccaacataatgcgcatggaagtcttggaatcatttaccaagaagatcctgagcacagaagttggtgagatggcaaagcagtatatagagaaaagtcttttggttccagaccatgtgatcacatacctaatgatgtctgagttggagaataggtgtggccagcactggctcctcgatggttttcctaggacattaggacaagccgaagccctggacaaaatctgtgaagtggatctagtgatcagtttgaacattccatttgaaacacttaaaagatcgtctcagccgccgttggattcaccctcctagcggaagggtatataacctggacttcaatccacctcatgttcatggtattgatgtactggtgaaccattagtccagcaggaggatgataaacctgaagcagttgctgccaggctaagacagtacaaagacatggcaaagccagtcattgaattatacaaaagccaaggagtgctccaccaattttctgggatggagacgaacaaaatctgaccctacatttacacacttttctcgaacaagatcacacctattcagtccaaagaagcatatcgaccctgcccagtgggagaaccaggaagaggtggtcattcattcaattgtgtgtgtagtattggtgatgtgtccaaattagaagctagctgaggtagcttgcagcatcttttctagctgaaatggcgaactgataggaaaacaaatgagtagaaagagttcacaaagaggccctcctctgcctttcaaaaggaaggtcacctacacatttaaggtgtctctgcacatgtctcaagcccttcacaagaaagcaagtacagccgggcacggtggctcacgcctgtaatcccagcactttgggaggctgaagcaggaggatcacgacgtcagaagaccgagactatcctggctaacatggtaaaactccgtctctactaaaaatacaaaaaaattagctgggcgtggtggcagccgcctgtagtcccagctactcgggaggctgaggcaggagaatggcgtgaacccaggaggcggagcttgcagtgagccgagattgcaccactgcactccagcctgggcaacagagtgagactcgtctctcaaaaaaaaaaaaaaaaaaagaaagcaagtacagtgtggcagtgtgggaatcctcaaaaagcatgggaagtataagtatttagctacataaatgttgtaagatcatatcttatgtatagaagtaataagaccgtttggaattactggacaaattgaatagttaaggtttctattcaggacaataaaatgtattttgaaagtgctgctaactattgatgctgacagtgtttcactactatgagtgacccaaacatattataaataagtgttaaagggaatggagcctgtggggttgagcagaatgttatactagctgtgcctgggctgagtataacagctttatgattatgggataacaaaatctttatttttttttttctgttccaaagattcatcctatggggtggccataaagtatagaattagatactaatattttgtaattcattataacatcaataaaccatttgttaaaagaaaataaataaataaataaataaatgttaatacccaagccaatcacatcagaatctcaagtgggacccagacagatatcagagatatcagtgttttttttatagctttctaggtaattctttttttttttttttttttttttgagatggagtcttgctcagctgcccaggctggagtgcagtagtgtgatctcggctcactgcaaccaccgtctcccagattcaagcgattctcccatctcagcctctgagtagctgggattacaggcacccaccatcatgcctggttaattcttgtattttaatagagacagggttgaccatctcagcctctgagtagctgagattacaggcacccaccatcatgcccggctaattcttgtattttaatagagacagcgtgaccatgttggccacgctgtcttgaactcctgacctcaggtgatccgcctgcctcagccgcccaaagtgctaagattacaggcgtgagccactgcacccagccatagtttatttctaaatcaaatgtggttagtaagctgggcacagtggctcacgtttgtaatcccagcattttgggaggccaatatagatggatcacttgaggtcacgagttcaagaccagcctggccaacatggtgaaaccctgtctctactacaaatccaaaaattagctggggctgggggcagtggctcacgcctgtaatcccaacactttggcaggcagaggtggacggatctacctgaggtcaggaattcgagaccagcctggccaatgtggtaaaacctcatctctactaaaaatacaaaaattagccaggtgtggtggcacacacctgtaatcctagctactcggcaggctgaggcaggagaatcacttgaacccaggaggtggaggttgcagtgagccgagatcgggttgctgcacttcagtctgagcgacagagtgagattccgtctcaaaaaaataaataaataaaataaaataaaataatccaggcatggtggcgcaccctggtaatcccagctactcatgaggctgagacacaagaatcactagaagccaggaggcggaggccgcagtgagctgagatctcgccactgcactacagcctgggtgacacagcaagactctgccgcaaaaaaaaataaagaaaaaagatgtggttagtaaacaagaaattatcatttaggaaaatgtactctaatttccagaatctaaatgagattaatggaagttccgtgatcagcaactacagaaaaaactatattatgttgtacagtaaaattagaaggtctttattcctctgctaaattaaaccttttaaaataggttgttagaacattttacttagtgtttaagctttaaaaaatatatatttcgcttatgtcattttaactagttgagaaaaatctaatacagaaagtaacacatagcagtactaatctagttttagttccatgagtcataatcgtagaagcttggaagacaaaaagagagagaaaaaaaatctattgaattgaggccctggaaaaatgaggtaagactaacttaaatggaaacaagtttggtaagccacctccagactatagtacacatttattacattcagcctttgtgttgtgttctttacagatgggtgagaattaagaaaagaatataggctgggtgcggtggctcacgcctgtaatcccagcactttgggaggctgaggaaggcagatcacctgaggtcagaagttcgagactagcctgaccaatatgatgaaacgccgtctgcactaaaattacaaaaattagccgggcgtggtgacatgtgcctgcaatcccagctactcaggaggcagagacaagagaattgcttgaatctgggaggcggaggttgcagtgagccgagatcgtgccattgcactccagcctgggcaacaagagctaaactccatctccaaaaaaaaaaaaaagaatgtaattttcctctttttctaattcaccctcagccattattaaccaattaaccaaggtggtggcatacaaggtgaacagaacaaytgagcaaattaatattactgttcttttcctttttgttttttttttatgttcccaaacatttgactattaaatatttggaaaccaaagtgaattcactgtttttttggtactactaatttaacttggaattgtgataattcagcaagcttggtaaatattaaccttgcaataggaagaatgaaagaagaccacagccatatcccctaaggtttcaattccaaatgcagagatgagtgcaactggctggctgtgtgtgaagaacagatggtgatcaggcaagaataaaagcaaagagaccatttaggacaacacttaaatagtctaagcaaggtggaggctgaaaagaaaaagaaaaggattcaagatatattttgccgggcgctggggctcacacctgtaatctcagcaatttgggaggcagaggtgggcagatcacttgaattcacgagttcaagaccagcctgggcaacatggagaaacccctgtctctacaaaaaaaaaacaaaaattagccaggtgtgatggcgccagccggtagtcccagctactcaggaggctgaggtgggagaatcacttgaacccaggaggtcgaggctgcagtcagccaagatggtgccactgcactcaaggctgggcaacagagtgagaccctgtctcaaaaaaaaaaaaaaaaaaagatatattttgaaaaccccatctctaccaaaaaaaaaaaaaagaagaaagaaaaaaagaaagaaagaaaagtaaagagcaccaacgggatttgttactgttttggacatgagggagtgaggaagagtgaaaagggagaaacaaggccgggcgcggtggctcacgcctgtaatcccagcactttgggaggcagaggggggcggatcacgaggtcaggagatcgagaccacggtgaaaccccgtctctactaaaaatacaaaaaattagctgggcgcagtggcgggcgcctgtagtcccggctactcgggaggctgaggcaggagaatggcgtgaacccggaaggcggagcttgcagtgagccgagatcattccactgcactccagcctgggcgacagagcgagactcggtctccaaaaaaaaaaaaaaaagggagaaacaaaagatggcttctaggtttttgacttgagcaagtggggagaatacacccgtgactgaggtgttcctgacgggagttgagctagaagaggactagcagtgaaatcaatgagtagcttcacttgcttgccattggccaggctctgggaggtattttaattttctttttctctgtgttagatggtagaggagactcaagaccaagcctggggctctttgaaaggtaaataggggtgcttagaggagaaggaactaggagattgagaaaggagaggccaatgtggtaaacagaaaataggaatgtggagttagggaagccaggggaggaaagtgactcaagaaggaggaaaatgatcaggatgtgattgtgcttactcatgcccctggttagtatgataattgctaatggaaagttatgagacatatctgtactggtgactgcacctgggaaagagcatgtatttgtgctacagcgacattcacatgctgttttcccctccacctttccccacaaaatgttcgttatatgtcaggaaattgatgacggtacatttatttcccttaactatatttcttacctctgctttaaataacattgagagatcttacataattgcaaaagtaatgcgtgttaattgaaggaagtttgggaaatgtagaaaagctcaaaaatgaaagaaaaaaacacacccaaggggcccgggcgcggtggttcacgcctgtaatcccagcatgttggggggcaaaggtaggcagatcacgaggtcaggagtttgagaccagcctggccaacatggtaaaaccccatctctaaacaaaagaaaaaaaaattagctgggcacagtggtgcgcacccgtagtctcagctactcaggaggctgaggcaggagaatcgcttaaacctgggaagcggaggttgcagtgagctgagatggcgccactgcactccagcctgggcgacagagtgagactctgtctaaaaaaaaaaaaaaaaaaaggccaggcgcggtggctcatacctgtaatcccagcactttgggaggccaaggtgggtggatcacgaggtcaggagttcaagacaagcctggccaagatggtgaaaccccatctctactaaaaatacaaaaaattagctgggcatggtggcacgcgcctgtaatcccagctactctggaggctgaggcagagaattgcttaaacctggggagcggaagttgcagagccgagatcacgccactgcactccagcctgggagacagagtgagactccgtctcaaannnnnnnnnnnnnnnnnnnnaggggggatgccttgactgaaatatgtcaccataaagttgctaacttcctattttgtgatggggttttactttattctgaataataaaatgttatttcatctttttgtattaaatgtcatttctgttataatatattgttagcaaataatagatatttcttattcttccttcctttctttttttttttttttttttttgtttttgagatggagtctcgctctgtcgcccaggctggattgcagtggcatgatctcggtctgcctcctgggttcaagcaattcttctgcctcagcctcccaagtagctgggactacaggcacacaccaccacacctgactaatttttgtatttttagcagagacggggtttcaccatactggccaggctggaatcaaactcctgacctcgtgatctgcctgcctcagcctccaaaagtgctggggttacaggtgtgagccaccatgcccggcctctctctctttctttctttcctttctttcccttctttcctttccttcctttctttctttctttcttttttttttttttggttttgttttgttttgttttgttttgtttctgagacagggtctcactctgttgcccaggctgaggtgcagtgacacaatctcagttcactgtgcagcctcagcttcctgggctcaagcgattctccacccctcagctccctgagtagctgggattacaggtgtgagccaccaatgcctggctaatttttggtattctttgtagagactgggtctcacccaggctggtctcaaactcatgagctcaaggcgatccatccgccccaacctcccaaagagctgggttacaggcataagtcaccacacccagccataaatgataggtatttcttatgctgtaagctatgcaaaattaaaaattcgtaaccttctatcagttccctttttttcctttaacatcttggtctttaaaacaaaatttaaaaaagaaagaaagaaagaaagaaagaaaactgttgccttagtccttgagagtcagtggctcaaaatgtatcccgtttatctttacataaacttactgcaagtgaagaatctgaattcaaacttcttggatgttattttggtcttcatttaaactatgtgagtataaataacagaatgcacagtatcctccagaaaacaggttatcttcatttcattttacaaatggttgtccataagatagttctagaattgttagaattgttgttgttattgttgttgttaagggattctgcactgctttcagttttattaaatatccacagaatgttaatagataaaactaatttttttttttttagagaaggagtcttgttctgctgcccaggctggagtgcagtcagcggcgcgatctcggctcactgcaacctttgcctcctggattcaagtgattctcctgcctcagcctcctgagtagctgggactacaagcacccatcaccacacccagctaatttttgaatttttagtagagacgaggtttcgccatgttggccaggctggtctcgaacccttgacctcaagtgacccacctgccttggactcctaaagtgctaagattataggcatgagacactgcgtggccacttgtgtttaaatattaattgtatataatataataactgtatattaatatatgactaaaccataataaatcaatttaagcaatcttctgttatttaaattcaagttttttcctgatgttttgctattataaacatcataaaattatgtactagttaccagcatagcctttagcacctaacacatctggtgctactaccatgacctactggctgtgtatttatgagaaattattgaacaaattattgaagtttcagtttcctcacctataaaacaactatactaagagtgccaggcatggtggctcacacttataattccagcactttgagaggttgaggtgggcagatcacttgagttcaagagttcaagaccagctagggcaacatagggagaccccgtctttaaaataaatacaaaaattagccactcatggtgatgcacacctgtagtcccagctgcttgggagggtgaggtgggaagatcacttgagcccaggaggctgaggctgtagtgagttgagatggcaccactgcactccagcctggatgacagagcaagaccctgtccccgcccccctcaaaaaaggaaaaaaagtctatactaagaatacccatggtgaggattacaggtaaagcacttaccatgatactccaaaagcaattattgcttaataaatgtaagccattattagaataattaaggcatgaccgtattttactctttttttttttttttttgagacggagtttcactctcgtcacccaggctggagtgcaatggcacgatctctgctcactgcaacctccgcctctcgggttcaagcgattctcctgcctcagcctcagcctcccaagtagctgtgattacaggtgactgctaccatgcccgactaattttttgtatgtttagtggagacggggttttgccatgttggccaggctggtcttgaactcttgaactcaagtaatctgcctgcctaagcctcccaaagtgctgggattataggcatgagccaccatgcccggctgtattttacatttcttgaaaaaaattataaaagtttttctagactgggcgcggtggcttacacctataatcccaacactttgggaggccgaggtgggcagatcacgaggtcaggagaccgagaccagcctggccaacatggtgaaaccccatctctactaaaaatacaaaaattagctgggtgtggtggtgcacgcctgtagtcccagctactccggaggctgaggcacgagaatctcttgaaacgaggtggcagaggttgcagtgagccaagatcgtgccactgcactccagcctggcgacaaagcaagactctgtctcaaaaaaaaaaaaaaaaacccacaaaaatctgagtaagataatggaaatggtaataagcaaatatatgtgagcagtccagaagaccccaacatagtcaggggccaaatgactgtgagagtcaccttgatctgtcatttatcnnnnnnnnnnnnnnnnnnnnnnnnnnnnnnnnnnnnnnnnnnnnnnnnnnnnnnnnnnnnnnnnnnnnnnnnnnnnnnnnnnnnnnnnnnnnnnnnnnnnnnnnnnnnnnnnnnnnnnnnnnnnnnnnnnnnnnnnnnnnnnnnnnnnnnnnnnnnnnnnnnnnnnnnnnnnnnnnnnnnnnnnnnnnnnnnnnnnnnnnnnnnnnnnnnnnnnnttttctagactgggcgcggtggcttacacctataatcccagcactttgaaaggccaaggcaggtggatcacttgaggtcaggagttcgagaccagcctggccaacatggtgaaaccccatctctactaaaaatacaaaaattagccagcgtcgtggcgcatgcctgtagtcccagctactcgagaggctgaggcaggagaatcgcttgaacccgggaggcggagtttgcagtgagctaaaatcgtgccactgcactccagcctaggcagcagagcgagactctatcttaaaaaaaaaaaaaaaaaaaatccaatcaatttatctgttaagtgttctatttgccaggtaatctggttagcctttggaatgtccatataatctttgattcagtcgcaaattccattaatttcttggatcaaaagagggaactcttgacaacagtttcttctctgctcactcagaccattagtttctatgaatcaaaaatattggttttatttcagaatcagatctctgatgcaactctttcaaatcacataataagtactaatctttcaaaatatatcaaaaaagaatctagaactaaacattataaactggtacaaactccagctctgcctgctcagttaccactgttgcctacttcctctctgccactttttttgtaggtaatgaaaagagagaaggataagcaaagttcataccacatctagcgagaagaatagttaccgaactccattctgcagaatgcaccaccccaacaccctagaccctcctctagcactcccacaactgctcatagactacaaactgcactccatttccaatcttataaaatccttttgctctagtatcaacaaataattattctgacttcctttgtagagaactgagttcttacttatatcttggtcacttttttttaattactgaaaattcttcaggattcctacatgtgagctattggaatcagaagttttggtcagtagattttttagacaaaaacagaagccagaaatctttcccaccccactccaccctataaaaagactgtttgtggattgcaggctgtctactgtggtccctttgtgcttggttcagtgtgccatggaaactagagacagtacaggtactttgtttacacagccttcatttctatttacgaaatctctttgtggagtttgcaaagctttttttttttttccactgctgcacctgtcgatccagctctaaccatcagccaatgaacagtaagatgtcaagccagtttctgatgggggaagtgggaggtgtacccatcagactggttcaactgcctgaagatgacaaattaccccagtttaaatttaaaaaagaaagaaagagagaaaggaaaagaaagaaaagagaaagatggccaggcacagtggctcatgcctgtaatcccagcactttgggaggccaaggcgggcggatcaccggaggtcgggagtttgagaccagcctgaccgacatggagaaaccccgtctctactaaaaatacaaaattagccaggcatggtagcgcatgcctgtaatcccagctactcaggaggctgagacaggagaattgcttgaacttgggaggtggaggttgcagtgagccaagatcacacgactgcactccagcctggcaacagagcaagactctgcctcaaaaaaaaaaaaaaaaaaaaaaaaatgtaccgcatccaggggcctgtgagtccattcagtttaagtgctataatttaggttccctatttagtagaaaccaaaaggagtatacttaaataaaccttcaccgctagtttccgaaagaattcatttcaaataataagagaaagggaagttgaattctattttatagccatttcctatattctttacttaattcctctgaatctcacttttttcacctatgaaacacagctaataatacctaccaaagaggattgttctgaggatcaattaatgatgaccattaaatttggcaatcctttttttttttttttttttgagacagtctcgctctgtcacccagactggagtgcagtggcgcgatcttggcttactgcaacctctgcctcccaggttcaagcaattctctgcctcagcctcctgagtagctgggattacaggcaccagccaccatgcctggttaatttttgtatttttactagagatgaggtttcaccatcttaaccaggctggtcttgaactcctgacctcgtgatccacctggctcggcctcccaaagtgctgagattacaggcatgagccaccgcgcctggccttatttttatttcttttaagacagagtttccctcttgtttcccaggctggagtgcagtggcacaatctcagctcagtgcaacctccgcctcccgggttcaagtgattctcctgcctcagcctcccgagtagctgggattacaggaggctgctaccacacctggctaattcttgtatttttaatagagacgaggttttaccatgttggccaggctggtctcgaactcctgacctcaggtgacccacccacctcaacctcccaaagtgctgggattacaggcgtgagccaccacgcccggcccagatttagcaatcctttaaaaaggcacttttaatgttcataatataatgaacaaataatgcaggaagacaatttttctttaagaatcacacaaactttattacttagttttttcttaaccaatggggcattggcaatacatccttcatactaagaaagacacgaacaattcggctggacacagtggctcacgcctgtaatcccagcactttggaagccaaggtgggtggatcacttgaggccagggaggtggaggttgcagtgagctgagattgcgccattgcactccagcctgggcgacaagagtgaaacaatgtctcaaaaaacaaaaacaaaaaacagaaagacatgaacaattctaatcttcaagtcacttttaattgctccttcctcttcacagccacagaatgctacttatgcttcttatccaccctcactttattcttctttgagttttaactgcttatttaccaatctctttcctccacaagactgaacattccaggagtcttttttccctttacaatatctggatgttgtgtactttgcagaaacatccagtgtttccataaaagtttgtgttgaaatgaaagaagataaagccaaatataagacctattttggaacctcactatttccaattgacagccatatcttgattgtaaccccttttaattctctgtcaatgaaaagggaccagaggagggagtatacgtgccatcagaaagggtcgttttttggttttgttttgtttttttttgaaatggagtctagctttggagtgcagtggcgtgatcttggttcactgcaacctccacctcccgggttcaaacgattctcctgtctcagtctcccaagtagctgggactacagggatgaaccaccacacctggttaatttttgtatttttagtagagacggggtttcaccacgttggccaggctggccttgaactcttgaccttaactgatctgcgcgcctaggcctcccaaagtgctgggattacaggtgtgagccaccacacccagccgatttttttttttttttttttttgacagagtcttgctctgtcacccaggttggagtgcagtggcactatcttggctcattgaaaccctggcctcctgcactcaagcaattctcccaccttggcctcccaagtagctgggattacagatgcatgcaccaagtccaggcaattttttcattttttgcagaaatagggtttttgccacgttgcccaggctggtctcgaactcctgggttcaagcaatccacccaccttggcttcccaaagtgttgagattacaggcaagccaccatgcccagcctggaaagtgttttaagaaagaaggaaaattaaagtgttgagtgctgcagacagacgaaggatgaggtctaatcaaagcccactggtttttctggtgattacaagtaaccttcaagagtattgtcccagtgaaatgataaaggaaaagccagattaccgaaggcttgaaagtgagtagtgttaccaggttcaagaggccaaaggaaaaaaaaaagaaagaaagaaagtgagaaggtgtttacaaatgcctggaacagagtgtagatcgtaattctgggatatgcagttccttcagggttgagcatgacacatcagcgcccttcacagagttctatgccctagccaagccaggcatattgtcagaggcatttgaaccagagcgaytccatcttgaataggggctgggtaaatgaggctgagacctactgggctgcatttccaggaggttaaggcattctaagtcacaggcgataggaggttgacacaagatacatgtcacacagaccttgctgataaaataggaagctggccaaaacccaccaaaatcaagatggcgacgaaagtgacctttggttatccttgctgctcattacatgctaattataatgcattagcatgctaaaagatactcccaccagtaccacagttttaaaattccatggcaatgtcagaaagttaccctatatggtctaaaaaggggaagaaccctccgttccaggaattgcccatctctttctggaaaactcatgaataacccaccccttgtgtagcatataatcaagaaataaccataagtattatcagctgagcagcccaaactgctgctctgcctagggactagccattcgtttgtttcttcactttctcaaacttcaaacttgctttcactttatagactcgccctgaattctttcttgcacgaaatccaacagtgctgtcttggggtctatatggggacccctttctggtaacaatatcacagcttccttcttttttttttttttttttttttgagacggagtctcactctgtcacccaggctggagtgcagtggcgckatctcggctyactgcaagctccgcctcccgggttcacaccattctcctgcctcagcctcccgagtagctgggactacaggcgcccgccaccacgcccggctaattttttgtatttttagtagagacggggtttcaccatgttagccaggatggtctcgatctcctgacctcgtgatctgccggtctcggcctcccaaagtgctgggattacaggcatgagccaccacgcccgaccctaaaaactataactttcttgtggctcttaacacgttcagcctggtataagaggtaggtaaatatatgacttcccttttgaatccataagggataaataaacttcgacaaatattaaaactacttttcaaggtaagatactacccattcaaacaggtagtagttgtgtagatccaggcaaggaattcagatcagaaaaattaaatcagaagactttagagtttcaatttaatccaacaaacatgtattgaatgctttttatgtgcaaaacattgtgccatcaagggctttaagatctaatgcaggagtcagcagactttttttcttttcttttcttttcttttttcaagacggagtctcactctgttgcccaagctggaatgcagtggcgcaatcatagctccttgtaacctcaaactcctgggctcaaatgatcctctcacctcagccttccaaactgctgagaaacaggcatgaaccaccacacccactggagcaaacatttttgataaaaggtaagatattaaaactactaaattttagacttggcagaccatatgatctctgttgcagcaactctaccatttgtagtgggaaggtatccataacattatctaaacaaatgtgggtacctgtattccaataatacttaatttatgaacactgaagtttgatttcatataattttcacatatcatgatacacttatacttttgaatttttgtctccaatgatctaaaactgtgaaaaaacatttttagcatgtggaccatacaaaaaacaggtggcagagcaggtttgtttcatgggccatagtttgctgaccccaatccaaaaaatagttcacttagatgtatgccaaagttctatccttaacaccaaaataacctacagcattactgccattttgacaaaatttgtgatcaacatatctgatataaggtagattttcattgatttattcaacaagtattcactgagtgtcgaccttattgcaagtactgtgccaggcactgatgatagagctgtgaagaagttagaagtctgggcaccatggctcacgcctgtaatcccagcactttggaaagccaaggcgggtggatggcttgaccccaagagtttgaaaccagcctgggcaaccctgtgaaaccgcatctctacaaaatcaaacaaacaaaaaaatcaaaaaccaaaataagccaagtgtggtggtgtgctcctgtagtcccagctactgggaggctgagcccaggaagttgaggctgcaatgagccataatcatgacactgcactccagcctgggcgacacagtgacaccctgtctcaaaaaaataaaaaataaaaataaagccagaaaagaaaaattatcattttgcaactatcactgtaaattgattcaagaatcatcaaaagatgctaaaaccaatgggtgaaaaattgttggaaaataggaatattcttgtgttttctaaatattaattttaactacaaaggtattttcacaatggaacaatgtgatagacttcattttaaccaagcgatcaaactcagcatcaccagtaataggacaaactgacattccatttctcctgatatggtgcaatgagaagtacagtaccacttatgttaattactcttgccaaaaataaattgtaaacgattctacaagtggcctggattcttaaaaaagttaatgtcagagaaaaaaaaattaagtagattaaagtaaaggagacattaaaagacttaatcaaatgcaatgggtgatcactgattggattctagattaggaaaaaacagccataaaagacaattggggaaaactgaaaatggattatatattagattatagcactatagtaatattaaatgtcttacagtgataatagtattttggttatacaggaatgattacttgttcttaggagattcaggctcaagtattttttttcttttttttttaaattgagacagggtctcactatgttgcccaggctggtctcaaactcctgagcctaagctatcctcctgtcttggcctcccaaagtgctgggattacaggcgtgagccaccctgcacagcccagtcttaagtatttaagggtgaagtacgataaatgcaaattattcaacttttaaacagatatatagagagaagtaaagcaaacatgacaaaatatcaaaaattggagtcaaggtgaagggtataagggtgttcactgtattcttttaacttttctgtaggtttgaaatttttcaaaataaaaacgtggaaaatttttttaataaagagagagaaaaatccatatcctatggaatttatattctagtgggaaagccatagaatataccaataacaaataggtaatataataccatttacagattgtaaatccaaataggataataagatagagggtagttgtgtggatgagaaagtattttggataatgtgtttgaaaaattttctctgtagaggtattcaactgaaggcatcaggatgagccagccatatgaaatgaaagtagaaaaagtattccaggattccaggttaaggaaacagcaattacaaaggcaaacatgtcatgaaattaagttggagaggtaggcaggaaccatattacatgaaaaaatgggccatggttatgctttggattttaaagtacaatgagatggggccagacatggtgactcacctgtaatcccagcactatggaaggctggggcaggaggattgcctgaggccaagagttaaagaccagtctgggcaacataggtagaccactgtctctacaaaaagtgaaaaaagttagcctggcataatggcatatgcctatagtccagctactcgagaggctgaggtgggaggatcacttgagtctagaaggttgaggctccagtgagctgtgatcacaccactgtactccagcctgggccaaaaaaaaaaaaaaaaaccgatgagatggttgcacaactttgtaaattatgtacttttaagaagtgaattttggctgggcatggtggttcacgcctgtaatcccagcactttgggaggccgaggtgggtggaggtcaggagtttgaggccggcctgaccaacagagtcaaaccccgtctctactaaaaatataaaaataatcctggcgtggtggtgcatgcctgtaatcctagctactggggaggctgaggcaggaaaatcacttgaacccgagaagtggaggttgcagtgagctgakattgcaccactgcactccaggctgggtgacagagtgagactgtctcaaaaaaaaaagaaagaaaagaaaaaaaaagtgaattttggcaggacatggtggctcacgcctgtagtcccagcacttagggaggccaaggcgggcagctaacttgaggtcaggagtttgagaccagccctgccaacacggtgaaacctcctctctactaaaaatacaaatgttagccaggcgtggtggtgcccacctgtagtcccggctacttgggaggctaaggtaggagaattgcttgaacttaagaaggggaggttacagtgagccgagattgtgccactgcactgtagcctgggtgacaaagcaagactgtgtctcaaaaaaaaaaaattttatggtatgtgagttgtatttcaataaaaagttgttaattaaaataaaaataaattcaacaagaacacattgaaagttttaagtagagaggttgggcacggtggctcacacctgtaatcccagcactttgggaggcccagttgggtggatcacttgagctcaggagttcaagatcagtatagccaacaaggtgaaaccctgtctccattaaaaatacaaaaattagctgggtgtgatggcacacacctgtcatcccagctatttgggaggctgaggcaggagaatcatttgaacccaggagacagaggttgcagtgagccgagattgcaccactgtactccagcctgggcgacagagcaagactccatctcaaaaaaaaaaaaaaagttcactctggctgactgcggctttcttatatcatatgttcttactgccttgtacaatcatgtatcacttaacaacagggatacgttctgagaaatgcatccttaggtgaagaactatatgatgtgaacatcatacagtgtccttacacaaacttagatggtacagcctactacacacctaggctatatggtttggcgtagtaatataataatgttcttcagctacaaacctacacagtatgtcattgtactgaatactgtaagcaattgtaacaccatggtaagtatttctgtatctaaacatagaaaaagtagaataaaaatatggtatgaaagatttaaaaatgagccacatgtagttgtacatgcttgtagtaccaagtattcaggaggctgagtcaaaaggagcacttgagcccaggaatttcagtccaaactgagcaacacagtgagaccacatctctagggaaaaaaccatctctaaggaaaaaataaactcaccatgaatatagcttgcaggactggaagttgctctaggtgagtcaatgagtaagtagtgagtgaatgtgaaggcctaggacattactgcatactactgtagactttataaacactgtacacttaggctacactatattttaaaagtaagtaattgcactatgacattacaacagctacaatatcactaggcaataggaatttttcagctccattataatctgacaggaccaccatgcagtcagttgttgacagaaaggttgctctgcggtgcatgactgtattaaggttccaaatgtgtctgatctttccaacagcctgtaagtgcctgggtaatgggatcaatgtccaatttatctttactttacccagaatgtccattccagtgtcttacttgtgttttacattcagggaatatttgcaaagttaaagaattaacaaaagaaaaaccacatctccatgataactatatattctgtatgtcttacacaattaacatttttggaataaaaaatcagtgtgcaggccaggcatggtggctcatgcctgtaatcccagcacttgcagaggccaagacgggaggattgtttgaggccaagagttcaagaccagcctgggcgacatagtgagaccctgtatctacaaaaaaatacaaaaattggccaggtgttgtggcatgtgcctgtagtcccagctacttgggaggctgtggcaagagaatcacttgagcccaggaggtcaaggctgcagtgagccgtttttacgccactgcactccagcctaggcaacagagcaagattctgtctcaaaaaaaaaaaaattaaaacacacacaaaaaaactgtgcaaatatatattcaatctggtttataattttaattaaatgtcattggtataaaataccccaagacagttctgttcagtcataagattgttttggggtgacttctgattttagttttgtatattttaccatatttttcaagtttcctacaaatgcacttgtaatgctttttttttttttttttttcccatacagagtcttactctgtcacccaggctggagtgtagtgtcataatcacaaaatcgtggctcactgcagcctcagcctcctgggtgatcctcccacctcagcctcctgagtagctgggacaaaaggtatgtaccatgctgggttaattttttatttttagtagagatggggtcttgctatgttgcccaggctggtcttgaactcctgggctcaagcaatctgcctgtctcggcctcccaaagtgctgggattacaggcatgagccactgtgcccagcccgtaatacttctatattcaaaaaaacaagtggctttttttaagcccttgaaatactcaactcttctaaattataatatgcagacacacaaaaaagattacgatgattaacttaagaaactgagtacagtcatgtgctgtataataactgttcaatgatggaccacatataccgtggtggtcctataagattataataccaggccaggtgaggtggctcaaatctgtaatctcagcatttaaggaggcagaggcaggaggatcgcttgaaccaagcagttctagacgagcctgggtggcatagtgagacctcatctttatttatttaaaaaatttaaattaaaaattttaaagattatatcatatttgtatgtggtacagttgtcgacagtattcagtacagtaacatgctgtataggtgtatagcctaggcgcaacaggctctaccatgtagcctaggtrtgcagtaggctgtaccatctaagttcgtttgagtgcactctgtgatgttcccacaacatcaaaatcacctaatgacgcctttctcagaacatatcctggtcattaagaacacaggactgtatacataatccaagaatgattcctgcccaaatttggtacctgcagggtttttccacacccagttgaggccacttattcatttgtttattcatcaataaaatactgtcaggccagggctaatagttacagaactctgggggagggtcggggtatagggcccattgacatagaatacagtgtgaatgcgccctctggagttgtgtaacatttaagcactaagcaggtactgttcaggcacggtgcaagctctggaaataaaacaatggataaggcagttctcacattgtgttacaaaagcatgttaaattatctgtctctcccaatgtgaggccaggaaccaggtagatgttaagtcagatttcttttcttttcttttgagtcttgctctgtcacccaggctggagtgcagtggcacaatcttggctcactgcaacctccacctcccaggttcaagcaattcttgtgcctcagcctctggagtaacccgccaccacacccggctgatttttgtatttttagtagagatggggtttcaccatattagccaggctggtctcaaactcctgacctcaagtgatccacccaccttggcctcccaaagtgctgggattacagacgtgaggccacatgtaacatgtgtgtacaggtgtacaggccactgcgccaggccatgaacagatttctgaagcaggtgatgactgaggcgtttacccagcagagaagggatagagtcaaagaggtttccaatcagaaaaaagcagcgagtgggaaggcaaaacgggattgtgtttgacaagttctgtttgtctgggaaaaagagcaggagtaagggagtggaaagagacttatactggagggatgtgtaaatcacaacgaagaatttagacttaatcctaaaggccaggggaatcagtaaagagctttaaagaggagaatggcttgatcagatttgtgcattcccaaactagacaactggaatagaggtacctctgactgaagtcaggaagccctgtttagaaactatagcctaaaaccagggggtcataacctgggacctatggtagattgaacttgaatgcaaaaaaaaaataaaaaataaaataaatcttcttttaccaatctctaatcgaaatttaagatttcctcctattatgaatataggcaataaatcctagtattattaacaacagctgtgactctacaaccamcagaaggagtcagacattttcacaagacatcccatcttgaagactttttttttttttttttttttgagatagagtttcactcttgttgcccaggctggtgtgcaacggcacgatctcggctcaccgcaacgtccccctcccaggttcaagcaattttcccacctcagcctcccgagtagctgggattataggcacacgccaccacacctggctaattttgtatttttagtagagatggcgtttcaccatgttgatcaagctggtctcgaactcccaacctaggtgatccacccgcctcagcctctcaaagtgctgggattacaggcatgagccactgtgcccggccaaagatatattaaaaaaattttttttttaatttttcgagacagggtctcacaaggttgcccaggctggagtacagtgacttttttttttttttttttgaaatagagtttcgctcttgttgcccaggctggagtgcaatggcgcgatctaggctcactgcaacctctgcctcccaggttcaagcaattctcctgcctcagcctcctgagcagctgggattataggcatgtgccaccgtgcccggctgattttgtatttttagtagagacggggtttctacatgttggtcaggctagtctcaactccccacctcaagtgattcgcccgccttagcctcccaaagtgctgggatgacaggcgtgagccaccgcacccggccatgcagtggcttttcacaggcataatcatagcacactacagccacaagctcctgggtgcaaatgaccctcctgcctcagcctgagtatctgggactacatgtacactccatcacacctggttactgcaaatatcttaaaacattatttatcttcattgctactgtgaaattatagtagttatacccattgctagaccttgttattaatgggttgacaaatacatacatatattgcacctgtgttttaaatagtctggtaactgcactgcaatataatagtttcctactttatacatttaaagccattattctggggcaagtgcgtaggctttaccagatggacaaagtagactgacaccaaaaggctcaaagtcccttctcaggctctagttctactgaaatacctgtggctcctctaaagaagcaagcttccctctctaaccttcccctacttgcccaatctcttcggctttgtttttgttgttgttgttgttgtttgtttggtttgtttgttttgagatgagtctcgctctgttgcccaggctggagttcagtggtgcgatcttggctcactgcaacctccacctcctgggttcaagcgattctcctgcctcagcctccctggtagctgggattacatgcgctcaccaggacgcccggctaatttttgtatttttagtagagacggggattcgccatgttggccgggctggtctcaaactcctgacctcaggtgatccacccgccttggcctcccaaattgctgggattacaggcctgagccaccgcgcccatcctcttctgctttattttgtttattattatttttggtgaggagaggaggaagctctccccgttctaaaagctttaaatgccagttattttcttcaccctcagacaaactccttcagacctcgcttggggagcctctgcacccaaccctcccccaggaggttgtccttcctatgtgctctcatgacagcctgtttttaccccaaacatagtgcttaccagagagatccagcaccccacaatttaacatttgagcttttaaatatcacaagtcgccctgaaactccaggaaatgcagtaatttgccagtccactaaggcatgatgtcaaattgctaccgccgggatggagttacagctcctgaggccccagtgggcgtgtgttaccgtgtgctgtttcagtttagccatcctcagtttagccatccgcaggcggcttgtgctagctcacttagacccctgccttattgcaaggacagagggctttctgtgtcccggggtttcttgccatggtgtagcggaagaatcaaggacaggttggattggagaatgagtgcaaggttttactgagtggaagtagctctcagcagataggagagccagaagggagatggagtgggaaggcggttttctcctggagtggggctgctcagcggcctgggctctcctccaaccgccctggccaaactcaccgtggtcctactggaggatggtctgccggaggatggcctgccggaggatggcctgccgcagtcttcaggtgtgctcttccgccagagcccagccactatgtgttcttacgcctgtgtgttcctctccaagtggagccgctcctgccggcctgctagggtctcgggtgcttttataggcacgggatgggggcgtggcggaccagagtggtcttgagaaatgcaacatttaggcaagaaaacaaaaatgcgtgtcctcacctaggttcgtgggcacaggcctgggggtggagccctagccagggacccctcccttctctacccagcacttccctgcccctcttccgtatcaatgccacccccaggggccatatggggcctaacaataggtgctcaataaatggtttcctggttaaggaaaggaggaatcccaagaatcttgccttctcttacccacagggaatctcctggaggtcatggcctccatcttgatcttactgaattcctagctcctagaatagtgcctggctgataaaaagtactctcaatttattcattgattgcttgtctaagtctaatttgtgtttatctgatacacattttctttcattgagggttttctataaatatctttgaatatgtttctctttttttttgagacagagttatgctcttgttgcccaggctggagtgcaatggcacaatctcggctcactgcaacctccgcctccggattcaagcgactctcctgcctcagcctcctgagtagctggggttacaggcgtgcaccaccacggccggctaatttttgtatttttaatagagaaggagtttcaccatgttggccaggctggtctccaaatcctgacttcaggtgatcctcccgccttggcatcccggtgttgggattacaggcatgagccaccgtgcccggcctgaatatatttctttttttttttctaaatatatttcttttattttattttttttaaataattgaaatggggtctcaccgtattgcccaggctggtcttgaactcctggcctcaagcaatcttcccaccttggcctcccaaagtgctaggattacaggcataagccaccacacctggccatataaatgtctttgaatagcaaaataatgtacaaaaatattaaatatgcctaatttaacagataatcagcagttcttttcagctttcaacttttatattcattgaaataactgcagtgagccaagatcatgccattgcacttcagctatggcgacagagcaagactctgtctcggggaaaaaaaaattaaaaaactgaggtttggctgcggtggtccatgcctataatcccagcactttgggaggccaaggcaggtggatcgcttgagctcaggagttcgagaccagcctgggcaacatggctaaaacccatctctgcaaaaaatacaaaacttagccgggcatggtggcaccagtctattagtcccagctactcagaagctgacacaggtcgaggctgtagtgagactgcagtgagagattgcaccactgcattccagcatgggtgacagagtgagaccctgtctcaaaaaagtactgtggcaaaaataaatataattaggggaaactcttagtggaaatctttattaaactgtaggggttttttgtttgttctttttttttttttgagacagtctcactgtgttactcaggctggagtgcagtggcgcgatctcagctcactgcaacctctgcctcccgggttcaagccattctcttgcctcagcctcccaagtagctagggtttcaggcacgtgccaccatgcctggctaatttttgtatttttagtagagacggggtttcaccatgttggtcaggcttgtctcaaactcctcccgcctctgcctcccaaagtgctgggattacaggcatgagccaccgcatctggcttttttttttttttgagacggagtctcactctgtctcccaggctggagtgcagtggcgtgatctcggctctgcaacttccgctccccaggtttaagcaattctctgcctcagcctccagagtagctgggattacaggcgcgtgccaccatgcccagctaattttttgtatttttagtagagatggggtttcaccatcttggccaggcttgtcttgaactcctgacctcgtgatccacccaccttggcctcccaaagtgctgggattacaggtatgagccaccgcgcctggcctttttttttttttttttttagacaggttttggctctgtcacccaggctggagtgcagtggcaggatctcggctcactacaacctctgccttctggctcaagtgattctccagcctcagcctcctgagtagctgggactacaggcgtgccacacccggctaatgttctgtatttttagtagagactgggtttcaccatgttggccaggctggtcttgaactcctgacctgaagtgatccgcctgccttggcctaccaaagtgttaggattacaggcgtgagccaccgcaaccagcctaaattgtttcttcaggcaaaagaaaactattttaaaaatgaaaaaaaattgtttctgagggggatgaaatttgatggtactaagtcaaagaaagtactaagtactaagtcaaagaaagaagagtgggccgggcgtggtggctcatgcctataatcccagcactttgggaggcagaggcgggcggattatctgaggttggcagtttgagaccagcctgaccaacatgaagaaaccccgtctccactaaaaacacagaattagcctggcgtggtggcatatgcctgtaatcccagctactcaggaggctgaggcaggagaatcgcttgaacctgggaggcggaggttgtggtgagccaagatggtgccattgtactccagcctgggcaacaagagcgaaattctgtctcaaaaaaaaaagaaaaaaaagaagggagttatctttttccatgtctagaatgtgttaagtataaacagcatcctatctcaaaatgcttctcttcctggtggatccagaaatagacacataaaacccaaaagtgaaaggtacaaatttccacttaacagctcctcgcccttttccctcattagcttcggctgaactgagtcagatagtcactaataactatgtgtcccatgtatatttagaagccaccttgcagaggcatttgtctttgcctctgagtgtagtttcagtaaacctttcagttactgtttcttacatatcacaaaagcccagctttgtgaaattgaccactttcattttttaaaaataatgagtgttcatgtcttgagggatgacaaaaacatttggaactttttctttatatgttttgtgattaaaaaatacatttactaatgatttttagattatataggataggataaactataataaaagaaaaatagtttcagctttgtgtgtgtgtgtgtgaaatttggggatactttgacacatctcaacattttattgaatcttattctactgaacctacatataagtggtatgataaaatgggacaaaaatcatatccccatcagtgttctaccacaccttaaaagtcaacaatgggattaatcattaaaggctttcttagcatacaaacactttagctgtgttaagtcactcttgataattttacctatgaatttaaattgttactactcatgtcaccacggtcccaaagaaatggcacatataacaggtaagtttttatgaagaaaaagttcgctagagacaatggcccacttctcgatgtaccaaaggagggacccagcagagcccttagcataggaatgaatgcttcaccatccttctctaccgctagttctgatctcaagaataagtgacttcgaattaagaaacaggtaaagaggaggggcgtggtggcttacgcctgtaatcccagcactttgggaggccggggagggcagatcacctgaggccagaagttctagaccagcctggtccaacatggtaaaaccctgtgtctactaaaattttatacaaaaattacccaggcgtggtggtgagcacctgtaatcccagctactcgggaggctgaggcaggagaattgcttgaacctgggaggcagaggatgcagtgagctgaggtcgcaccattgcattccagcctgggagaccaagggagactccgtctaaaaaaaaaaagaaacaggtagccgggcgcagtggctcatgcctgtaatcccagcactttgggaggacaaagggggtggatcacgagatcaggagatcgagaccatcctggctaacatggtgaaaccccatctctactaaaaatacaaaaaattagccaggcgtggtggctggrgcctgtagtcccagctactcaggaggctgaggcaggagaatggcgtgaacccggtaggtggagctkgcagtgagctgagatcgcgccactgcactcctgcctgggcgacagagcgaggctccatcataaaaataaaatacaataaaataaacaggtaaagaaatatagcaagcaatgtcaaaccatgcaaacatgtctgtctaagtgataagaccagccatttattctctgatgaaagtaaaaccaaaggtcttcagactatgaaagtttcctgcccagttgagttataggtcttatatcccaaacagggggacttagtgtttatgtatgttgaatgtttattgcacagacctccccacccctctcccctcacttatcatccagaatgctagcaactaggcatttgtccacctagcaggagatcggaagtttcttcctagtgaacttgcccactccaggcactctataatgaattgtaaagtcaacaagccccatatgcaagccacgcccagtggcacaagcctgtagtctcaactattctagaggctgaggtgggaggattgcttgagcccaagaattaraggcctagaggccagcttgggcaacatagcaacactccgtctctttaaaaaaaaaaaaaaagccccatattttgcacttccattgagtttttactctctcatgcttaatcatggggataagttgccatgctttaatcatatgattatgtgatcaaggattaccggctgggcatggtagcacacgcctgtaatcccagcactttgggagactgaggtgagcagatcacctgagttcaggagttcaagactagtctggccaacatggtgaaaccttgtctctagtaaaaatacaaaaattagccaggtgtgatgacccatgcctgtagtcccagctactcaggaggctgaggcaggagaattgcttgaacctgggaggtggaggttgctgtgagccgagatcgtgccactgcactccagcctgggcgacagagggagactccatctaaaaaaaataataaaggtttacaagtcattgagaaagtcttctaatatgaaagatacaggtaaatacaaacagaaagaagcaatctaggccgggtgcagtggttcatgtctgtaatcccagcacttagggaggccgaagaaagaggatcacttgaggccaggagttccagaccagcctgggcaacataaaagacttcatctctattaaaaaaaaaaaaaaaaagaaaagaaaagaaaagaaagaaagaaaaaagcaatcaggaggaattaaagactattcagggaaaataaaactttagaaagaaaaacaaaatgtcattaatatccttagagttattaaaaaatatatacagcatctacaaaacaagaataggatgctatagaacaggagttctcagagaacaaaagagtcgttgggaattaaagacatgacagaaacaaaaagacaactcttaatagaggagaagatgaagtattactaaaagtggaacaaaacaaaacagagatggaaataggagaaaaaagataacaaaaccaaaggaacagaaaaagtagaacaaagcaaataatcaaaataatttaagaaaaatcaccagagtttaagaacttgagggttcagattaaaaggacccaccaagtgctgaggaaaacagatgaagatagattcaaaacaagtcacccattgtgaaacttcacaacaactggacaaagaaattcgaataacttccagggggaagaaaaaggaaacagtttggttatacacaaagaatgaagaaacacaacagctctggacttcccaacagcaggactggaaacaagaagacaggctttcaagaagcaagagaaatgccttcaaaatcctgaaaatgatctccaacctagaattttgtccttagaaattatcaagcaagaatggagattgaggacttccagttccaaaatggcagcatagaggcaaactggcttcactcaccccctcctcccccaaacagaaaaccaaaaacaaatacacagcaccgagattttcaccagcagcaactcagaggtcaagtatgaggatgagatagttcctggggccacagagaaatggaaaaattctgagcagatgatagaaagtcaaatcatctgtaagtaatgatgatttcttcctaatatttatatctcttatttcatttccttgtctaataaattggctattatttacaaaatggtgaaagctacccactttgtcttgctcttgatattaatagttttcagggatggaattttaaaaatatgtaaaaactagaaaagggccctgaccagtcagaatagaggcaccagtcacagcagatatcagggccaggaacagtggccaacacctgtaatcccagcactttgggaggctgaagcaggaggatcacttgagcgcaggagtttaagaccagcctgggcaatatagtgagacatcatctctataaaaaatttaaaaattagctgagcatggtggcccgcgcctgtagtcccagctactcaggaggctgacatgggaggataacttgatcccaggcagcaaaggttgcagtgagctgagatcaagcccttgcactccagcctgggcgatagagcaagactctgtctctaaaaaaaaaacccagatatcagctgtagacagtcagtacggttaaatcaatgtgcaattatgtgcccatagtatgctctcagtgttttatcatcaggcatgatgttgtttgctgatttgtaataaatttaatataatattttaaaaagaggatgggcattgaacaaagatattttcagacattcaaggtctcaaaaatgttttcctgtgtatcttttctttcttttttttagacggagtcttgctctgttgcccaggctggagtgcagtggcgtgattctggctcactgcaacctccatctccaaagttcaacttcaagcgattctcctgcctcagcttcctgagtagttgggacaacaggtgtgggccaccagtcccagctaacttttgtatgttttagtaaagacggggtttcaccacattagccaggctggtctcgaactcctgaccttgtgatcctcctgccttggctcccaaagtgctgggattacaggcgtgagccactgcgcccagactgttaatgctacttcttcacccaggtgatggttacatagatttatcatgattatttaaactatatgtatacatttaacactctgttccatatatatgatgcatttcagaatgaaacatcttggccaggcacagtggctcatgcctgtaatcccagcactttgggaggccaaggcaggcggatcacctgaggtcgggaattcaagatcagcctgaccaacatggagaaaccccgtctctactaaacatacaaaaattagccagtcgtggtggygcatgcctgtattcccagctacttgggaggctgagacaggagaatcgcttgaacctgggaggcggaggttgcagtgagccaagatgacaccattgcactccagttgggacaacaagaatgaaactccgtctcagaaaaaaaaaaaaagaatttaaataggcattttattaaaattatttaactgcgttttattaaaatatgcttctgtttcattaccaactttgatttcagatctttttctttattttttcgagatgcagttttgttcatttcccaggctagagtgcaatagcacgatctcggctcaccgcaatctcagcctcccgggttcaagcgattcttctgcctcagcctcccaagcagctgggattacaggcctgcgccaccacgcctggctaattttgcatttttagtagagacggggtttctccatgttggtcaggctagtcttgaactcccgacctctaggtgatctgcctgtcttggcctcccaaagcgttgaggttacaggtactgagccaccgcccccagtgtgtttgcactgccttacgtacatccgagcccttatttcgtcttcggtgtgcgtccccctctacggccccgccggcggggccccgctgcggtctttgacttcccccctatctgctgctgtcccctgtattttgtctcgtagtcttgtcacttaacttcctgctccctgcccctctcctcacccttctcccactcccacgcctttcctcggtctcctctgttcctaccttacccctaatgtccccgcttttgcgctttctgccctctcccttttgtgtccgttgatcttctctctcctcccctccttgccccttctctgcccgtcttgccgtctggcctttcctcctctgcttgcgcttctcctctctctttttccctttccttccccgtcgctcttctcgactctccctccttgacgtgcccctattttccctccccctttctggtcgtttcacttcccctacggtctttctctctcctcctcccttgtatgtattatttttgtgcgttgccctttttttacctctcttctccccgcccgcacttctatccctcccccctttctctatcgctcctgcttttcctattcctcactcctgccttcgtctgtccaccgggacccccctcggcctcctaatgtcctcgcctcctatccgcactctatcgagttctctggtactatcgctctctcgtattttagtctccgagctcccagcacctactcccgnnnnnnnnnnnnnnnnnnnnacccccggcctgatttcagatcttaaagaaattcagggccagggggtcggtcggtggctcatgcctgtaatcccagcactttgggaggccgaggcgggcagatcacttgagctcaggagttggagatcagcctggccaacatggtgaaaccccgtctctactacaaaattagccaggcatggtggcgcatgcctgtaatcccaactgctggggagaccgagtcacgagttatcacttgaacccgggaggcggaggttgcagtgagctgagatcgcaccactgtactccagactgggcgacagggtgagactccatctcaaaaaagaaaaaaaaaaaagaaagaaagaaaaagaaattcagaggccggaagaggggtggctcacgcttgtaatcccagcacttttagctgggcatggtggcaggcgcctgtaatcccagctacttgggggactgaggcaggagaatctcttgaatccaggaggcagaagttgcagtaagccaagagcgcgccattgcactccagcctggggcacaagagcgaaattctgtctcaaaaaaaaaaaaaaaaaagaaagaaagaaagaaaaaagaaaagaaaagaaaaagaaattcacggctgggatggtggctcacgcctgtaatcccagtacttttgggaggctgaggtgggcagattgctttagtcctagagttttgagaccatcaagcaactggtcggcaatatgatggaaacccgtttctacaaaaaataccaaaaattacttacgcatcgtggtgcatgcctgtagtcctagctactcgggaggatgaggtgggaggatcacctgagtgtgggaggtcgaggctgcagtgagccgtgattgcaccactgcactccagcctgggcgacagagtgagtccctgtctcaaaaaaaaaaaaaaaaaaggaaaagaaaagaaaaaaaaaagaaattcagtttttataaaacccctatatctggaccattccattcaaaagggaattgatataatattgctgctatatagaaaacagaaaactccgggtacagtgcctcacgcctgtaatcccagcacttcggaaggctgaggcaggtgggtcacctgaggtcaggatttagagaccagcatggccaacataatgaaacctcatctctactaaaaatacaaaaattatccgggcatggtggtgtgcccctgtagtcccagttactcaggaggctgaggacggagaatcgcttgaacctgggaagcggaggtgacagactccgtctcaaaaaataaataaaaataggctgggcacagtggctcacgcctgtaatcccaacactttgggaggccaaggcgggcagatcacgaggtcaggagatcgagaccatcctggctaacacggtgaaaccctgtctctactaaaaatacaaaaaaattagccgggggtggtggcaggcgcctgtagtcccagctactagggaggctgaggcaggagaatggcgtgaacccaggaggcagagcttgcagtgagcagagatcgtacccctgcactccacagcctgggtgacagagcgagactctgtttcaaaaaaaaaaaaaaaagagagagaaatgactatggccttgaccagggttgtagcagtggaagtggtgagtagcgttcagattctgaatatattttgaagatgggttttaggtacggaaaagataaaagtcgagaaaaattctaaagttttatgcctgatcaactggaagaattcagttgccattactaagatggggaagggcacatcctgtgatgaatatgagcctctaggtttacaaatgttgtaatttatttctaaataacgtttcattactgagcaaagtactttacagtgagagataattatttctaactacaatacaacttaaatcagaatgtgactttttttattcctgaggatctgatgagaaaacattcacaatcattcttctaaaaaaaacacttgtaatataattgttaagtataatttgcaatctttgttctagttgagctgctcaaatccttgttgacttattgtattgtgggtgataaagtaggggtgatacatgctggtactgtcagtatagcactttaattgcaggaattatcttttggcccattttctgatttttaaattatctttttttttttttttttttttttttgcgacggagtttcgctcttgttacccaggctggagggcaattgtgcaatctccagtcactggctggcacctccacctcctgggttcaagcaattctccagcctcggccacccaagtagctgggattatggatgcccaccaccacaccaggctaatttttgtatttttagtagagacgcagtttcaccatgttggccaggctggtctccaactcctgacctcaggtgatctgcccgcctcggcctcccaaagtgctgggattacaggtgtgagccgtcgtgcccagcctttaaattatctttaaagagaattatacatagaatttctacagtgactacccactgttctatactggtaattcttaaacttgttcattatgatgtaaatagggcaagaatatgttctctattgataatttcagaagggcatatttcactataggatccctttctatttctacaaataatctaaatctaaaaatatatattcttctcttcccttttcatttcctttttttttcttttcttttaaggccaccaatcagatctaatctcttctcatttcttacttttttattttttttttatcttttcagagacagagtcttgctctgtcgcccagactggagtacggtggtgtgatctcggctcactgcaacctccacctcctgggttcaggtgattctcctgcctcaacctcctgagtagctgagactacaggcatgcactactacacccggctaataattgtatttgtttttttttttgagacggaatctccctctgtctcccgggctggagtgcggtggcgcaatgtcatttcaccacaacctctgcctcctaggttcaagcaattctcagcctccaaagtagctgggattacacacattagccaccgcgcctggcctaatttttttatttttagtagagattgggtttcaccatgttagccaaactggtctcgaactcctgacctcaggcaatctgccccctcggcctcccaaagtgctaggattaagccgcagctgggtgcggtggctcatgcttgtaatcccagcatttgggaggccaaggtgggcagatcacctgaggtcaggagtttgagaccagcctggccagcatggtgaaaccccatctctactaaaaatacaaaaattgggccaggcgtggtggtgcacatctgtaatcccagcactttgggaggccaaggtgggtggatcacctcaggttaggagttccagaccagcctggccgacatggtgaaaccccgtctctactgaagaaacaaaaattagccgggtgtggtggcatgcgcctgtaatcccagatacttgggaggctgagacaggagaattgcttgaacccagcaggtggaggttgcggtgagccgagatctcgccattgcactccagcctgggcaataagagcaaaactccgtctcaaaaaaaaaaaaaaacaaaaatacaaaaatnnnnnnnnnnnnnnnnnnnnnnnnnnnnnnnnnnnnnnnnnnnnnnnnnnnnnnnnnnnnnnnnnnnnnnnnnnnnnnnnnnnnnnnnnnnnnnnnnnnnnnnnnnnnnnnnnnnnnnnnnnnnnnnnnnnnnnnnnnnnnnnnnnnnnnnnnnnnnnnnnnnnnnnnnnnnnnnnnnnnnnnnnnnnnnnnnnnnnnnnnnnnnnnnnnnnnnnnnnnnnnnnnnnnnnnnnnnnnnnnnnnnnnnnnnnnnnnnnnnnnnnnnnnnnnnnnnnnnnnnnnnnnnnnnnnnnnnnnnnnnnnnnnnnnnnnnnnnnnnnnnnnnnnnnnnnnnnnnnnnnnnnnnnnnnnnnnnnnnnnnnnnnnnnnnnnnnnnnnnnnnnnnnnnnnnnnnnnnnnnnnnnnnnnnnnnnnnnnnnnnnnnnnnnnnnnnnnnnnnnnnnnnnnnnnnnnnnnnnnnnnnnnnnnnnnnnnnnttgtgtttcccccaagtatactttttccccaccctagtgccaaaggttccttttgtgatgtgatttctaccttcctctcaatccttactgccgccccccccaaaatactctccaaattgtcaacatgcttaaagatagcactcaaaactaaataaaataaatacatgttctagatgtgatctccctattgagttccatgttactagtacagctggtccaccatatccacgggttccacatggccagctgtgggacttgagcatccctaggttttggtatctgtgggagtcctggaaccaatccctgtcagatactgggcatgactgtacttcattatccttgcattcattatctattcctgagtaacaaattaccttaaaaattaacaatttaggacaacaacaaaacatttatttctcacaagtctgtgggtcaggaattcaggagaagcataacagctcaaggtttctcatgaggttgcactgaagtcatcagccagggctgtagtcatctcaaaacccaactaggggccaggcctcatgcctgtaatctcagcactttgggaggctaaggcgggcggatcacttgagcccaggagttcaagaccagcctgggcaacatggcgaaaccctgtctctaccaaaaatacaaaaagtagctgggcatggtggcacatacctgtaacccctgctacttgggaggctgaggcaggaaaacagcttgaacccaggaggcagagattgcagtgagctgagatagcaccactgcactccagcttgggcaacagagtgagactccgtctcaaaaaaaaaaaaaaagaaagaaaagaaaatgagctgggtaactgtgtaggcacgagaattgcttgaacccgagagaggaaagttgcagtgagctgagatagcaccactgcactctcagcctgggcaatagagcaggactctgtctcaagaaaaacaaaaacaaaaactcaattggggctgaggatcctcttttaagctcactcatgggttgttgtcagatttaactttctcatgggctattaaattgagggcctcagttactcaccacaccacataggcctctccatcatgcatcatggcagcttgctaattctagatcaagggatcccagagggagggaaggaggaaaaatgagagagagacatctaagacagaaatcacagtcttataatataatcttagaaggagtatcccatcccttcacatctgccatattctatttgttagaatagccactaggtccagtccaaaggattacatataggcaatgacccatcttagatgctgcctgcttcggtcctgaataccatcttctatgcatgcagcctaagattgcagaatgatttttgtgccaatggtttatattgagcttctagtcaactaaaagacaaaaagtttctacttgttttatttatgtatttatgttgaaacagaatcttatgctgtcacccaggctgcagtgcagtggtgtgatcacggctcactgtagcctcgacctcctggtctcaagtgatcctctcacctcagcctctcaagtaactgggattacagacatgcaccaccatgcccagacaatttttatatttttttgtagaagcagggtttcctcttattacccaggctggtctcgaactcctgggctcaagcaatctgcccaccttgcctcccaaagtgctgagattacagacatgtaccatccagtctggccttctaacttgttttttaaagagccattgatttggcaattaatccttttaagcttaatgcaggatattatctctaatacattttatttaatttgtctctaattgttttttttttttttttttttttgagacaaagtctttctctattgcccaggctggaatgaagtggcatgatcttggctcactgtaatctccgcctcccaggttcaagcgattctcctgccttggcctctgagtagctgggattacagacgcgcaccaccacacccagctaatttttgtatttttaatagagacgaggtttcaccatgttggccaggctggtctccgactcctggcccgcccaagtgatctgcccacctcagcctcccaaagtgctgggattacagatgtgagccaccacacctggctgctttcagtaacttctgtaatacttcctgagagttgggggtttaaagtagtatcatgaataaatgcaattcttattaagccttcaaagtctcttataaaactagataaacaggccgggtgcggtggctcacacctgtaatcccagcactttgggaggccgaggcgggtggatcacaaggtcaggagatcgagaccatcctggctaacacagtgaaaccccatctctactaaaaatacaaaaaattagccaggcatggtggcaggcgcctgtagtcccagctactcaggaggctgaggcaggagaatggcgtgaacccgggaggtggagcttgcagtgagccaagactgcgccactgcactccagcctgggcaatagaacgaaactccgtctcaaaaaaaaaaaaacctaaataaacattctttattaaattaatagaagatgactgtacactattatatctctgttggtctctaagggccctttcaatttctcagtacccaagctttgtaggaactgaatagtagttaattgaatttctttggattacttaaaatcactgtttatttgtgacacaaaataaccttactttcctaaaacagttgaaataaaattaatgttaggctcacgcctgtaatcccagca

SEQ ID NO: 96272 - DNA, 12861 bp, Homo sapiens
catacgttttgtctgtgagagttttctagcaagttctacccttcctgttttcatcattactgttcttaactctggcccatcacacctgtcaagcagactattgtcggacccactccaagtggtctctctggcccgagtctccctcttcaaaccattctaacactcttaacatattttgcttcttaagacatagctctaagaaaaacgttttctcaattccaaaagcttcagtgagtgtcaacaacttattgaattattcagtatagacatctcaacatggcaggttggatgtcaaaatctccctgttggagatcccctcagtattacctgtgttaccccaccgtcaactcccattgctgccttccctgaaaggaacccttcagaaaaactaccatgcctgtaatcctgccataggtccttttcttcatgtcaccctctctgtttgtgccattgccttccatctctccatttaaataatggccttgtttaatggtatgtcattcaatggtaacacatcatgtcattggtgtgtcatttaggaagctttttctggtcttattttttcccaattttatacctttataaacctctgttgtaatgcttttatgtcattctagaatctctgcattatcattattaatgtgaatatcgtattaccgcgactagactataatgtctttgaggtcttttgtatttttggcagtccagcatagtgagcattcagtgggctgacaggaaatatttattgaattgagtcaaatggaaataattttaggatgttggtgcccctcagcactgctgcctagtcaacttcaaatcattaccacttgcatcaccccctgccacccactccccccgccacacacacacacacacacacacacacacacacacacaccccctaggtaattttgccaaatcctgaagggtcaacttcaaacagtatctttcagccatgttttctgagacagggtctcactccatctaccaggctggattgcagtgtgtgatcttggctcaccgcagcctcaaactcctgggctcaagctgttctcccacctcagcctcccaagtagctgggattataagcatgagccactgcacctggcccatgttcaatttttctttgacgtttcctaaatgctcctctgttcttgggcaacagcaatgagacagttctcttccactcagtttttccaaagcatcctgcttattttgggaatgcttctcatgctgagcccagcctgggggcagcatctgctccagacaggctgttcttcaacccaaggtccaaccaccatcatagtggaccatttgcagtctcagctatgccctaagcaaaaatatgttaactgctcttctaactaaccatttctcagtgtagtttttccatgctaggactactcataaacctgtctttctcttaccctctgagctcatatggatttcttccttccttccttccttcctttctctttctttctctttctttctttctttctctttctttttctttctttccttccttcctttttccttccttcctttctctctctcttccttccttccttcttccttccttccttcctttctttctctctttctttcttcctgacagagttgcactctgtcacccaggctggagtgcatggcgtgatcacggctcacagcagcctcaacctaccaggctcatgcgttcctcccatgcaccaccatgcccagctaattttgtaatttttgtagatatggggttttgccatgttactcaggctggtcttgaactcctggactcaagtgatccacctgtctcagcctcccaaagtgtcgggattacaggcattagccacggcacccagcatgtggcattctttcttaagtgcttctagacaaagcaataagtggcagaaggctttccccaaatccatttaccttgtgtctccttttgacaccacatttctggagaatggatggatgggagttgggctttcgaaactttgcccttcagctctgtacttttgtgaaatgtattctcccataatcttcctcctcagccaggtttaaaagatcagaacttaactgtgaaaatattggaggatacaacttcagtctttcccgagtaagctggagatactcatgtcatactgataaatttagcttcgtgctaccatcagccctctcttctggacatttcctggttcattttctttctagccatctccttccttagacccaatcttcacataactcttccttcactgaaaatctaattctgcacttggtccaagtctgagctcctccttcaagctctttggggggcctactgaaaaaggccctcctgccttagagtccaaatcccctcttgtgtcctatgtgaaaactactgtccccaagaccctgaagtccttgctatgttttgggccatgtcctagagaggctgaacttgtctctgtctggtttcttctctcccaggattttggtctgttggagttaaccggcttcctccccacttctaagccttgtagatttatctctggtccattatcctaccactttatggactttctttgtcaggtactcagtctaaaccaagcctctcaggtacagttttcccataaaaacagcctcctctttattctatgctgaatctaaaataatgacagcgtttagaaccacaagcggccttagagaacatcctctaatcctagttatacaaatttggagattgtgagccagagagatcaagtggctggctgattgtcctgctccttaaaatgagtttacattttttagcctcactgcctatttcttataaagcttagaatgagcattccatccctacaatcccatatgtttctattaatcccaccccatacggaaagaagatctctcaagttacacgtggtatagagggaagggagtttagaaactgtaatgctatagtagaaattatgatgatgatcatgataattattattattattattttttgagacagagtcccgctcttgttacccaggctggatggagtgcaatggtgcaatcttagctcactgcaacctccgcctcccaggttcaagcaattctccctgcctcagcctcccgagtaactaggattacaggcgcctaccaatatgcccggcaaatttttgtatttttagtagagatggggtttcaccatgttggccggactggtcttgaactcctgacctcaggtgacccacccacctcagcctcccaaagtgctgggattacaggtgtgtgccaccgcaccaagccctatagtagaaattattatctcttcatgttctcccattattgtttgttactaaaaccttcctatatccactggaaaacatctgtgtagttggtataatttaaatgcattcttttgggttcactgtaaagccatcccatgaatattaatcacttgtccccatgcctcagtggttcacggaaatgtgaagaaggatcacgcagagattttctgcactatagacttagtgatgatttgcacgcctgccccctccacaccccctgagataatgatttgaatgtttcttttcctttcacactgatagttattgtatgtccctaatcagtaataccttcagtagtaattgtctatctgggagtggttaggactgatgctatctagagtgaacaattctccctggtctgccaaagcttctctagctctagtactgaaatcccgtgttctgggaaacccctcagctctgggcaagccgggacagttggtcaccctgagcacctcccaccccattcctgctcacctttccatgtcaggatgaagaattcagtgcccaaaatatttatgttccgcagaactgcactgatcaataacctggaaaaaaaatgatccttgaaaccactcatttatgtaggttacaacatattgaagggtaaaaatcaaagctacaatattagccctgaagaccccaaccaaagtgaacctggactggacctattccatttataacgcttttcccattgtttttgaggagagagtatagagtttaaggatgtcatctaaaaggatagatggcaggccgggcgctgtggctcacgcctgtaatcccagcactttgggaggtcaaggaggccaaggcaggcggatcacgaagtcaggagatcgagaccatcctggccaacatggtgaaatcccatctctactaaaaatacaaaaaaaattagccggacctagtggcgggcgcctgtagtcccagctactcaggaggctgagtcaggagaatggcgtgaacccaggaggcggagcttgcagtgagctgagattgtgccactgcactccagcctggatgacagagcgagactccgtctcaaaaaaaaataaaaataaaaataaaaaataaaaggatagatggctaaatataaaatgtgaacttaaaactatgttacccagtgagagcatcaaatgcaaaaattgtctccagttaggtacaaacacaggatgtatcttggaggcaaatttattcctgatttaatttctaggaaagcagaagaaacgtctgctttttgggatctatccaagccctctgccctaacaaactgtctaaactcaggcaaatggccggctctgtgggaaaggagctagtataagagtggattgaataaactgaaaatgagtccagaatttaataaggctattaaaattagaagttgcaagaaatcactgcctatctctattttaagacttttgtttccatttatttgaaagtgttcggaagatataaaggatgggatgttctagatatggatcatctctggcagcagctggattgtcaaatagtgtctcttggaacttctcaacttctttttcctcggatgcgacattcggaatcagagaaaagttgttgtgcagaaagacaaatagttacctacgctgttccttgaaacttaacagaatatagtcaaagataaagttttcatttgtgggttttattgttgttgttgttgttatctttgcttgggcatttagtgttaacagctgggcagttaacaccagaagggaaagaaattttgtctcccagtggggttgctagggaagtagagaaaagcagtgtgtccctggaagagcaaggtaagttggggtgggggcaggtagtgtcacagacagagaagccatagcaagcttcttcgatttactttccaccacttggataggctttctactactgccttttaaaaattggaaagctaaggcacagtaatttttagaagctttctcagggacccttagcaaacagcagggccaggtttaaatgtggtcttcagctgaaaagcagtggtcttcaccaccatgccgcatattgaccccatcgttagctttttgcaggtgcaccagcaggccagctcactggagtaaccaagtcagatgcagtgtcaaagcccaggctgcaattgggaatgaaaggcagttcccccacactgggctgagactgcccgtgacaatggtggccttgagggcttctgcctatgcttcgggatatttcaggtggcagaagcacccctgcacacacagccatgctgcttcactaaacctaccctgtaaggtggtcagggtgctcaggggcccagatgagccaggtttggcaacagagagaaatgtcttgagatttgtcacgtactaattacatgcaaggcattgttctaaactctttttatatactagcctatttcaatctcttaagaaccctatggggtcagcgttcttaatgtctccattctgtagaagaagaaaggaaacgggggcacgcagaggggctctgcagcctgccataaatggtggcatctgactgccctggcatatctaggactggccaagagaagcttgtccactcatgggttccttgttacctccaccagaaaccagtttcggtgggcatcaggacaacatatatgcatgtgcttatatacctaccaacctctttaactctcaccgccttgtgaggtagtttctattaccttcattttacagaaaagaaaactgaggctrtgagtgtaaattacttgcctacattctctacaaatccacccctttgcactgcaacccagatggcacatataaagggggtgtgggtagaagratgctcaacattattattttccctcatttcacacttcctcatctggaaaaacacagaaattataggtgattgtaaagatcccaaaattgcaaaatttaggatggggggagcatgattataatctagagcagagatcagtgaactatagaccatgggctaaatctgcctattttggtactgcccttgagccaagaatgttttttgtttgtttgtttgttttacagtctagaggtcttttatttttttttaacacctatgatgccatgaattcgtagggaagaggttccagcagctcagcctccttcccactggctctcataaagtgtgctactctgggtggagcaggctggcgcttcagttgaacccaggcacctttctctttgtcttctttctttttctgatcgttttycttcaagcgtttcaggaagctagctcggctcttagagtgcttaatgtgctcaatacacacattaattctcttggcaagaatcttgcccttaacttgtttgtttacaacaatgccaacggcatgctggggaacactgcagactcttcccatttagccatggtaacacttgggggtgttcctttttgaacagtacccattcccttgatgcctgcaatgtcacctttcttatagattcacatatacgtggccaaaggaacaactccatgttttctaaaaggcttagagaacatacattgggtgcctctcctcttttcctttgtgttcgtcatcttggcaaattaatttttatgtgatgaattaaatcctctttcttgtcaaccaaattttccgtgatagtgtatctcatacagtgtctgtttaactggaagatggtagttctggccaaaaggctgggttgacatttttttttttttttttttggagatggagtttcactcttgtcctccaggctggagtgcaatggcgcgttctcagctcactgcatcctccgactctcgggttcaagagattctcctgcctcagcctcccaagtagctaggattacaggtgcctgccaccacgcccagctaatttttttgtatttttagtggagatgggtgtcaggcctctgagcccaagccaagccatcacatcccctgtgacttgcacgtatatgcccagatggcctgaagtaactgaagaatcacaaaagaagtgaatatgccttgccccaccttaactgatgacattccaccacaaaagaagtgtaaatggccagtccttgccttaactgatgacattccaccacaaaagtgtaaatggccggtccttgccttgagtgatgacattaccttgtgaaagtccttttcctggctcgtcctggctcaaaaagctcccccactgagcaccttgcgacccccactcctgcccgccagagaacaaaccccctttgactgtaattttcctttacctacccaaatcttataaaacggccccacccctatctccctttgctgactctcttttcagactcagcccgcctgcacccaggtgaaataaacagccatgttgctcacacaaagcctgtttggtggtctcttcacacggacgtgcatgaaaacggggtttcaccatgttgtccaggctggtctcgaactcctgacctcaggtgatctgcctgccttggcctcccaaagtgctggaattacaggcgtgagccaccacgccctgccacattttcaaatgattgaaaaaatatcaaaagaaacaacttcgtgacatgaagagttgtaggaaattcagatttcaggatccataaagaaggttttattaggacacagccatgcattgttatggctattttcgcacctcaacagcagggttgagttgttgcaacagagacctagtgaatggcccacagctttaaatacctactacacagccctgtgcagaagaaacactgatgcctgaagtagaatcacatggcaaacatatttgcctcacgttatctgaggaaacagtttggtcgtaatcttgagtttcctagataattgaagccttcccttttgtgcacagaatagttaattaaaaaaacaaaaatctattcaaggaggctggaattcaggatccagaggaagaagcatttgagagtggaatggaaagacttagggggaggtaggaggaatgggttggggagttccaggatgaaagagggcttttcaataggacagagacagaaagagatttggggagagagagagacacacacatagaaagaagaaccaggattcagagatcattgcaatcagaaaagaggaaaaagtgttgtaagcaggagctcagaagcactcaagaagccggatacagtggctcaagcctgtaatcccatcactttaggaggccgaggctggaggatcacttgaggccaagagttcaagaccagcctgggcaaaatagctagactccatgtctaaaaataataacaataataataataataataaaattagccaagtgcctgtagtctcagctacaggaggctgaagtggaagaatctcttgagctcaggagttcaaggctgcagtgagctatgctctcaccgttgcactccagcctgggtgatagagcgagatctcatctttaaaaaattaaatgaaaatgaaaaatagaaaagaagcactcaggaggctggtgagaattgggcgtgtgtgactttggcctagcaactttacctccctgaggctttcttgcacatcaaatggagagaaatcacacctcgcccaagggggctgctgtgcagtgtgaggggggaggtgacagccatgtagggcagggggtgggctctgcactcagacgcctcccgcggctcctggagttgcctcctctcatcccaggcaagtgactacattccctaccttcgggagctcagccacaaagtgagcagagtgggatctgtcaccctgggaaattggcaagatgctacctccttcctgataggtcaccgagcagtctgcccagagccccaggagcagaagtgctcatgggccaagttaaggggctcgaattccatggttccatggtttgttgaatgcgtttattttttattttattttatttttttgagatagaatttcactctttttgcccaggctggagtgcaatggcatgatctcggctccctgaaaccttcgcctcctgggttcaagtgattctcctaccacagcctcccgagtagctgggattacaggcgtctgccaccatgcccagttaatttttgcatttttagtagagacggagtttcaccatgttggccaggctggtcttgaactcctgtcctctggtgatccacctgcctcagcctcccaaagtgctggaattacaggcgtgagctgctgcacccggcctattgaatccatttaaagcaaacgccaggtcattgtttttgaacttcgtggtggtaggaggtgcaccttaaaatcagcgctttgcataacacttattccttgatttaacccaccaccaccatgaccacccctcactgattcacccaaaagtgggtttatttgttgtcttttctctaacttctgtagttgattgacctcattcaagaaatatctgttgggtacctctgctctgcactgctattttcagtggtaaagagtagatgaaactggccaggcgcattggctcacgcctgtaatcccagcactttgggaggccaaggtaggtggatcacttgaggtcaggagttcgagaccagcctagccaacgtagtgaaaccccgtgtctaataaaaacacaaaaattagctggacacatctataatcccagctactctggagtctgaggcaggagaatcgcttgaatccaggaggcgaaggttgcagtgagccgagattgagccactgcactccagcccctgggcaacagagtgagtgagactctgtctaaaagtaaaaaaaaaaaaaaaagagttgatgaagtccctgtcttcatggagcttacattctttttttttttttttttttttgagacggagtctcgctgtcgcccaggctggagtgtagtggcatgatctcggctcactgcaagctctgcctcctgggttcatgccattctcctgcctcagcctcccgcgtaggtgggactagaggcacgcgccacctcgcctggccaattttttgtatttttagtagagacggggtttcatcgtgttagccaggatggtctcaatctcctgacctcgtgatccgcctgccttggcctcccaaagtactgggattacaggcgtgagccactgcgcccggcccggagcttatattcttgtggaggagagaacatggaaaaggataagcatacaaaaatgaagttaacttagatccattttgttgttgttgttgttaagatcatcacttttgagcacttgtttaaggcagatatctggattaaccacattgaggaactgggaggaggcggagaactggaaactgtgttaagtaggggttgactaaaccctgcttctggtatgagaaagttaagcttatcttcagaatggatgctgaggcaacatcaaactataggaattcaccacactgcataattttgttttaatatgaatttctctgatctctagtgtgagaagagtgtgtttctatatgttcattggccattagttttttctgctttgtgattgtcatgtactctgcctgcttttctctttggttatttaccttttcttattaatttataggctacctcttcacaagaggaatattaacctctagtcttacaaaactgttgtcccaatctattatttctgtattctgtgctattaaaaacaatgactcaatgaaaaaacccactatattaaataaatatatttcagaaatgcatttttaaatagaatgtgcagaatatatgtataacatgtctattaatccatttctatttgtttcactaaatgtttgtattctgcttatattcaaagaaagctaggttggcctgttttcttcacagctttcaagtcctttcatagacattaacttgtttgatctctataagtactagagatattgatctagtaaagtaataaaatggggccaggcatggtagctcatgcctataatcccagcactttgtgaggctgaggcgggtggatcacttgaggtcaggagcttgagaccagcctggcctacagagtgaaatcccgtctctactaaaaatacaaaaatcagctggctgtggtggctggcacctgtaatcccagctactcgggaggttgaggcaagagaatcgcttgaacccggaaggcggaggttgcagtgagctgagatcgtgccactgcgctccagcctgggccacagagcgagactccatctcaaaaaacaaacaaaaaaaaaaaaaaaaaaaaaaacaagtaataaaatgggcatggagctgtataaatgccggtatccttacaccaaatgatctcacacagctctgcgtttgtagttgaacttacttcacctactgctgtcggcaggggacctgagcctgccagttttgtttccctgttctaatttgtgactttgcatctgcttagctataagaacattttatgatcgtgtctaaactaagatttaataggctaagcctcagagggatttaaaggatgtaagctttgatgcttaaaccaaagaagacaaaactggcatcctgagggccaaatgccatccttaggggtaagtttgagagtttttctgataaaattcaggtttctcacttctctgaatacactggaaaagctggcagccctgggctcatgatcccctgtggcattaattgccaggggtcaggggggtggggagggatgcaggctctctcattcccagcagcccccacccaatcctcctcaatgtctgctgccctctgtgaactcaccggccctgctcgtctgacccttcaccagcttcccgcactgtgccttacctgcctgtaggcatttgagtgcctgaatccgtcctacaatgtgtgatgattattttggttgcttggagatctgtttttgcttaattcctgcatctcgcttgtggccaaagagtttgaggttgccagccaggcacaactaaagccttagacacagatgaagatggagtggtcttggtggagatgagaggactcatcaaaaagcattgccttaaaaaaaaaaaagattcaatagccactcattctgcagagggtgatgaagaacggcaaggatttgagagtaggtccgactcgggttccagtcctgcccctcccctgaccggcatctgcctcagcctttgtaaactcacctgcagtggaagcagagctcgtggaagattaatgagaactaactcattgtgagggaagagaaatcccagcactgctcagagggccccgcaggcagcccagccctggttttcatgttgagttgagatgatgatgtgttgttagccatagtccttgtgctgtcttcttgtttgtgaccgtaaaagttatcctggggcagagagaggtgggactgatacagaatgaccacttaacaattttcagtctgttgagccaactagagtgggcagagcagaaataatgccctggttggaagttaatagctttgcctgcccaattatttactggaaggaaatgcctgttcaatataccatttgatatattcaaagataccaaacaaaacaaacctactgctagggccagccactcagaaggcatcacatgctagtctcagtctgttcatctaaaccactgtaaataagtcaggacaaatgatgt

SEQ ID NO: 96273 - DNA, 33662 bp, Homo sapiens
agttcaagaccagcctgggcaacatagtgaaaccccatttctacaaaaaataagaaaaaaaaattagctgggtgtggtggcacacacctgtagtcccagctactcttgagactgaggtgggaggatcagtcctgaggaggctgtcctgggaggttgaaggttgaagctgtggtgagctgtgattgtgctactgcctttcagcctgggtaacagaacaagacccagtctcaagaaaaaaagaatggggaggaaaagaaaaatataagttatcatccaatttaaggggcattgattccacacatccctgtgtccagacctctgtcaggactgaggaagccaaatgatgagacctgggcccttgaagaccttgccatcaagcagggagtaattgccagagaactgttcacgtttcacatgctcagcagtcagcaatgatgacaggagagcttgtcagttattctctcctctctggccttttggatgaaggaaaaaattatttttaagaagattatcaaagcctctacccatttttttcaccaactagaataatttcagctcatgcaaggaagtcagtattagccagcgtttcacgccttgcctgcggagggatcatgggcacgcatctttccaaagaacagcagcagccctggccgccccaggccagctcagccccctgtccttggtaggaccttcctgggcagtcctggtttggatatgtccagggcctacaagcacacaactttgtgcggtggccaatgtgattagtcgcctggtttgttactcagtttttcttaggttgaacccagcattttactccctgccagttttactagtctcatgtccatatgcctcttgctcatggtatccttttacatattttaaagtacttaccctctctttccttttccaaagtcagctctgctagttgaagagttcttctagcagactctgttccctaaatggggtctcatctatttacagtgtagtaattgggataagactgttaatgtggctgaatcctggagtgttgtttgtttgaacagccacctcacaccctgttggctcctgtgaggcttatggttcaccaaaaactccagatctcttgatttcataaggtgggtcttctccattctgatctggagtcattttgttgttgctaagtcatgtaattacatttagacttattaaatttatgttactgtgggtttgggggttttttcatttattttttgtggtaaaagacatacaacatttaccattttaccacttctaagtgtatagttcagttgcataaatactgtcccattgttgtgcaaccatcatcaccatccatctccagaacttttttaatcctcccaaactggaactccataccaattaaacaataattctctatttctcatcttcccagctgctggcaaccttctgtctctactctttgtctctgcctcaccctaggtaccacatatgagtagaatcacacagtattcacctttttgtgactggcttattttacttagcatgatgtcttcaaggttcatctatgttgtagcatgtgtaagaatttcctcccttttaaggctgcataatactccactgtatgtatataataatatcccgctgtatgtatagaccacatcttgcttatccatccatcagtacacacctgggtttctttgccttttgactgttgtgaataatgctgctataaacatgagtgtacaaatatctcttcgagtctcattgatcatgctggttttaagttatgcattacatttgtccattttgagttattggttgtataattatctataaatcacataaggtcaatctctttatccaaatcccttcttgataacaatgttgcatttcctattgattggaagaaatcattttgcacaaaatggtcatttcctgcatccctagtcttttttaaaagacttatgccatcgtcttcacagctgggctctgggaacagactgctttcatacttagcctgagtctgagtttgtcatagttcttttggctgaggtctaacttggggacggatgggaggtgaataataaccaatctctaggctgggtcaaagcaggaggttttgggcggttttgggttttgtttgttttttttttttacctatttgaaggtcactaagactacacggaaactatcaggcaccataaagaagggaactgagtctcggagtaacccacttaggactgaattcatttgctccgcaattatttattgagctcttacttgtgaaaagcacaaagtgtttttggaaaacagaagatgaataaacacgttccctgctttgaagatgtttacagtacaaaatattagaggaacttcctattataacccagagctctttaggcaaggcttccactcttagctgtaaaaacatatctccttaagataaagaggattataaaatacatcagaaagcaaagtgtgcttttatatttatattatattttgttatagatggattcaagtaaggatttggagacagactgaaaaatcttaccatgaaagctttagaggtggttagcttttgcttttctttggctaatatgagagcaccaggaaaacagaaagtactcttgctcttgacagtataaaattcttattatttttagagaatagtaactgcatttatgaaattctttgtcagagcaatttagttaatagatatgtaaatgactacttatttcattgtgtaggtggaccgctccatgtacactttctgaggaagaacataagtgctaaaaactattaacattgcaaatggaaagaagcaaaagttaaggctagaatgccattcccttgctgtattagatattaggagtgggacagaaagtccatcttgtcatcaagatttgttcggtttatggggtgggatttcttatttacatcccactcttggacggtcttttttttttttttttttgatgcatggaaactaatataaattggggtgcaagggtgtttcttgctgattttcaagcacaaaaggtcattacaaacccagctgggaagggactgggggaggtgctgaaagttaaaaccacggcagtaaattttcaacacaagggaatacctcctaaaaatcacctaggggctcttttaaacctttattgtttttttcagcataaaaacaacttcagaggagactggggatttcaaagctctctggctctaactgcctcctgggaacagcatggaagcttccctaatcatggaggagttaatgcaggcctctgggggaagaagtctctaatgggaggaaataaatgggcccttgccttgcagatggtcccaagccctcccctcactggaattcttcttgctctgtgagctagcctcatcttcagttgtgcttttttttttttttttgagacagtctcactctgtcacccaggctggggtgcagtggcgctatctcggctcactgcaaactccgcctcccgggttcaagcgactctcctgcctcagcctcctgagtaactgggattacaggcatacgccaccacacttggctaattttctgtattttttgtggaaacagggtgttaccatgttggccaggctggtctcaaactcctgacctcatgtgatccacccacctcagcctcccaaagtgctgggattacaggcgtgaccactgacatcagtccacattctccgcatgaggctggcaaacctgtaaatccccacccctcgtgtttgttacccccaccctgctgctctcactcctggtgactgaggccctttgcacttggccctcatctctgggatgtacacagctgtcatcctaggccccagctctacacgcaagctctttctgccatacaggggtcctgaagatagagaccagcggctgtgccgactcactccctggctctgccgggtgctgcacactgtcttcattaacgttgtctgtgtgttttttttcttttgttttcctcttccttcaggtacagagtgaagacagtgtcctcctgtttgttattgcatggacgatcacggaaatcatccgttactccttttatacattcagtctattaaaccatctgccttacctcatcaaatgggccaggtaaaaaagcacatttcaaaaggctcacttttgaaatgatctgtcattgaatttgccctttattgcctaaatattgcctcaaagtttctaaaaataaaattgagacgggttgggtagaaattttgtctgtagatttcatcagaataggagtctgtacttaactttgactaacggaaatactgttttaaggtttttatattttacttaaattattttaattgggatcagttcttttcaattaaattatgcagtattttcttttttaaaaaatttcatcaccaagtagcaatcaatagagatttgccgtaacatcccttttttgtccatatcatcacattttactgatgagcttctgccattgtgatgggtttttttggaccaagtcctattctcctagtctcaattttgccaagaagttgtgactcttaaattaatttttaggtaatgacaaacattacatgtcagttttagcttatcacttttgttttgctttgattgtttttacaagtaatgatgactttggtaaaaggctagtagttcatctgcttaccttaatgagtccatgagacagttgtaggcagttttctgagctgggaaggactttgagggagagtgacaaagcagaaggatccaagtccctggagccgaaatgccttatttggtggaaggaaagcagtggttcctagagtgtttatgagttcagtaattaaattagggacataatccgattgtttccaacattttgagtatgggaactcctttgttattttattatttttctcatttgcaatgaacatttttattaggaaaggggaagaatgggaaacatagcagttactaaccaacctggacagccactgtggaagctttttaccctggttgttagggaagtctgttgaccaaggcctgattttactgttggagaaagattctttcatccactgttctccatggcctctgaaagatttttttccaccatcctacttagtgtggctaaaattggcagtggggaatatgtcttcccttccacttcagagattttcatcacaattcctgtgcccagaagtttgtagtccgttgcacattgtgagccacaaacagccaaaggctgtttaaagtctgagctgatgattcctttagcaatacttatagtggcttacagttccatgggacagtgactgctctctgaattctttgtggaatatggagaactcctttttaaagagaaaacaattatgcagattcccctcccatgtgacgataattgtaattgtggggtgttttgattggaaaattacatagtaaccaaaagctattatgaattttaaatttttttaattgtatatatttgatttttcacaatagcatgtacaaacatttgaaaaatagtagcagtatacagatgcttatgctattttttttgttgttcagtctttgtgtgtggtgtggaattcctagaccacatgttccaacacctccgccactaccaccccaaccccatcccaagacccacagggcaggacccgtcagtataaaccatgactcagttcccctactttaccaacatttggcatcactttagttattttagagcataattttgaagagttgtttattttgtcagaccaaattttgaggctgcctgaacggcctttattttgtcgttagaacatttggaaacatatacctgctgtaggctggtttcagaaactggcttgtaaaacctgaatttgagtagcaggtaaacaggaaaatgtataaacaatcattttctaaaagaccagtactgattagaagggtgggaagtgcagcttccttctaaagctgactttgagcctcagtaatgaatattttgttttgttttaggtacacacttttcattgtgctgtacccaatgggagtgtcaggagaactgctcacaatatatgcagctctgccctttgtcagacaagctggcctatattccatcagtttacccaacaaatacaatttctcttttgactactatgcattcctgattctaataatgatctcctacattccaagtaagtaaacagttatgcgtatatttaattatgttttaaaatttggctctacaataactaaatatctttgactgtctttgcactatatccaagtaaatgtaaatctcatttattgggaattcttggtttttattgaatgctgactatcaaaaggaatttttttccagtagtaattgaataaagatgaacccttctcaatacagttgccaaaatgcagcccttctyagcatgtgggtttgaaactgaataccaggctaggttaagtatgtattggggaaagtactgaatggaaaacaaaaaagccattaaaggccttaccttgattgtagttttctgtgtcttaagaactgcttgttacagtatttgaaaaacatgataaaaagatttttgcattggttactatatcaaaatagacatttaacttcattttgaagggattggtagttaactagaaacataacaaaataataatagatttatttttttctaaatttttcattttcttgttgagcactgattgggacacagtgttctcttcaagatggtttccaattattttaatagtactgctgaagatttaagtatatggataatcaaatgtgcctatcagtgtattcagtgacagagaaaaagacatgtttgatgtctctgtgaagtgagccctactttctgaggatgaggagtttagtcctttgctggaattctgatgttcaattataaatcctatgattgatttctatataccaaaagatcttcttataaccaacgacatacagtgttagtggttcttctcattttgctatttctataaccactgtaactctgaatcttattttaatctagaaaagatactgtattcttccctaaaccccaggttaaatcagacagggttggayttctcctcattgcatggcatcatcggaatgaatcaccctaacaaagcgacatgcttgtgtccctctgtggaaaattgcatttcatgcattgtgagaaaaaaactacatccagatttcatgtgagtgtttatcttgcagaaattcttggatacagttstgcttcatgattcattttccactctttattcatgttgagtcctctctagtgctggaatcatagcgaccagaggccatctstcttcaaatgtaaaaagtggttgattttcaaacagatgataaatgtgaaatcatctaaactactaagtaataaaaattaactggtagtttatcacctttctaattttgttttttttttttagagtttcattttccagtctctagagcagcagttcacagttgcagttttaccacacccggagtaactaacacatattatcccagtgggcaccacaggctttatttgaattcaccatagtcaaatgaataggagatatgtaccatattgggtgactgggaaaggggcagggaggtttttatgaaatcagatccataacaagctgcttccacactgacaaaaatctaggcgttcttacctgagagttcctgcaagacttccaacctctctaggaagcagggcttccttccaggaaccactccccagggcagcctccatctgtctgcatgtttgtctctttatgctctggtagccaaccagtgctgagctttgcctcttccttctgagctcttggtgtagtggcagtgcctgggtaccacacgcagcctccatgatgatagcgttcctgagggaaacccactcctgtgagcttttcatcttggtcttgaaagagatagaggaaagagaaaacactgaccccagagccagctgtcttttagagcagcagtccccacaacctttttggcatcagggaccggtttcatggaagacagcttttccctgggcggtggaggggatggtttcaggatgaaactgttctaccttagatcatcaggcattagattctcataagaaacatataacctagatcccttgaatgtgcagtttacaacagggttcacacttctatgagaatctaaagccactgctggtctgacaggaggcagagctcaggcagtaatgctcatttgcccaccactcacctcctgctgtgcagctctgttccaacaggtggcggttggggacccctctttcagagagcagggaaggactctcctcccaacagaagtctgctttctttaccttaagtaattcccccttgcagtctcagcctccttttggtaagagaacttggctcagttaaagtctaacataatttctttttctaaggcagctaacctcttgtagaccggagaaaagggtggatctcaaataatgattaaaagattccctgcaaaccattgactcctcacccaggttcaagatggcacacagactacctctcctgatgcgagtcaccctggtgcctgctggcctcactgtgctgtggcctgagccagcagctctggatgttctcagtggttcaggttgttactgttgaggccagagtgtacagttcattctggccagctgcacatttccaactttccaaagctttgtatttatcagaagaaaatgcagaattaggagaggttgctgttgacatgcagtctcctttaccaaatttggttttctttctaaacaaggtagcgttcttttaatctttagtggcaagttgatgatacacatgtattatataaagtaacacctccttttcatgggcctcatctgttgttgcgttgttgcacacatagcctaaattgtggctcatgaggcttgaccccaggagtttcctcatattggggtgccctggccaggtgctcctctcctgttctgctgtagttgcaatatatacaggattagtacaacacagtccctgcaggactcagtagatgtctaaggcctgtttacattccacccccaaattggtgaaaattggttatggtggagggagccaaaaaagggcaagatacattgatgaggggtgaggacctggagaagctggcgctttccaggttgtcagtgactgtaaccacacctctgatttttagagaaaccaaggagacttggcccaggcagagagcatatctggtgctgtcgtcctccacagttctctccccagaggggaagagagccccaagagggctggccatcttcttaaagaaaggagggcccagcagcacccacacccccctcgtccccaacacacagggactgtcacacacacgtgcccagcagtgtccccattctgtgttccctgaattgggacagcagaaggtggaattctcaatagcctgttgtcrggttgaggggttttttcagtgctattcctcagtgtagctcatgttgttaaaagtggcagccgtgcatctgaaaagctttcagtctcatggtcgggttcagtctgaacatgtaggtgattcagatggagacagaatcatagttctggtcagccagaagccactgcctgaactgtggagaataggccagacaccctaggcccttggcctcccatccacattcctttctctgggtactgaggaatctctgggagatgtaaaggagtgaaagtgccatcatctgacccttctgataggtggcaggccctgcccatggaaatgaaggtctgcgtggccatcttcttccttgaactgccaccaagggcttaatgcatgacttccaggtcattctccttccccgggccctctgaaccagctgtgagactgcagccacccactatggggttgtgtgaacacaaatgcaaccagtgggaaggtcttgtgcatgcccagctcacagwttcccttcattacagtaaatctatagaaatgggactggccccacatttttaaatgattaccattaacattcctaatggtttaattatatctttacttccagtttttagattatagagcttgtcagattttctggctttcgtgccaaaatagttctctgcctgtcgaattatatgcttaagtggggtcttttctgtgaacgacgtcctgcctggcagtagcaatggcgtggatggcagccctgttccacgtgctgcctcctctgcaggttagcagatctttgtcacacacgcactggtgtcccggcgtactttgggaggatcatttgaaatctggccagcttggaacccatttaaaaaggaagaaacttgtcaggagagagttgggagtagtagaaattatcttccaaaaaatattcgtgacagtataaaaaagagagactgggctgggcttggtagctcatgcctatagtcctagcactttgggaggctgaggygggcacaccccttgaccccaggggttccagacaagcctgggcaacgtaggagatctcatctctacaaaaaattcaaattagttgggtgtgaagtggtgtgcacctgtagtcccagctactcaggaggctgagtggggaggattgactgagcccaggaggtccagaccatgagccaagatcacaccactgcataccagcctgggtgacaaagtaagactctgtctaaaaaaataataacaataaaatagagattggagctgttggagagatgaggagaggaaggatattgtacaacaaagagcattttacctggagttgtttacacacagtaaccttgtgaaggccaggtggctcaaagtggtatttcctagcagggacactataggcattttgggtgggatacttcttagtagtgggtactgtcatgcattatggcatgttttagcatccctggtctcatatgccaaatgccagtaacctttccctttctcccttatttccaaatagtcaaactatcgaaatagttccaaatagttccgagggaggcagtactatcccattcatttgagaaccagtgctttctaaagtattctacaaaatgaccaagaacagaagaatccccagtgcctaagacactggcttgcttttcataaggccttttttttttttttttaacatccaaacctggcttagttgtgttcaaagcaaatgttgtggcattcctcctcctcctcaagtctttacccgaaactacttcccaagagaggttgctcttcccaaagaatcacctgccctgggaccatatggggctaggctgagggtcaggagccaagagcctggtcccaactctgtctgtggcttactgtgagaccctaggcaagttgcttaccctctctggggctcaaattcttcctctttgaaataggaataataacttcatcactagaattcttcacctggttgttgtgaagttaatcagaataaatgtggagataatacatgaatgagcgtacagaatattatttggctgttctgtggcatcgatataggtcatgatagtgacaatagtgtctgtcattgtattccacaccacttcttccctcagctaaagcaggaaaagaaaggaggtaagtctctctgtgttttttcttcctttccccaagcccactttgttaccttccttggttgctggatgagaaattagtcagagggtcagagaggrcctcaacttcatatgctttaaatagagcatatgcaattttaaaccatcctcttaaccaatttttcttttcttttcagtttttccccagttatacttccacatgatacaccagagaagaaagatcctttctcatactgaagaacacaagaaatttgaatagttcctgctttctgcacctcccaccaaaacaaacttttcaatgatcaaaaaatgctgcagattttttgagttcccaatacgtttcatagaaaataagtaagaactatttttaaaatattcaaacaaaactaaaacaaaaatccagtgtcacatgggcctgagattttattttagaaaaaggttgttacataaaacaccctggccagttcatttcagcatgctctttcaaccagaagttcttaatatttatgatggcactagaaagggatttggcattttatgtccttctgtgtccttcatgtatctgatcaatgaagacctgtaacactaagtacttgagagttacagtctgaataatgaagtcgtaccagctgaatagcccagcttgcagtatagttatgtttcagtctgcagtgtgtttagcattcccttgtcaaagtgcttgactgcatgctggaaactttgtatttttgaagcggcaaactctgttctctggaatgctctgaagttatggctgggacctatcccctcacatctaatgaatgaattataaaatgtatatgtctatgaagcttcggggtagtgcctgtaatcagaaaacaacttagaacccttttgtttgtttccaattgagtcattactgcctgccactaagaaacgtgcttgaatctaataagtatgtgtgtaccgtaaagaatatatcttatctggagctcagcctcaatcatgtcttaacaaaatgacaggtctcagaaagggggagctcaatagctcaaaagtgacaagtccttttcacagcaccrttctcagaacacctctgagtaacgtgtttgccagtagctattctcactgatgcactgatggccctgaagaagcggatccagtcacataggaaaggaggctgtgttagtgaaagcacatggaaggtgttgctttagaaaggtagtcaggaaaaacattcaggaatagatttatacaccattattgttttatttttaaattttcattcactcttctgtttggatacttttgctaattaacktcctatgttaatttccaccaagctataagtccatagtcagtaaaacattccccttgggctgtcatgagctaaaagcagtgtcatctccgcatgttggagcagccaagaaatagtttggtactaccgacatygtctaatccatgtcacatcctcatacaatttaattgctcaaccatgcatttaaaactcctcaagaaaggattggtactgcaactgtaggtaaactgaaaaaaaataagaaagaaagagttggatgaaaatgtgaaagcccaagtttagatgtgcattaagtattaaatagcacagtatcttcttcatggagccttttttcctcccccatcccctgcagctgcctttttttgggggcagggtgggggttgatgttgaactttaagagtttaaaagtttagcttattgagtagttgtcatttaaaatataattgcgaatatcagaaaactcatactggaaaactaaattttttttttctcttgagacggagtctcgctctgttgcccaggctggagtgcagtggcgcgatctcggctcactgcaagctccacctcccgggttcacgccatcctcctgcctcagcctcctgagtagctgggactacaggtgcctgccaccacacccagctaattttttttgtrtttttagtagagacggggtttcaccgtgttagccaggatggtcttgatctcctgacctcgtgatccacccgcctcagcctcccaaagtgctgggattgcaggcatgagccactgcacccaacccctggaaaactaaatttttaagtgcttatttttatagaagtttgaaaatttaatgcaggcaggtgtgtaataaattatttttgaattgaacattaaaattctgcttcttaaagtcagcactcaacttggacatgttgaaattagaatctattcttgtatttgatagacaaaatatgtgggaaagattttttgcatgacttttctctcattttattcttccataatgtatttctactataaaatagaatcaacttgggttatatttgtcatttactttgttctgttagattttttcagttgtttttggaaaaattctagaaatcaggatgaaaaatgcagcttttccagggttgctggactgggggttttatttgggcctccttattataatttgtcactacttataaaaaacattctgttgcaaacagtggtgttgcattgaattgaactttggcaatgagaacacagcacacagctcccttttcaaaaagggtctcaaccccagtgtgtatttttgtacatcaacatttagaatacttatggcagataagtaaggcatgtcactgtgtccttcagtaacctctctcagtaactggtttctttatccctaacatgaattcatttctcctttgaagtcatttattattttataaattgagaacaaccacaccaccaaatgtcacaccttcttataaagtgtgaacaaggaaggtcatgtttttgtgggtattttgtcagacttagaggtttcatttcagggcatagtcaaaggcatcatcctcccaactacccacttgattatgtatttcagatccctccgtgggggccttcttctgacagagaattctttgaggtmcgcagtagtgcttttgtcagcacagactgctaatctacatcttgctgcgttctgtttgctgaggttgggcttattcatttaacacrtaccaaccattatccagaggcaccatggagagttagtcatggaataaagcactgtccttgcagatgaaaaaagtctccagagcagacttctgacaggaaaggtttagatgctggagagttgaagaggtgtaagaagagatcgtgccctcatttttcacttatttttttggttattcatttataataaaaggttggcattgatatggtayaacctgcaaattacttgcagttctgagtttcagataaaacattataaaacattaaattcaatacatactgctcctttgaaatttgggtaaaaaattgtacaaccgtatawatagtcatttttgtattttttctatgttgtgaaaaccaaaattgtaattttataagtctttgattcactaaaattatataatttaaatgtattttttgtatatttagaaataaggagtccagagactacgcttaactttctatgcatgcatttgaaagctgtttttacctgataatgtagtaataagttgtattcataaaatactgatctgtgttgcatttcaaaataaactggtgtgtgctctgcctggatttgaaatacctaccagtgagtgcagtgatttttcatagtcagtaggcctgaatgtggtgttgcaggaatatgggagaatttcagttcaattatggactccagctctttgacaattttaaaatctaattctgctattcataatggttctgcacttacaggaaagacagattatattaagaggtttccaaaaagtccttccctgccagtcagtcttcaggctaagccagtctgcaagctggctgcagagggacaaggggttcctcatgcaagtgaccagggaatctaagatattaatcagcatggggttgaggaaccttgtcttataacaagctggggttttgttagtgtaacttttctttttttgttttgagacagagtttcgctgttgttgcccaggctggagtgcaatggcacgatctcagctcactgcaaccttcacctcccggattcaagcgatgtttctgcctcagcctcccaagtagctgggattacaggcacccgccaccacacctggctaattttttgtatttttagtagagatggggtttcaccatgttggccaggctggtctcgaactcctaacctcaggtgatccacccgccttggcctcccaccacgcctgggattacaggtgtgagccaccacgcccagcctgttagtgtaacttttctaacagaagttcagcgggagatcctgttgcccagcactgttcatcttacattaaagcaagatgtggtgaagttcaagtacctcattctgaaaatgcctccaaacacaggaatcccaggagtggcccccccttactcaggctcgcagtaagaagtggtgggaaggacactgccttggggtgtcctcygctgggtcacagctgatctagctctaggcctctggtgctgggtatgttctagtcacttttcccagtgacgacttgatcatggtgcctgtagcagtgatgtgctccccacctgagtctgccagctctttctcagatcatcaccacggcctaagagtgtggtctttgttccaaaggagaacacttcccttctaaatgccatctgatcgcagcctagatgttcccagctcagaggttagaccacctctcctcatgtagagcctattcagcttcagaggttggctttttcatttatgaaaaaagtattgcagctgaaactgcggaacagatggtaaagttaatagtagaggctactcagaaaacacaacctttacaatgttagcatggtaatggagacaagggctttccaatttgtcattgtcatattttgtggcaattatgtgtactatgttaatataagccttagcctggaggaattaccattggtataattaagagacctactgttacacagcattccaaaaatactgctgtgtttttctattccctttaacaagaatgaggactagcttttcaattccttttattattgaaaagaaaaaaatcccagcctcacaaatagcctggctcattgtcatacagtttaatggtgaagaaactgttctaagcaactattaccaaaattagccatacctattaacatttctctgcctataacagaaccagagttagaagagagagcagtgtggttatttgaccaatacttcttttaatttaaagatatattagtgctatgagggcaagtctcaataccaaaaataatccttcccacaaaaggcaattcaccctaaaacctcatttggtgagcaaaaataagaatgtgaaaggctgtgtatataagcacctagagtgcccatttcataaatatttttatgtttggaagtcacgctttctgctccctaattccagagcatagacttgttaccatggtagtgctttcacatctatctttggctttgggtgsaggcaatccagatgtgtttccagatgctgcacttggttaaagccgggatctgtatttccccctcggtgttgtcgtagccaggcttccccactcgggggcagcacctcacaagcgattggggccttaagagccaaaggagtttgggaaacagcttcatcccaaggacacggaaaggggcagaggcactctaatgaaaatcagtcacggatcttttattgtccatataaagcaaagacagattttaaagcatattctggaggagtacaggaaataacactttttttggagcaaagaaaccagcttgggtgcgtgcttcgaggctcaatctattttctcccagctgcagagccctcctccccatcgcagaccctgcaactacttggttttgaaaagcagagcgcttttggagctggcttgcaaagcaggtgtcagccctcctgtttcatggagagcctgcttgttcatatttgaaacgttcagggaggccagttcccactcttattctgtctctggatatttttggagggtggcctgggccatgagaaaatgtcaggccaccttataaggcggtgtctggaccaagaatgcttgtctgcagcatgttcagtctattctgtggatttcagttaacttgactcttggactgtgagttttctcacagatttaaaatgcttctgttcatgccacagattattctcactcttcaacaggctgaaaatcttcctcaagagatagttgtttaaatgacaaccactttggacataccaaatggataatgtccttcactaaccacaactagttgattgtgcctgggctgatagtcatgttcaagtgatttgctgacttaacgaatatatgttaaggtgaaatccacagactattagttctcagtgatcatgggaacatgggcatgttagggagaggagtctgtggtttaaaacactgaaacaaaaattaaagttttctctcctgctaaatgtttcagatctttctgtatatgaatgcaacctccaagaggagtgttaatgcaggattttccaaacctgtttttcacctttatctttgacacgtcttcagggctaaagttctttgaacacactttgaaaaatactaatctatcggtggcagctgtccccatcagggaatattgacctatccaaggggaaaaatgagagatgggggtttagcctgggctctaggaagatttttccttgttcctgctctgttgtttctagggatcttttttcttcttttgaggcagggtcttgctctataacctaggctggaatgcagcggcatgatcagggctcacagcagcctcaacttcccgggctcaagcaatcctcccacctcagcctcccccatagctgggactacaggcatgcaccaccacacctgaataattttggaggtttttggtagagctggggtctcagtatgttgctcaggctggccccaaactcctgggctcatgccatcctcctgccttggcctcccaaagtgatgggattataggcgtaagccaccatgcccagccccttggggctttaaaaatatatagaaatcaccatcatcaaataggtaattgaattattaggctgagaacccaggtgtcggcagcactggctggaggcttccacttgatgtgaacttgtctgagcagactgggctgggactggcagcacctgtggtgctgtgatcaatctgctgggcctcaccctggggctgcctgcctgggacactctctgtaatttcttttaaacttcatctttcaatctcttactcactatcagcccaggatatcacccccaatttcacagagaaaacagagccatcagatagtaattccttccactttttttgtcaccagatctataaacttgcccatgctgggatcatcctttccttttcctgatgttagaatggatggggtgacctttcaccaaaactaatccctaccttgtgctccagatgtttttatctttccctttcctcacagacctcactctgtcaattctccctctctctctctgtacttcctctttgccagctcttcccatgttggccttgaccccatgtcctccactacttccacctctctcctgtcctctggaagagatacctatgaagcacttctttttttgagacagagtctcactctgtcacccaggctggagtgcagcagcacgatctcagctcactgcaacttctgcctcccaggttcaagtgattctcttacctcagcctccctagtaactgggattacaggcctgcaccaccacgcctagctaatttttgtatttttagtagagacgaggtttcactatgttggccaggctggtctcgaactcctgacctcaagggatccacccgccgcagcctcccagagtgctgggattacaggcatgagccaccgtgcccagcccacttctctctttcttatctggcactcttcctgtctcactctagcctggcttttcctatcatccccctctgttcaaggtcactaatgaccttgttatgaaagccagtgcacacttttttgtctctgtcttgtggttgaagttggcgtgcagtcctgctgggtgttagaaataatgatacggttttggagtagactggggggcccaacaatgcccagtcccagcccagaactctcatttctcctcgatgcattcccagtggagttgtatacaaaagaatcaatggaaagcaagcaaactcgtgttgcagttaactggcttgagccctagggtaggattatggtagtctgggcagaacctcacagaacactcctgcttcctaaaccagtgagaggtagtggcttcagcacaggaaactgtgagacctgctcaattcacctctcacccgaccccatcccactctccatcctagcacttagctcttatccactgaaatggggagaaaggctgctccgacacccccagctccgggacagaaattcataaagattgagtgcatgtgccgccatgctcggctggtgggggccagggccaggaaggacaggaaagcatccaagaagagagcccaccccgctccacttaccacttaggactggagagacagaagagggaaccacacccctgtgcacagacctcttaatgcccattggctccatcactcccactagcaaatgcagctccatcacaatctcagaactgaacattaagatcaacattcctcttccttagggaggaacgaagatgtgttggagaaggatgaagatggactttggaatccttcccaggaagccaacatctttccttcccatcagccagccatctttcctgaaatgaccttttcttttgagatcctgttcttttggttytctcctgcctaaaccaacctttctctgtctcccctgccaaccccccaactcagaggttctcagacttgagtgtgcacctatggcgctggttaaaatcagattcctggaccttccccaggccttctgaatctgaatcgctggagacagagcttggggttccatttttaggcacactccatgggtgattctgatgcaggggcttctgggttaatttgggggaacattgccttaaaggtgcctgatcctgagggttttgttcagcatctcctctcacttcgaaccccagacccctgaccagtggtccccagagcatatctggcccacagatgtattctgttctgcccacattgtattaaagtggaaccagttataaacactttaaaactgagagacatcatgtaaccatctaagaaaaatcagaaggtgaggctgcaggagtccacactcctacctgtcaggcatccgcaaggaccagggggagctgccccactggatggagcactagggaaagggttcagcttaggccccagtgcttcctgtccagagactctggttcagccctgtccctgcccagccagccttgcaggtttctgaagcaggcgctggagaggagcagcaaggctcccgtggcttccagctgcatctccatgctggtggctcaggcctctgtctaagcctgcatcatttcagacttctcctggccatcgccactgaggtatgccatgagcaccaaaggctcaacctatccaaaatgaagcaccctcctcttcctctgccaccaatcttttcttcctcttcctcctcctgccctcctcctgtctcccccacctcgctgaatggcatcccatcgtccagttgctcaagtcaagaacttgggagtcacttttcctcttctgctccctgattggccccgagcccccttcattttgaatcagtagctaaatcctgttgattctgtctgctgaggatggactgaatctatccaatctatcaacttccctcttccactgcctcctttcttgtccacgccaccatcatctctcagctggatggcagctgaagcctcctaaccagcctctcaccttccacttctggtctcccgaattcattctccatacagcagccagaatcaacttttaaaaatgcaagatgtagccaagcgtgrtggctcacgcctgtaatcccagcactttgggaggccaacgcgagcgcatcacttgaggtcaggagtttgagaccagcctggccaatgtggtaaaaccccatttctactaaaaatacaaaaattagccagacatggtggcacatgcccatagtcccagctactcaggaggctgaggcaggagaattgcttgaacccgggaagcagaggttgcagtgagcagagattgcgccatcgcactccagtctgggcgtcacagcgagactccatctcaaaatttaaaaaaacccaaatgaacaaaacgaaatgtgagatcatgttttctccacttaaaagccttcagtaagtgtgttgttcttggggtaaagtccagactcccaaacatgagctaagaccttcatcgacctgtgcctgcctgcctgtgtccctagcccctccactccccatcctgagaaagcctatcaggctctcagggcgcttggctgtcacatcctggcttttgtacaccacattccctccacttggaagactcattccccctccaccttgctaattcatttccatccttcaggtgtgactggggcccccttctccaggaaatacctgccccaggtcccagaactggctatggtgctcctcctagatgctcccacagtgccagggttgtcaaaacaaataagcccagctaaatttgaatttcagacaacaatgaagaatttttcagcataagtgtgtgtccagcaacatgtttaataatttgccaggtgcagtgactcacacctgtaatcccagcactttgggaggctgaggtaggaggatcacttaagctcaggagttcaagaccagcctgggcaacatagtgagaccatgactctacgaaaacataataattttcttaaaaacactttaggccaggctcggtggctcacgcctgtaatcccagcactttgggaggccaaggtgggcggatcacaaggtcaggagatcgagaccatcctagctaacayggygaaaccccatctctactaaaaaaatacaaaaaattagctgggtgtggtgacgggtgcctgtagtcccagctactcgggaggctgaggcaggagaatggcgtgaacctggaacctgggaggcggagcttgcagtgagctgagatcgcgccactgcactccagcctgggcgacagagcaagactccgtctcaaaaaaaaaaaaaaaaaaaacactttaaataatttgctaacttgctctgtgacaatgagcatgtttccccatcacagtcctcgttgctctgtgacaatgagcatgcttccccatcacagtcctcgttgccgcctcttacctgtttgcccaccaaggacggaaagctccccaagggtaagaacttcatcaggcttgcttcccactgtattctcagggcccagcctttcactggggtttgggagatgtcaggaagctcataaacagatgattaaatcaggtagtttaacggactgtgaagaaacctagaaaggcaatgtgttagaaagtgtggtcagatgaagtctctctgaggagtgattcaggatttgaaccagatctcactgaccccaaagcccacaactgtttccctccaccagggtcaagcctcatttgtggcagaatatcatgtgagttgcccaccaaggcagcctctcaaaggttgcagaagctccttagagactggaggcctctctgagcccttggggctcctgacaagcacggtgaatgtgataagacgtcgaggtgctgggaggaccccacctcctggagcccaggctgcagcaccattccatggctgctgtagtcagagcactgggcatctgagctccaaactttcctgactttcctgggacccagcatcaccctcgggtcccggtcattagcagagctgctggcagctcggagtctgctcacaagattctcacaggcctccaggtccttatctgcagcatcctgggaccaagccccctccccagggctgggctgggtgggccatgccaggggcacctctgcccacagcytaaagcctacattgcctatgtttctttgggtcattgctgcctcttcttcccagcattagggcagctcatcaagccccagctttccctgaaagccctcctgggcccggcagcacacactgacattgcctgcccacagctggggctgctttacctcatgcccaaagtaagccgaggagcagccccacccgctccacggaagactgcccctacccgctacagcaccacaagcccccagcgcacatcgtacctgagggaactatgccatctcaggcgtggaaggggcctcagaatggcgttgtcacctccagtctccacttgtacagagttggaaactgatgccaagagggataggggccacttggctgggcacggtggctcacgcctgtaatcccagcactttgggaggtcgaggtgggtggatcacaaggttaggagatcaagaccatcctggctaacatggtgaaaccccatctctactaaaaatacaaaaattagccgggcatggtggcagatgcatgtagtcccagctacttgggaggctgaggcagaagaatggcttgaacccgggaggcagagcttgcagtgagctgagattgcgccactgtactccagcctgggcaacagagggataggagccgctcctcatccccccaccccaccctacagcctgcaggatggtgtgcagggcatttcagggtaagccaagtaggtaacttcctactcctccagggacctgagcttgctgccaaggcaggcagagtcagggctgcccacattgtgatctcaggtggggattttccgggagattgtggatttaggggggaccctcccaggccctgagaaggatgtcgtgaatactgccgcgaataagcttggaggacacaaccagggggccgctgtttcaggcagcccggggaggaccgagggcaacagaaagagggaggtccaccaggagtttccagtaacccctctggaagcttgtggttgcacagcttaatctgggtctgtgagggttttcccaagtttcctacatgtatttacccaagaactgatatctgtgggcaccttccagaaggcccagttcctgcctcagccactctcccctagtcagagcagcatcctgaggcgcagcctacagatacggagtccaagggcttgcccagcctcctgtcaggaatgtcaatcccaagccaggtggctgtttggcttgcctggtatatttagaaaagtcaggctccctgctcccttacaaagtgtgaactgcacctatcacatggaaatgtgattcacttctcagcagcccagctgagcggcttccaccgcccccaagcatccctcctccctgcctccctcagccctctctgcacgggtatcctcatatcctccagtggagctgaaggccctgccccactgtgacagggaagggctggtggaaggcacctcagtggtcaaaggcaaatgtcccttttgcattttctggtagcaatgcattggtcttactctgtttcctyctctctggaaatctggatgctttcttcctcagagtcctcaattctcaccgccctgacacacacacactctgctcctcctggggtcttgagaagccctggattgacttgcaatctgaccatgagcccctcatgtaaacaagtggcataaagcagaggttgtatcctggcagccagtaggcttttcgtttttgtttttgtttttcttaaaatgatattttaaattgttttggttaccagcgttttaaaattatgagagttcacattttaaaaaatgaatttcctgcttctcttgaaagaagatgtggcactccggcaagcctgggcctggttcctgcacgcctcggcacacccgcggggactgagtggaggctgtcccctttctacaagtgggttctccaggtcacctcaccaggcctgtgcattcatttgagttccctgcctgggccttggagatttctggatttagaactccacatacctgggaccttccattccagcagagatagagcagagacacccctagtaccatagggcctcatttctccttttcctccctcggtttctcactcttcactcttcagtcttctgagttatctcccttcttctcgcacccctcttgagtaccctgtatcattgacttatgtggttctatttttgcccaataccaatctcccagcccttccttgcctggttccttggagacagagccttgtgatgctttggagttgggcgtgagttcgattcctgctccactttttgtcttcaccactttcctgagcctctttcacgtaaaaaatagagagaaaatgatacctcgtttgcaaggttgccccgttccctagctcatgaagtggtcaaagacagctgagtttgtttcagtggagagcagagactgtggcctcctctcctggccctgcagaaacctcagccacttccccattctgtggtcccaggacatagcacgtgtgcacaggctaccyccagtggggcccagaggtgccaatgcctctgacacttgaggacaggaactcccctaagtgacaagcctcatcgggctgctagacactagtcaggcccaggctgggctccacccaggagtcacccaggatctcaggacatgcttccccctccttccccaaaatccccaaagccaggtgtctgcccctgcccaggaccacagggaatactgctgatactgctcagcatgtactgtgccaagcactgtttatatttttcatatgygttaactcctgaaattatcccaataattctacaatttcaacactgttagactcccattttacagaggaagaaacaggaatcgttgaggaaaggttaaataactggcgcaaaatcacccagcaggtgagtggtagagcctggctataaagggaggctgtggagttccagaacttacacctttcatgactgtgctaattataccgcttttactgtagctcccagaccacggtgccccgtgctgagcattcagcccctctctcgccatcttgaatcacttcagctgccgcagcccagcctggcccccaagctggttacccrtgagcaccgcgtcatggcagagcccaaacaacacccgcaataggcaaatacctggagatagaactctcgttttgaagtcaatcttttgatcacacagagaaagtaagtgctcaacaatgaaatcctcttccctttgttgtcacaaacataaagcaacccattcaagtgcccacaaaatgataaaatccccacatctctattcctcatttttgccgtcttgctcagtgctagccttgagggcctgatacagctccttctgcacctgcaggctgggtccctttcccttgggactggcgggctccttcagcccctcctagggacactgacaccaacctgacgctcacaaaaagaattctcagaacctgacacaatggagccgtgttgttttcttgcttagaccctggcagaaatgtaatagctaccctgggaggggaaggcatgccaggcagggaccagtagatggagaatctaagcaaagaagggaggaaatccgcttgcattctgccctgacaggagtccagtcctcctcagccctacaaaggccctgagctgggcagctggccctccgtgggggtaattcccactgagaggttggtggagctgctcagcacactcacgggcttctagacctgcacctgcgtgtccctgtggtccattagttcccaagcccaggcgctcaggggcccaggaaacatgatatgattcttttccacaggcttccaaaccttgcccgccctcatcctcaggttctccaggtcctggctgctgctctcacctcccatgagagcaccaagtctccttcctgctaccgcaagacttgacctccctagaaaaaaacagccagtccccagccgtctcttgagaatcaggacaaagaagcgaaaacacaaaaacatggtggagacgcagaaacgtgccctttgcccaagtcccgccccctggcctgccccagcactgtccacctgaaagccctgcctgccccagcactgtccacctgaaagccctgcctgccccagcactgtccacctgaaagccctgcctgccccagcactgtccacctgaaagctctgcctgctccagcaccgtccatctgaatagtccagtggcactggaggtgtggaccagcctgcaagggagtctctattcttcccgacaggacaggcagccaagcttgctgctggcctaaagccctgagactcctccccaaagcaggagcccagccttttcctgtctctccacttagggggctcccttagccctaggactgcccctactgagtgactcttgaagtcaaactgttgctggtggcccaggcacacactagtgggaacagcctgctgttcagggaaaggatcatcagctcatagggttcttgtttgtagtgcattaaagcaagtctgggacctggttcactgggtcattgatttttaccctggggaaagggggtagccttacccttcgttgatatggaactgaaagacctctgttgtggggagggagaaaaagagatggtgatcattcacagtgattcaagacaatgattctccagaggagagcttgttctacggcttctgaaactaagctacaggcagggccatgctacccctgaaggctttagggggaacccttgcttgccacttccagcctctggagactccaggtttcctttgcttccagcagcttcactccagtgtctgcccctcccttcacatggcattcacccctgtgtctctgtgccttaaatcccccctctcctttcttctctctcatgggaacgccagtcattgcatttagggcctaccctaaatcaaaattatctcatcaagaaatgagtatgtaatctcatgataagatcttaatatctgaaaatgagatctccatccttaattatatttgcaggccttatttccaaataaagtcacagtcacagggaccaggggtcaggacctagacacatctttttggtgggaacaaaactcaactcactacaccctgtttcctcctctaaaaatgaagacaataacatctgccttaccgcgtgatttcaaaggttacataggtcagcacacatacggttcttagaacagcacctggtgcctcataagtgctcaataaatgtgagctattattacaattcctctgccacctgccaaactcctcctcacccttcaagatgcaactcaatgaaacttgctctgagctgtctcccaacccctttcttctcacccaagtgaaagcgctgcctgcacatctgcttccgcggcctttgtagacgcccctctagcatgggcgtcgggatgagctgtatagaggctgtttcctctcccagcctattggctcctttcgatcaagaactggatcttattcatctctctctctctctctcttttaaaataaccctttttgagtcctacaaaaatatcttggtcacgagcaataatatgtacgtgtatagagacatcacagagcaagaatatttcatcatcatacacccaaatgtttcacagttttctcctgataatctaactggtatccttcacctttgtccctccagcacctgctgcaaagcctggcacatcggggaggagcacacagagtgcttgatcattggaggaggaaggcagcctgaggtcagagcagacacaaaggggcagctgaatggagccaaaggacacccccacggtggggggatgtgggcagtttctgaggttgatgagaggatgaaaggaatggcctggggcataggggcaactgaggcacgacagatgagtgtcagcattgagtgtgcttgaatgctccctggcatcaggtaaactctcagccctgatccatggccagtctaggggcactaagaagacaaaaagaggaaggctgtgaccatggcctggctgtgtgaaaggcaaatcagctacctttgtttttatcggctgtttattatttatgactaattaccatgcagcaaaaagcggctacatatataattacacggcagattgattttgttattagcttcttttaattatgctgctgatctctgtttcctaaatcttcactacccaaaaaacaaacacaaaaacaaaacagccaaaaatagaagtcctactgcccgcctctgctttcacagctgggcaaggtaggtgggatcctggttcagtctccacaatgggatcagttcctcagccagagccgctactgtggctgttgttaagaactatgttgggctgggcattgtggctcacgtctgtaatcctaacactttgggaggctgaggcgggcggatcacctaaggtcaggagtttgagaccagcctggccaacatggtgaaaccctgtctctactaaaaatacaaaaaattagccgggcatggtggtgcatacccataatcccagctacctgggaggctaaggcaggagaatcgctggaacccgggaggcggaggctgcagtgaaccgacatcacgccactgcactccagcctgggtgacagagcaagactccatctcaaaaaaaaaaaaaaaaaaaggaactatgttgtactgagcacttgccgtgctggctgtctcacagcacagcaaccctgctaatatccaatgaacatgcccgctctgtagaggcgcctctaaaagcctcggatggagtcattcccttggctggggaaggggtcctgggctccaaaggtgggagaagctccaaagttcaaagcccctccaagtgtccaagttcactcccatggggtccatcctgcccccactcgggccagcggcttgctcatctgtgaaacccacttgtttttcacccctgccttccttaccctctctggttctttgtatcctgtccctggtccctgcagtgacaaccatgtgaaaatggactcctcgggttccagccaaaataagaagacaggaggaggcagggagccacagagaaaagccaggcaggtctgcagcaggtttagaggaggtggagggagctaatccagatagtgagacaaccaagggagtgaactcattgatctggaacttgtaaacgagctaaacccacaaggcatggtcagcatgtgtgtgcatcagagaagccatctctggggcgccccgataacttccttcattggagagggctcctcactcgctgcagggatccttccctctctccctggttaattctcacctgtctttccggttttctctcaaacatcacctctccgggaagcctatcccaggagccctctgtgtccgactcccctggaaatgttctgttgctctatgtttttccctctgagtcctggcacaggcatccctaagtgactgtggctagtagttccggttctgcctcatttcctctcagaagggaagctccgagaaggcagcgattcttgacttgttcagcgctgtctcccgagcacgcgcatcgcgttaggcacgtagtaggcactcagcaaacatttgtcaagggcacaactcgagttggaaatatgggaggagtaagtccaggtggaaggaaagaaatgtgaaaagtagactttgccttgtggcttgcaaggcctttccccttttaggaattgctcggcccacttaggaatttcacaggagcatggaatcctccagccacgggcaatttcctcactgcgtccagactcttctgctgttctcctcaaagagccctgcaaacgaaaactcctcagctttccttccacgttgcttgtgacagagacttatgctgtttgctgttaggaagttcttttctgagtttgactttatactttgcatcccattttcaatcccttttccctcttttgaacgcagactcacagtatcagaacttcacgggagcttacagatgatctaagaaactttcgagcctttgtttcctaagcaggaaaatcccttttcccagttagagaatctcatctctaaaatgtgaggctgatgaaagggaaacagttctgatggatgtaacaggttgggagccctttcagggcacccccaggagcttcaaggaacccagtgtgaaaaccactgatcaggtccaagcctgatacttagtggatgagaaaattcaagaagggaagtgatctgtcccagccagattacaactcacctttgccatccttaagttcacagcccacatccacctcagtgaaaatgataaagtttggggtgctctgcagatgaactttttgaataagtatgttccagtgtcatttgggggctacgtgtttttgttttcccttttgtgatatttcatacttcaatatgccaaaaaaactcaacaagaagttggcaaaagaagttatacaagcatgtttcacaaatmtccaaatctttgaataaagatggtcatcacaatttcccaaacatttccacatagggctgcagagtaaggcccatcttttttgtgttatttactcatttatttcttttggagcacatttgaagcacaaaccatgccattgcaagaaagatccaactggaacgagaactggcggggactcgtttgtgctgagactcattaagtttcccagccccagggattggggattttcatggaatcaatttccttcttgggactgttaacataatcccttcactggagagtcgagggtcctgccagcagccagcacagtgggtctgctgtgggcctctgaaggagaacattcccaaggaccaagaggaagggccaagcctcttagatgtccctcgattcacaagctcttcatgccacaccctcaccctgccctccaccttcagccagctcccagactccagggcagggaaatgggatgtctccgatgagcaggatccatagcagtgccctgtaacagctattacagatcactcatctgccacgtgccgcccttcaaacatcagtcaatgggttgggtgcagtggctcacgtctgtaatcccagcactttgggaggctgaggtgggaggattgcttgaggctgggatttagaggccagcctgggtaacaaagcaggacaacatctctaaaaataaaaattaaaaaattaaaaaaaaatctgttgacgtatcatgttgtggatgccattttttaattaattaattaatttatttattttttgagatggtgtctcgctgtgtcacccaggctgaatgcagtggcgtgatctcagttcactgcaacctccagcctccagattcaagcaattctcctgcctcagccttctgagtagctgggattacagatgcctgccaccatgcctggctaatttttgtatttatttattttttttagtagagatgggttttcaccatgttggccaggctggtctcaaactcctgacctcaggtgatccacttacctcagcctcccaaactgctgggattacaggtgtgagtcactgcacctggcccatttattaagcctctagtatttgccaggcactgggccagtccatctaatcctgacagcaaggaatgacaacattggtatctccattttgcaaaggtgaacactgattgtcagaggagcttgagccaagtattatttcacttaatgtttgcatacattaggttgggcaaggtggctcacgcctgtaatcccagcactttgggaggccaagccaggcagatcacgaggtcagaagatcgagaccatcctggccaacatgatgaaaccccatctctactaaaaatacaaaaattggccgggcatggtggcacatgcctgtaatcccagctactcgggaggctgaggaaggagaatcgcttgaaccagagagtcggaggttgtggtgagccgagattgcgccactgcactccagcctggtgacagagcaagacactccacctcaaaaaaaaaaaaaaaaaaaaaaagtttgcatacgtcatttcatctaatactaataatggctgttattgctcgaagaccttcttcttcatgattatatacttgtttactcctcacaataaccctatgaaattaggtattattatcattttcatctttcatatgagaaaactgcggcccagaatggttaagaatctactggggttaggcatccctcagctttcttatcagttcagggtagtctcaatt

SEQ ID NO: 96274 - DNA, 21859 bp, Homo sapiens
  misc_feature (1)...(21859): n = A,T,C or G
agggggtgtctctgctgtggctggaggtgttacagctgttgggtctgctgttgtaaacaaagtgcccttaacaggaaagaagaaagacaaatctgactgaaatatagagatacacttgcgctccacagcactgtaatgccagtggcattgaattgctaaattatggactacaaccaagtcaactgttttggacgtttatcttctaaactgctgtgttgaaagtattgatgactggctttcatctaaaaagaagagaccaatacgagcacagtatatgaaggtttctcatacttaagttccaggtttttatctggtaaaatgttacacttactcggttgtaactgaagatatggtatgtttgaatatttactataagtctttcagtttgactaaaaatgtgaaagttgaatttagtagatgatcttcacagttccatatgtataatgtgccaggtaactcacctgccccttaagaagggaaccttgaattacataagccgtacctttgatgtgcctaatagtttcagatgtcttagttttttataaccatagttgattaggccaagaggcattcatttcttatttaagctggcaaaattagcaggaattagagaagtttaaaaagataaatggttttatgataatgttaaccatcttttgttagtaaatatgcgttctattattttaatcattgatgccttacaaaagaaaacatcttttctaataccctgaatatgtgctgttcttagaatcatctatggattcttttaaaggttgtttgtgaaattagttttccctttttagaatctcaggagtagtggggtaaagacatttcctgctgtcagtggataagacagagcttgttaactgttttggcagtagttaaaatcaaattgtacacttctcagcctgggttcatgcttcatcattaatacacctcacagtgcctaaggaacatttacttactggtcagaaggtattttggaagagtttcatattaaggaggaacaaataataattttaagttcttaaaaattacctaaaacaccccaaatataaaaagaagccttcacacctattctgtctttaggatgtcttaaattattagcagtactccttttttaaaaacactgtaaaagtaaccacaaatatgtgaggacttactattttaaatggaatggaatgagctccatagattagttttgaatataaagtatataaaagtgcatcagtggtttatataggctttaaaaacatgttatcttacagtcctttaaagcagccatagagtttgtatcatttttcaagccaatttcagtcagggatttgaattgtttgattatggatgataaatgtgtcatatcttattaatatgtctcatgtctcgttccttcttaatatgatttagctggaattcattttcttttcgtttcatgtttaatttcataaaacgtttaacaattggcatatatacttggcattcctgtccaccaaggattgtaatccaagcctgggaaaatcttaaatttctttttacttaaatctggaaatttgtctccattctgccacctttttttttttttttttttatagtggaggggaggaaaggggggtgataccttgcagtaagtaagtcgaaatagcatgcctgaaaatttgaaacagaccattctaacacccaaggcttgtttataaaatacttgagaattacattaatgtggaatcaacagatgcagaagaatataacataacttttaaaagctttcataaataccagcagcaattgtaagcaaatctacaaaggttcttgaacctttctattatatacaaaactgaaaagtcattaaggagttcaactaatcaggaattaaatggtcatttatttcatgcagtatgatttaaggtatttcttgagattctggtcaaatgtcataatcagcaaacgggattaaaaaaaaaactccaaaatcactaaataattatctaaataatggtattggagaacttgtttcctgctatttggaagagattgttgcttcattgctagtttgtatttctaacttctacagttatagactccactgtgctttgtgtctgaatttctcagtatagacattttgtttactgtatgcttgcatatttattttcaactttgcctgtctttaaaattgcttgaggaaaaatggttgtaattaatttctgctacagaaaagccacctggtacgttttgtctcatcaggattgttttaaattctaaactataagtttgttcagaggggcttttgcaatgatagcagaaaactgtacaaatgtacagttagttatagaggttcttgttgaaatgaacttaccatctgatgatatgtatgtacagctgtgtacttgagtcttttttagtttacttagaaagactagcagtttgacctgttaaacaggactagttcaagtcaagaaactaaggttgttgtatacacctggaggcatctgttattcagcttatcctttgagtgggtatttggcacaatgaggataaacttatgtgacccacttgaatggctgatctaataatgttgacattatgcattctgtacttagtgaaatgtcagatgaaaataactgatgaataatttttttgtattaaagggatgggaaaagaacacatgaatttgttaataaagcactatgatctgcaaacgatggaatgtttcataaagatctaaagaaataaaggaaactttaaaacagggtgatcttaccatttttagttactttgcagttcagaaagtgctgtagccagtttaaaattttttttatagtaatgtacaaacatatctttggatatgtattttgatgctgacacaaccatgaaatacaaatatattttaagcaactctaataataaagattaagagtgtagatttctaggttttaccccaacttgccaaatctctgcaaggtggggcccaggactgcattttaacaacctctctgggtaattcttgagtacaacaagagtactttcaaacaaagtttgaaaactgatggattataaagcagggagcacttctgtctgttccaagtagctgtggaaccaactgagacatctcactggaaagaaatgactgactaaaaggggtggggaggagtgtagaaaattgatatttactgggcatctgcttacctgccaggtactggccatacttctcatttaatcagcatgagggccttatgaaggaagtatcattactctcttacaaatacagaacaggctaactttcaatgttagttgaattttccatatcacttttgaattagtgtaggtcacaacttctccagtttatgtccaggaacagaaatggggctactcagtaactaggcctttattctagtgttgacattcagtgcagcctgtatgcttgattgaccaggctgtctgacttgcagcttaccggaagtctttcacgtgaccatatttactttggtgaccacattttgctacagcaatgaatttagtgtgattttacacaaattgaagaaaatctaattttgttaaagagccttttttcacagaggaaaccgaatttgactctagtgttttatgaaagggtatctccccctgctatgttactgattttgaatttttaaaattctgtttcataggaagatctgagttagaatgtatgaatggaaaaaaaaggcaaagcagaacaatttcagaggttcaagagccaaaagcaatggaatggaccctaagggaaaataaagtcagtatactgcataattgattaagaatgtaatcttttcaagttagagtaagctacaattgtatttctataactgtaactacttctggttctctgtggctagatctgagcacttaaattttgctgcgtattgactagtctccttttaaattaatggccacaaagtacacatggtcagactttctaatatgcccttttattgtatgttcgctttcaccctcctcaaaatgactcaccgccacccccgcccccgagacatggtcttgctgtcgcccaggctgcagcacagtcgtatgaacatagctcactgcagccttgatcttctgggcccaagccatcctccccgttcaccctcccaagtagctaggactagaggtgtgtgccaccacaccaggctgatttaaaaaaaatttttaaacatttttatagagacaggatctcactatgttgctcaggctggtctcaaactcctggcctcaagtgattctcctgcttggcttcccaaagtgttgggatttcaggcgtgagccacagtgcctggcccagaatcactctatagtgtgagccaattatttcctttttgctaaacccattagtcacttctctgtgtcttagtcgaccccctcagtggcttcattattattggccatgtccttgtttcttcctgggaccaacttcttgctttgaccagtctttttccaggcttggccaaccaccctactccaaatctgcactttttttcccccaggcagtctaatctagagccatggctttaaatatcatagatatgcagatgatccccaaatatgtattttcagttctgactgaaactcaactccagacttagccatttgcctgtttgacatccctgctaggatgtctagtaggcatctcaaaattgacatctaactaccaaggtaaccatatcacatataatgtcttcccaactgagacacttcagagtgaaagagcaagagcgcccctgatactttgtcaggacaagaagcataaactgaaaactccaagcgtttcctatcacacttcaaatgagattctgctccttagatggacctgtgctgcctctttcctcttgtgccactctcccaatcactcaaccctgctccaactgtactggctgctattcttcttgaacaaaccttcctgcatgaccttgggtaagtgacttaccctgagtctcctcatccatagaagagtgaacaatggtactttagaatcgtaaagcacttatatacagagctccctataggaagtgaacagatttggatagtaagggttacttgcatttgctgaaggagtgaagagtgaggatactgcctgcattttccataattttttcattatacttaagccatgtacaaatagtgcacagatgttgtcagtcaattgtttggctgtgcatttgttacaaagttcagacttcacagctgaaagtgagtcagttctttatctgggtatgtttatcttggaacaaggttcagaaatggaaacttgaaacaccacccctaaaattagtactaaccatcacccactttcccttacaggcagacctggatcttcagaaagttttctaaaaagctccatttatttcaaatgtatataaattagataattttgaattagaacactttatagagaggttttcataaatgtccccgaatttgttgttagtacttattccttttggcctgtcaggtaggggtgacttctcttatgccaattcataagtaatccttccagttcacaaggtttaaacagaagtcagagcccagttaataaacccagactctgccatttggcagctgagtggcctctcagcttcagtttcctcatgtgtaaaatgaggaaagtaatgaatgcacatggtgttttataagagttataataatggtcaattctaagcaaactgaccacacaagtaggctccaactcttctttttggatgagtaatacttgattctcaaagacagtaatttattccaaacacaagatgaaattttctccaaaaaaaaaaaaaaaaggtatagaagtttgctaatagttcacataacactaagctacagaattcagaccacagtagagtgatgtttcatggctagtagtgagaaagactggatttgcttcctaacatgaaatgtggtgtatgaatataaatgtatccataccttgaattaaggaagcacttgtccatttcttagaagtgattcacttataaagtatcacactgatatgccatttaatagtatatgagtttttgaaataatggttcaaggtaaaagttaccaaccttattaaaataaatatgatttatattttataatatggcaygagtcagaatttatctatttagagataacttaaatacaacacagaagctaagcaggttcttaaaattactggtgtctacaaactgcctgaatttttgtctttgctagttagtttcaccctgcactgctagaaagaagcaacaacagtcagtatgtcattcttcaacatttaatggtgccacagggttaaataatggccttacttttttggcctgaattttgccaaaattagcttcaaactctttttttgatccatttagatttgctagatgtccatcctttattctgtagcctgaggaattcagtttccttatcctgtactgtactatctgtggtgttaattcaagaaccattggcgtctctcttatctgagctatggaaattccttctctcaataatccttgcattctctcttctaaaactggaacagaataatataaaagggcaggacatttcaaaactaattgcttcaggtcatgatctgtgcatttaaaagcatttttagagaaggaaatactattctgtatacttcttgggcaaagttgaaaaagaaatcctttgagtttggatagaagctggagaatttcaaagctggtgaaaccttgctcctggagaaattctagtgtttcctttatagctgtgggagaatttaacaaaataaatgggttttggcttaacaattttagtagccaaactttcatgttggcctcagagccacctayatctagataactctcttggagaattcttaccatttgcttattcttctcaacaggattatgaaaaacattaggtgcagctgtcaaaagtctgctaatgaccacattttttagtcccaactcttgaaagaactgaacattcagcttctggttctcttggtctttaatagtaaagaaagattctggaaactgctctattaacttgattaactcttcctcatttttgcagaccaactgccagagttttctctgggtgttaacagcggttggactacagacaattgcttccgggcagcgttccaaaatactggctacagcagtctcatcggcacctagttcttgtaaaatattcscaatttcttcaacataggtttcatcytctaaaagtacccatccttttaatctacgaattttcctaatgtcaactgaacatttatagagcttttccactgttcttgtattttctttgctcgactgtttatcagttgtataggtgaagcatrctaagaaaggtctgtattttggaggtgatcgcatctttctgaaagaacacascctgcaggactgggatctcagcagcagcttccacaacatggctgcaatctactagctagtttccaccgtcctgggacttaaatggactcattctatctgaaaaaaagaaaataaaggtttttagtataagggtgttgactttcagaacacatacacttacaaatttgagctgttgaagtctggaaataaagtggatttaaattagacaagaaaactgctcatgtggaatatttttaaaaatcttcctaaataaggattgcttgaacccagaagcccgaggttgcagtgagctgagattgtagcaytgcactccagacggggcaacaagagtgaaactcttaaaaaaaaaaaacctcctaaataattaattgaattgtaatacacttctccacaacttcgatatcttatactttgtaaatacactgttgagttacttccattttacagaagagcagcaagaccaaagagttcaaaggttcacagacctcaaatgttrttttcatacaaattcccttttccacaactgtttatcttttcttttaggaggcctgtattatgcacacacacacaaacatggttttttgaaatgttttacattattaagttgatgtttacctgaagcagatacttaaagggggaagaggggaagggtcatctctaattttatacgttaaatattttgctgaataactatcacccaaaatgggccaattattttattttaaatgagttaataaatggatttttttgtttttagaattatgtgagcaaaactcccttttataaatccagaattagaataagttgtaattccagcactttgggaggctaaggtgggcggatcacctgaggtcaggagttcgagaccagctttgccaacatggtgaaaccccatctctactaaacatacaaaaattagctgggtgtggtggcacatgcctgtaatccctagctgggtaaaatgaaaaaatgccacatgactgttcccgtggtgccatgggaaatcaggtcagctgtggaatggtgactgtactttcagaacagtgtaatcagctatccacttgacatgtgtaggtatcttgagatggctatactgtgtctgacacattaacagtctttgcctctataggggcagcaaaacacctccatcttcttagggtcgtggcaggacccgagaattagacataagatacattaacaggagaaaaacataaacttttttttttaactttatttattttgagacagagtctctctctgttgccaggctggaatgcagtggcgcgatcttggctcactgcaacctccacctcccaagttcaagtgattctcctgcctcagcctcccgagtagctgggactacaggtgtgtgccaccatgctcagctaatttttatatttttagtagagacgaggtttcaccatgttggccaggatggtctcgatctcttgacctcgtgatctgcccgtctcggcctcccaaagtgctgggattgtaggtgtgggcccccacccctggccataaactttacttaatacaagttcacatggcatgggagccctcataaggaatcaaagacccaaagaagcagttagagtcagttatttatgtactgagttggacaaaaaataggaagctgcgaagaagcaaccgaattacatggggaggtctaaaagataagttattttaaaaaggactgtgcagaaatcttttggtatcaatttctcatccttgaggttaaggatgttattccttttggtatagggagggtgtctttcacatgggaattttatctgcttttaagaaacagaaagaaagatcttacacctgctatttttcaggtgcctttaattcaaaatggtcaatatgtcaaaagtggtataatgaactccttcaccactatttcttttgtctctggtaatgaaaatacatctggttttagtacctaagagtgttgtaagtgtctcagccttgccacaaaagtgtgtagtacggctcaatttagcctgttggcagccttccctcactctttacaggtctgaaagaaaagaagaaagcagccatttccatccctgactttaatttaaacgcccttgccaggtatgctggggactcttcactttcagccctgtcttaactaatccaaataaatgattattctgttaggaaagttaggtaacaccctttccattttggtttcccattttgatttagctcactgtgagcgcctatggagactaaaataattgtaggcatagcttgttttactcttagtggttcaactagaattttcttcagataattcctaatactgttaagccaagatgaaaatattattttaaaaactttctaagaaggccatcaacttgaacaggaaggaggcggcgcagcatgatgaagcacaggcagatctgggctgggatcccgctccccactccctgttgagcgaccccacaagctcaggctgcacctctgtaccacacgtgggggaggagcgtgggctgctgccaaccacccacacccaatcctggctctagcttatggggcacccttgggtaagttagcctcagagaaaacaagacagcagtgattagaacagcgcctcacactaactattcaatgagtattaccagcagcaatctgtgagatggaaagaacagaatctaagccttacaggaaaactgtaagggttaaaatgcatgtcaaatactttgcacaatgcctggtacagagtaaaatttctggagctagaagtcttgtagtagtatgactttaaattgtattttagacagaaatagattatttacaaagagaactgaaaaccaaaaagtttatgtatgtatgtatgtatgtatttaagagacaggttctcactctgtcacccaggctggacggagtacagtggtgtgatctcggctcactgcaacttctgcttcctgggctcaagtgattctccagcctcagcctcctgagtagctgggactacagccatgagccaccacacctggctaatttttgtactttttgtagagacagggttttgccatgttgcccaggctggtctggaactcctgagctcaagcagtccacccgcctcrgcctcccaaaatgttgggattacaggtgtgagccaccacgcctggcctaaaaaatggattttaaatgcttctgtttcccaaaataactgcttataaaagcaatgcacattcaatgtggaaaaattgccaacttctggaaagtataaggaaatggaaaaagtctttcacaatccccaccactgaagacaactgttcatattttggcayacatgatgatgtgtgacctgaacacatcacagttcagcttggagtaagcaggaaatgcagacagctgctgttcccttagcctcactgtgcaggagcctctgtcagtggatgtgccttgccatggtcgatgtccttctaatgtttaatgatccgtcattctgtataatgtaacccccaaccaagccaactgcagcatctagtgcttagcctggggttccaaaccccaggaactcctggctgtgctggacttgctgaaagatagtgtattactggtctcctgtgtgttaccttccctacacatggtactgaggttctgaattcagcctataaagtgaaaattacaaagactcagaatttttcttgaaaatctcttatgcagacaccacacagatgaagtagttggttatgaactgtgatgtgttcagatgagtcgtctttactagttaatctgccttgcttagtctctgatgagcaaacacaactgactatggaagtgaaaagtatgaatgttgtgactcctatgtaatgaacacataatacatatatttgtatctaatttatctttctgcttctattttattcacagtaagtatctaactgtggtattaaaaatgctctgtaaacatttgagtgcttggtatatgggatggatatactgttattttgtaattcattccttatattgagcatttaggctatttgtaatttttgctatatgctgaataaatgtccacatctcatatgcttttcctttaggatgaattcctagaaatagatttcctgactgaagaggagatacgtgaacactgggaaagcaaagctgctaaatttcctgtcaggaaaaactatctcagttgacattctcacaggcagtatgagtgattctctcatcagtttttattttgatatgtaaaaaatgatacaacactaatttaacttctttttattatttataagggtgatgttttcataattaaactatttcgttcatctttatttccttttgtgaatcaaccattcctgacttgtaaaactgcaatcgttctgctttttaaaaattgacttgtataaactctatgaattaagaaatataatctcatttttgaaaatattttcttcagctcattttcagttgttgatggtatattttagcataccaaagtagccccttttttaattgtagtaagatataaataacaaaaaatttaccatttaaaccattttcaagtgtaccattcagtggcttaaagtatagtcacaatgttgtaccaccatgaccactatcccaaacaccaactctgtctctgtgcccattaaacaataactctccataccctcttccctccagacaccagttacctctattttactttctgtctctatgaatttgcctattctaggtactttttatatgtggggtcatataatatttgtctttcgtgtctggcttatttcatttagcataatgttatcaaagttcatattacagtatctgttagaacaaagcagttaatttcacgtggtcaaaggaaggtcagggaagttttccttratgatccttactgcttttaagtaccagatgatcagtaaaaattcatccattatttcctcccatatttttgtttgaactttaaaacttagctccttaagttcatttgaaatttctgggtgtgagctgagaatctaaatagattttatcaatagtttacttctctccaagtaccattttctgaacaatcctttccttccccatgacttatgatgcctcctttatcatatgttaaatgtagcttttgtctctaatttgcctccatcctcatccccctactttgcaattccccaaaggggccaagaggctcatttctggtctttgctgcatacttggctccccctgccagaccatcctcaaaccagctctggttgactcactcttccacacttcccaccaactatctcaaatcttctcaactcagacctctggcctcccacctacctccatacccaccttcactcacaaccagtgcccttgcctcctatctgtacaaagaaaggagagcagctcctctcagcagacataaacctatcactagctccccttcacagctttcattatccagtcacagctttcattatccagggtcattcctgctcctgtgctgagctcagcctctctggcctgagaactctcaagccctttctcaagtgtttgctccttcaggtgtatcctcctctgatgctccagccatcactccactgctcttcctgtccttgcccaaaccctctctctctccactgctcttcttttccctgcccaaaccctatctttctcttcacctcagctaattcttgcagatccttctttctctccatttcctcttctacttatatagcttgcgataaagataactttcatgtggttacagccaatgagtagttttcattcttatctcttttttttgtagagaaggggtttcaccacatttccaggctgctcttgaactcctgagctcaagcgatctgcccaccttggcatcccaaagtgtcgattacaggcgtgatgtggtttggctgtgtccccacccaaatctcatcttgaattgtagctcccataattcccttgtgttgtgggaggaacccagtgggagataattaaatcataggggtggtttcccccatactgttctcatgacagtgaataagtctcatgagatctgatggttttataaggggaaacccctttcgcttggctctcactcttttcttgtctgccacgatgtgagatgtgcctttcaccttccgccatgattgtgaggtctccccaaccacgtggcactgtaagtccattaaacctcttgcttttgtaaattgcccagtcttggctatgtctttatcagcagcatgaaaaaggactaatacaagccatgagccaccacacccagccttccttatctcttttgacttctgcwgcttttagcagagttgaccactttctccttgaaatattctctcatttgacttcctggacactcgactttttttgattcttctccctttctatacttctcgccaccctctatctgtctcccntacaagctcaccttcaaggcttggttctagacctctcttcttcttaccttacagtctctccccacagatcttgtcctcatccagatattcagttcatccacttgggattctttccaacttcttctcaaaatgtgatcttgtcagttccctgcaataaacttgccaatggcattttaggataaagacaaagtaaaataaaacatagaaatgccttaccatggcctacaaggcctctttgggctctgccaccaccctaattcccatttccctctcctgcaccagctgcatttgcttcctgtcagtccctggtgctctactggtttctaccatgtggtctttgaagactgtgggccagattccatgcccaaaatgctccaacttttaggcctaagtgtcactttctcaaggaaacttttctaaccttcacgaatacatgaagcctcctgtccccattacatgatttcatggcaccatggacttttacacttgcgcacaagtggtacaacagctgcagctgttcacgtgttgtttctgtctcaacactacatggacagactggtcaccacagtgttccaatgaactgcttccctatccttcacccagctgccttcactgcctctaggaggcattcctgggcaggtggccttctgtgtgctcttccacagcaccctgctccggacgctactgcagcacttattatgctcttacaagttcttcattcttccaaccagtaggaattttgttgctgtttgtttgaagttcaagctgtgtatcaggcatactaggcacagatctgctaaaacaacacttcttcacacctctgtttggatcacagatcaactcagaacctgagagtcacagactctctttccagaagaaaagacccacgctcacaacatttcgcaaatgattttagcaggattcatggacaccctgcagcccggccatgaatgacctgcactagatttacaagcgttgggaaggcaggaactgaacggtgttctgctttattccctgcacccagcaaagaacttgttccacagagagacaaaattagtatttgtcaggtgaaactgagtgaacaagtggatgcggtacattaatgcagtgggtaaaactgggttagcagagccagactgcctgattcctggacaacagttgtgttgtgacttgaagaagttacttcacctctctgagcctcagtttggcatcaggaaaatggtgatactatctcctgggtgactgcaaagatcaaacgagttaataccataaatcacttagaatatgcagaaaactcttcacatatactaaatcatyaaatcatcacaacaactcattttaaaatgaggaaacagacgcaggtaaaggaacttgcccaaggttactcagctaaaaaaaaaaacaaaaaacaaaaaaccggcagaatttggactcaaaccccacaggttggctccagagtcctgcctgctcttagccctgtgcccccacatatagcaatgcttttggtaaatgtttgttaaatcacaatgtgggctgttctaggatgcttgtttcttaagcattttkggggagtgaaattcacttctgtaatacacagttatggttartatggtcttctctacaccaccactggtttcaataaagttcttctttcgtaacacatatgccctgctgccagtttcaaattgaccaacgtttataagcaaggaaaaacgagggtccacggaagatctccaggaccgatcaaaaggccgcacattcactgtggggcctccgcttttccagagaaacccggcaggctgagctgagcgtctggcgaggcgtggggttttgcgggccctgaccgctgcggcgccgctggtgaggaacacgcccaggagcagaggaagggggcgactcacccgtcggcgtcagctccaagcaaggcacagggagtcccgggggccaggccccgtccttccctctctctccggccagcctccccacagtccgcagtccccgaggcctggagccgggatttcggtcctcggtctcaagaagctcccgacagttctcagcascgccaaccaggccatcagtcccttcgcccatggccaatcagggctcgggagatgaccgccaacccccgcccccccaagacacgcccccgcgtcccaacgcagccagtcagagcgcgggacacaactacgcgtccctccccgcaccacgagggcgagtcggagtgggaatcggctttccaggcagcccagcctgtgctggcgggggcatctggcattttcacaccctttccttcccagcattttaggaagcggagttccagtagctttgacgcttagaaaatataagaaaaaaagaagtaacagaaaccgctatatctttaagatagagccaatcactgttcccaaaataattcagttaggtaaagaaccaacttacaaaagaaatgtttaaaaaacccccaaagttctttgaaacacatctgaactcttccccgcccccaccctaccccagcagttagcgactgtctttaaaagccattctcctttctctccctccttgccaccttcacctaaatactccccttttctgataaactgccaagtggtttccattctaattattaccggtgatgcccaacctcatacactaaacacgttaatttctccttaaagccaggctgaatgtctctctcatttattttcacatttatccatccaaaaaacaagtatttatggcaggcctgctaagtgccaagcatattgaaacagcaatgagaaaatagagggggaataaaacacattccctgtccttatggagcttacattctagtggagggcagagatatcaacaactaataacgtgactaatcacacctagttaagtgttatcgaggacagggtgccctgagctgggcctggtgattctgtttgtgtggagttggagtcaggaaaactggttttcccagctggaggtgtctgctgtcaggtgttcgtagcacactgtgcacagttctgccgtcggtggcactggcatacagactgccctcgcaccctgtggagtgaattccttgaggctactgattattttttctgtcaacaatgctgggcacacagtaggaactcaggaaatgttaactaaatctttgagtctagtctcactatgcagtttaggctcaacaggctatattgagaggagctcacacgtgcatttaactccactgagtagcagcaagaatcctggctcctcaagatcacccacctctgatctctaggatattctagaatgatctgagcaactcatgtgtacagctggggggtgtttgtccagcaactcctgagttatccgaatataaaaactctattatgcatagatttattgcacactttttcctgaaataaaatgatttggggtccagactaaccaaagtgtgtcatttgcacttaggaaaaggaaattaggatacagaaaaggaagttaaggaatgtaaactcaggacttagaactgcaagctgccatcactggtcaggagggagggagcagaaatgtgcaccagggtgctggaagcttgtattagggctccacgtaattgtgcaaggaattacaatacatatgaccccgtgcattgtaatcaaaacttgaaactgacaaatcagctatgccaactgtattaaataaatgctactcaaagttttttccagcccaaatatttaaacagtgcatttctaggaccatataatcagaaaaaaaaccttgaatgaagaaaaggggaaaagaacttacaattatgcatattatgtacaagaaaattacaaacacatttgaattgtgagaagatcctgaaatttctagtatgtaagagatgcattaaaaatactgatagacttttatatctcaaatttacttatttattttaagcaaatatgaaaaacataaggactttgtacagttcattcaaaaccctggttctctcaatataattttcccaagttgtcagtacagtttttggcaataagaattgaagaagtatttgctgaatgagtaaaatgtcttaaatcccttaaccacaagtaggatttctagttaaggggagaacactgattcgaacatcatgtatctgctcaagtagagcatgatgactgatgccttttctttccctttcagtgattcattttgaccactatttacaccaaactgaaaaagctttccaaaaaactccctaataaaaaaaaaatcctcttacatttataaatagcataccagtgcttatgctgagatagtgttcttttactgtttatttattcacattaaaactgaatctttggccgtgcgcggtggctcatgcctgtaatcccagcactttgggaggccgaggccagcggatcatgaggtcaggagatcgcgaccattctggctaacggtgaaaccctgtctctactaaaaaatacaaaaaattagccgggcgtgatggcacgcgcctgtagtcccaactactcgggaggctgaggcaggagaatcgcttgaacccaggaggcagatgccgcagtgagccgagatcgtgccactgcactccagcctgggcgacagagtgagactctgtctcaaaataacaacaagaaaactgaaatctatgacctcttgtacggtgatggtaaatctcaggtctatgaatttctcaactctgcactgtacaaccaggtccaaagagtaggatgtgaggtacacttaccataaaaaacaattaaaatattacttcactttaacagtggtgaaaaaagaacgataaagcacaggattttttcttattctttttctcggtaatggatttcccacctgccgccccatccccgagacaaggtctcaccctgtcatccaggttggagtgcagtggtgcaatcatagctcactgcagcctcaaatcccctagatcaagccatcctcccacctcagcctcccaagtagctgggaccatagtgcacaccaccacacctggctaatatttttgttgtttccttttgtagagatggggtcccaagatgttgttcaggctaatcatttttttttttttgagacaagagtctcactctgtcgcccaggctggagtgcagtgatgtgatctcggctcactgcaaactctgcctcctgggttcatgcctcaagtgattctcctgcttcacttcagtttcccaaagtgctagaattataggcatgagccaccctgcctggtcttctttactttttttttatttttatattgattttttaaaaatagagatggggtcttgctaagtctccagggctggtctcaaactcctggctttaagtgatcctcccgcctcaaccccacaaagtgctgggattacaggcaatgagccaccacacccagctcagatgaggtcttgatctgtccacccaggctggagtacagtggcacaatcatagctcactgcagccttgacctcctgggcttcagtgatcctcccacctcagcctccaaaagtgctgggattataggcgtgagccaccacacctagcctcagtaatggaatttattgatcattgttaattcactatccaggatatttttaaaaatgcatatcatctaaaatgttatcgtttctgtatttttactcaacttttatcttcagttatctttaaattatcatactaaatatctatcatgattaatgatgggaaaatgaaaagccactggttataattcagaatggcaagaactaacctactagagaacattaaagggataataacaatagtaataaaaataatggcagctaaccagagctgtggcatacagctatgcagactgtgcactgtacacgacagggggtgacacagcatggcagccctgtggctaacactgagtaccctatcacatgccagctcataagtattttacatggaactgaactataaagcagatactaccctcatccctattttatagataagaagaaagaagacatagaaggttaaacttgctcaagacctcaaagctaatgaatggcagaaatgggcatttgactcgagagctcactctattgattgctagcccatactgcctgatttatggttacaaatgccattacttgaaaaaagtccctttagttttacctctttcttgcatataattttgaaaaacactgtttaactaaacatatggtagctgttccttcaaaatgatgatgtggtttatagaatctctttgtaatttgtaatcatatatcatacagcaatactctctcccttaccaaaaaagaaaaaaaaacacgtacacaagatttcatatttgcatatactttaataacaagttcattttagtaataaatgaacaaagaaacagagacagagaacttaacacatgatacttccacaagtttgggtctaaaaaggtttacatcaaagtttaaaacatatactgtctgtgttaacagaggctacaataccaatttggattacgcacattatctaaaacattattatcaaagagtgcaaagttagatcaaacaacatcaagaaaattctgtcctaaaattttaacgtcttttaagaaagtctaaaaacctccttttttcccactgacttcaaaactttgagttttatatcagaatatcaatttgtcattttaactttaccatacatgaaaaattatcaaaaatatatcgatgggtctatactaattgtgactgtttatatttacattaagcaaattctcttgccaagttctttatatacaaattaccaattgtactctgtgaaattcattaaaaagttaaaaaccacagaaatgtcattagaaacaacatatttcaatatgtaactgctttccatcaatgaagaatatttttaaataacttaattgaaaagtattgaactccccaccaatttcagctgcaacagtattcctcctgaatgttttctgtgatttaagggggaaaaaaaaactaggtaaagcttgattgcaaataattcaatgacaaaaatgtgatgagtgtttattgaccttatcttcaagatacttatagtctaattaggttgacataaaaaaactaagcaataaaaaatgtaaacagtgttagaaactgaagaaacagaaaatttttaaaaactggcaaatccaacgtataaatatttttcatattaatttaaatcacaaaatgacatcccaaatccaattaaattgaatgcaggcaaggctttctgatacttctaataagggccagcattttaaaaaattttgaactattcccaaattggaaataatttagattttagaagcatcataacagataaaagaaatttatcaacatttaagaggcaaagatttaggggaaagttcataaaaagattatattaatgtcactaaaataaacaggccactttaattgttttagactcatagttacatagtaaggaaataaaaaagttgtctttttctaagaaaaaacttgaccacaaaatcataaacatctctaatttaaagagcattggttcagatgaatataaaactggtgcaacaatttctccagtacagatgcatgtctcttgaccaaaaattaactgagtttgtaaaaattgcttaaaaattaatgcctcaagattttctggtttgaaaatagagatttgctccatttttgaaattatcttaatttatgttaattatatactcttctaaagcaagaaatacagctctaaaatatttacctaattagtgctctgtctctggactttaggaccaatactctgtgtgtcctcttcctgactaggacgtttcccaccactgagaccagtgcccatggagcttcttcctgcacatttaaaaaatgtatgtttaagataggaaaaggaaaaagaacagtatgctccaatgcttcattcttaccttgcttcaacaggtgagtttgctgactgtcgccatgagcatagtgtaaaataccactcccttgagagcaacctgttagtatttaaaacacagtaaaattacttaaaatcaaatccaagatgtatgtattattaagtctacaaatccaacttttagcgcttgtacttaaggtcatttatatgctttta

SEQ ID NO: 96275 - DNA, 13316 bp, Homo sapiens
ttttatgcattgtttgaatttttatttatttgtttttatttattttggggcggagtctcactctgcctcacccaggctggagtacagtggcgtgatctcggctcactgagcctctgcctcctgggttcaagcgattttcctgtctcagcctcccgagtagctgcgactacaggtgtgtgccaccacgcctgggcaattttgtatttttagtagagacagggtttcaccatgttggctaggcttgtcttgaacccctgacctcaggtgatctgcccaccttggcctcccaaagtgctaggattacatgcgtgggccaccgcacccagcctagtttgaatttttagaaagactgttttccttcaccaagaattcttttttgaaaaaatgaaccactgaggacatgttgacatgttactcacatgttgttgacatgttgcccacagtgctccctatgccaggcaggtctgttttttttcttttttctttttttgagacagggtcttgtctgttgcccaggctggagtgcagtagcatgaacatggctcactacagcctcaacctcctcctcctgggctcaactgatcctctggcttcagtctcccaaatagctggaaccacaggtgcacactcccatgcctggctaattttgttgttgttgttgtttgttgttgttgttgttgttgttttgagatggagtttttctcttatccccaggctggaatgcaatggtacaatctcggctcactgcaacctctgcctcctgagttcaagtgattctcctgcctcagcctcccaagtagctggcattacaggtgcccgccaccatatccagctaattttttgtatttttggtagagatgggatttcaccatgttggtcaggcttgttttgaattcctgacctcaggtgctccacctgcctcagcctcccaaagtgctaggattacaggcgtgagccaccgcaccctggtctgcccggctaatttttaaaattttggtagaaacggggtcttaccatgttgaccagactggtcttaaactcctgggctcagacaatcttcctgcctcagtctcccagagtgctgggacttacagatgtgagccaccatgcccagccaaggcctgtgtttttgtgccacatgcccccacctgctctccattactggccatgacctattgggtcagggataggcacttgacctggagacgatcaaatgattggtcagaagtccacatggtagcctggcataagaggccctgtttgatagtggtgatgggtgcacaatattgtgaatgtactacatgccattgaaatgttcattttaaaactgttacaggctgggcatggtggtgcatacctgtaatcccagcactttgggatgccacggtggaaggattgcttgaggtcaggaatttgagaccagcctaggcaacagagtgagacccccatctctacaaaaataatactactactaataactttaaaaataaaaaatttacaatggcaaatttgaagttatgtgtattttaccatagtttttaaaaattaaaagtacaagaaaaaattgccaaaaaaatacaggtacccagtaaatgtttgtagcagatataagccacaaattacaagacaaaaatattaagattctaatggccagtctgggcaatagagtgagacctggtctctacaaaaaaagttttttaaaaaattagccctgtgtggtggcacgtgcctgtggtcccagctacttgggaggctgaggtgggagaatcacttgagcctgaaaggtgggggctccagtgaaccgtgatcatgccacccactgcactccagcctgggcaacagaggcagaccctgcctcaaaaaaaaaaaaaaaaaaaagaagaagaagtggaagaggaagaacaagaggaggagaaggaggaaaagaagaggaagaagaagaggaagaaggataagaagaggaagaggaagaggagaaggaagaaaagaagaaggagaagaaaaagaagaaggagaaggaggaggagaaggagaagaagaagaggaagaagaagaagagagaagagaaggaagaaggaggaagatgaaagaagataatcccaatagattcacaggcaaattgtaggaacaaacaattcacaagaggacatgtaaattataattttgaaatctttacatataattttatgccaactaaattaacaaacatggaaaagaaagaaggaagaaaggacagaggaagggaggaaagaggaaaggagggaaggaagaagtaatgaaaaagaggagaagttggcaggaatggagagagggaaaaaagaaaggaaggagggaagggaagaaaggaagggatgagggaagagtagaggtgggaatgaagcaagaggaggaaggaaagaatggagggaaagaaggagggggaaggaagaaagccagtagtcatggtgaaatcgagattaaacttactccatttcttctgcctgcatttcctcatctgggaataaaaataattctacctgccggtgggagaaattgctattgcctacccaacatcagggtttcccttgtaccttgctggtggcagtggccactgagatgcaggtgaaggttgttggggcttcagggaaaaccttcttctgccccttgtctcttcctcacaccccctcgctagactagaggcagggtggctggccctctggctggcatctcaggtcatgatgcaaattgaaagacggaaactttggaccgaatctggccagcataagacaggaacagcctggaaaccgaggaccaagagatctcccgcagcctcggactgctcacctccagacaccacgtatgaaggaaagaaatacacctcttagatccaagccactgtgatttctggtctctgttacttgcagttttgtgcaattctcaactgataaactttctcttaagtgtgtgatgacaatgaaattagatgatgtttataaaatatgtcaatgtgccattgcatcaaaagtcctcatggtagtactgtctctcacctctgagcaaagccatcgaacaaatttttacaattcaccataatcacaaagcatttactcaggaaatgttttaacgtatgtacaggctgggggcggtggctcacacctgtaatcccagcactttgggaggcccaggagggtggatcacctgaggtcaggagtttgggaccagcctggggaacacggtgaaacctcatctctactaaaaatacaaaaaattagctggatatggtagcacatgcctgtagtcccaactactcgggaggctgaggcaggagaattgcttgaacccaggaggcggaggttgcagtgagctgagatcatgccactgcactccagcctaggtgacagagtgaaactccgtctccaaaaaattagctgggtgtggtagcgggtgtagtcccagctacttgggaggctgaggcaggagaatctcttgaacctgggaggcggaggttacagtgagctgagattgtgccattgcactccatcctgggcgacaacagcgaaactccatctcaaaaaataaaaaaataataaaaacaaaaataaagtatctaaagagttaccaaatacatatatgtctccaaaaggcatttattgctaatattctgctaatattagaacacactgggatcaaataaaaaattacccaaagaggggaggaaaaagtcacttgttttctaaactaggttgattttatttcatgggtaaacttgagtggtgttgggaaattgtgacctcagtgtgctactttcctactggaaaataagacctcaaaacctctccaaactagtcacttcatcttacttatgagaggcacgacaaaatggatacttttcaccaaaattctcctgtgttctacattgcaaaatcaatatattttagaggaagaagaagctttcaaacttcagttcttccaaaggcatagttggtgcagggggtggggtgagggtggaaaaaaagggctggtggtgaggtgtggctccgaggagcaagtcagccctcgccccgccaccggaacagcgttcagtgcccgtcacttgtaacactggtcttcccaatgcatagcccttgaagataatcagggccgggtgggtccccggtgtcaggggaatttgccaagagggggaagaaacaaacgtacaggtttacctgcaacagagaaagtcctcattcccaccctattaggatacagagttttcaacaacaggattcctttggtggagcaagttgcagggcacagggctgttggcaggagattatcaggattgtagcgttcacatctgtaccttggaaaggggcttactctccaagtcattaaaaggacactcaaacacaaactcaaagttagttagcatatatatgaaatgtattttcttggtagtctctagagtttcagccaaaagctacatgaagaaagaagagaacaacatgtttgagagatggagatgaggaacattattgagagatagagcttgcaatcttaactcagcaatggaatgctggaaaggctgaattgacatactctgttctttggttccgtatgtcttttttttttttttttttttttgagacagagtcttactctgttgcccaggctggagtgccgtggtgtgatcttggctcactgcaacctctgcctcccgggttcaagcgattcttctgcctcagcctcctgagtacctgggattacaggcacccaccaccatgcatggctaatttttttgtatttttagtagagacggggtttcaccatcttggtcaggctggtcttgaactcctgaccttgtgatccacccacctcagcctcccaaagtgctgggattacaggcgtgagccaccgcacccggctggtttcctgtgtcattctaaatcctttctaacccagtaagaggatggatggatggatggatggatggatggatggatggatggcagatggatgatcagttagaccaactcaggaaaatagggaataacatggaaaagaatgcttcgcgtccctcactataagttcctaaaaagctacaatgggaaagtaatccatgacctaccttcacaaaacctggtgagaaactgatagattggggattttccctgaactcagatggagttcaagcttcattaaaacaaattctaaaggactgattgacattttattctattgtattttgttatactgattgttttttaaccagaaataattgggccacagtagatcttttttaaactgagttttgtgtgtgatgtgtgatgtaatttgttttgcaatatccaaggaaattttcatgctccatttgccttcggccacaaactaacagtcaatgccccaccccaccctctacagcagcaggaaaaaataagtccagatcaatgttgcccacaaatttctcacctctgtatattccttggacagtcttccaatttcaggctcttttgctcccctcaccgtggccaagtcttagacggaaattggagcacagatggcttctcaggggtggccagacttgtgttcccaagacgcctggctccctggtcttatcctctcctttcaggtcgggtctcagatcaggattctttaagggccaacttcgcattctgggcaagtgaatgacacctagggcacaccctcttctcagcagcctgcacttgatctccttttaaaggggaaattacatttcttgttaagactgaaagaggctgccgaactttggaggaaattactatgttgttctcaggacagctggaagaatttctgaaagagaagacctaggcaaggggcagagggaagctttgcccttgcaaacatttgctcacagccattgcttagaattaaggagcaggttcatgcccatcctgtcagccatatcctgcagggtggcaggcatgctgtagcccctggtataggccatggtgcctgccaccctgaagctgcctgtgctgtacaaggagcagcctttgctatgccaggagtcactgagtggccaggccatgagcctgtcttgggtcaactctgtgggcctcaatgtccctgcttctgttcgttattcccatacagacatcaatgtgcctgacttccctgattactgttgcattgagatttttgatgggacaaagtcttcaaaagaggatggcgaggctaggaaagggttctcctatttggtaactgcaacaactgctgtgggtgtcacatatgctgccaagaatgtcatctcccagtttgtttccagcatcagtgcttctgctgatgagtcggccgtgtcgaaaattgcaatcaagttatttgatattccagaaggcaagaacatggctttcaaatggagaggcaaatccctgtttgtatgccacagaaccaagaaggaaattgaccaagaacctgcagttgaagagtcccagctgagggcccatagcatgatttaagggccaggcacagtggctcatgcctgtaattccagcactttggaaggccgaggtgggcagatcacttgaggtcaggagctcaagaccagcctggccaacatggcgaaaccccatctctactaaaaatacaaaattagccaggcgtggtggcatgtgcctgtaatcccagctactcgggaggctgaggcaggaaaatcacttgaacctgggaggcagaggttgcagtgagccgagattgcaccattgcactccagcctgggcaacacagtgagaatctgtctcaaaaaaaaaaaaaaaaaagaagaagaagaagaagtaaaggatgggccgggagtggtggctcacacctgtaatccaagcactttgggaggccaaggcgggtgaatcacttgaggtcaggagttcaagaccagcctggcaaacatggtgaaactccgtctctactaaaaatacaaaaattagtcaggcgtggtggtccatgcctgtaatcccagctactcgggagaatgaggcaggagaagtgcttgaacctgggaggcggaggttgcagtgagccaagatcgcgccactgcacactccagcctgggagagagagtgagactctgtctgaaaaaaaaaaaaaaagataaaaaaggagtaaagaatgagtgcaatgcctatcagggtaacccattcgagtttctttactaggcgtttgcattcatcctgttgtacacctattgcaaatgaagattttggtggtgattactgcccttgctgggggtcacacagatgcatctgggaggatctggaaggggcctgcacctcttgagcttggagctccctcatatgggttcaccagtgaggacacagtcattgttggttagagactgggactcaagttgtaggctcctttcagtctttgcgtcactgtagaagagttatttgagagcaagccttctgaacttcaagttgcttgatttgaaatatttaagaagtgataatgtatttgcaaacattactgtgaagtaaattgaatttaatgttgaatacgttcaagcattcacttaataaaacaactgttaaacactgttacactgtcatacacttgaaaggtgcaatgtcttttaggtagttctaattttttactttaaaaaaattttttgtttttatttttttgagatggtgtctcgctctgtctcccaggctgaagtgcagtggcgtgatctcggcttactgcaacctccgcctcccgggttcaagtgattctcctgcctcagcctcctgagtagctgggattacaggcatacaccaccatgcctggctaattttcatacgttcagtagatgaggagtttcaccagttggccaggctggtcccaaaatcctggcctcaagcaattcacccacctcgacctcccaaagtgctgggattacaggcgtgagccaccatgcctggcctaattctaatttaaaactacacagtggtatataaaaattaaaaaaaaaatagacttaaggatcaacaggctggtgatccatttaagcacagggttctttttagatagttgttgagaaggacatttgtgagctgagaacctgaaaatcgtccagtggccatggcagcatgggattggtagatttcttatccctccatttgcatgctgtcttagtctattctcccagttcaaccatcactgacagtatctcctccacacccagggctttacaaccaccttttctacagtccagagaggtggagatcattatttccattcggcaatgaggggaacaactccatttctttcctgagggcactcatgataaagcatcaaagttgggactcaaacatgtacaccttctgaccttagctatcattcttttgctcaatctcattaagtgaatattgagcatctaatatgtgccttccactgtgctggaaaagtcatgatactgacatggaaggtgacacagaagcttccttttaggtttgagcaatgccgcttccatgagcaccaatcagctttaccacacacagggcacgtaggcacttaaaaaacagggtctcatccaaagcatattttgaatttaatcagctcttttagaactttactaacaatgaaaatttagaactggccagatgcggtggctcacacctgtaatcccagcactttgggaggccaaggcgggcggatcacttgaggccaggatttcgagacaccagcctggccaacacagtgaaaccacgtctctactagaagtacaaaaattagccatgcatggtggcggttgcctgtaatcccagctactcaggaggctgaggctggagattgcttgaacctgggaggccggaggtcacagcgagctaagattgcaccactaaactccagcaagtccctgagacagagtgaggccctgtctcaaaaaaaaaaaaaaaagaagaagaaagaaaaagaaaatttaaaattaaataagatactattattttgtaaattttaaaagcactaaaaaaaaaaaaagataattatacttaattctatcagtatagttaccatgaagataataacctacatggataaagtccattcagacaaaacagtcagtggggccgggtgctcatgcctgtaaccccagcactttgagaggctgaggcgggaggatagcttgagcccaggaattcaagaccagcccgggcaacacagtgagacaccccctacccacggcaactctacaaaaaaactaaaaaatattagctgggcatggtggtacacacctgtagtcccagctcgtcaggaggctgaggtgggaggaacatttgagcttgggaggctgaggctgcagtgagctgtgatctcaccgctgcactccagcctgggcaagagtgagaccctacctctctmtatatatatgcaaacatatatatcttgtttatcacatatatcatatatgatatatatcttgtgtatcatatatatatcttatcggactcttaggagtttgttagtgcaggcacttaagaaatgactaatgactttggtgcccacagagccagggagtaacgggccagacctcttggtggttttcctcccagcacaccattttctgaacttgtcgaagcctccaaatctctttctccagttactccagcataacgtgcattgacagtaaacaaagtcctcgatgatgtcatgttgccacacttcatttcacaggatttagcaaccagagagccacaccgggggcggccctccctccaaacagagaacattatctcttcttcctcagtgaaaattcatgagaaagttcctaagcttgtaatgcttagccctagacaacggaaaaaggtgtttgaggaaggaggaaatgaggaaatacaatatgcatgatccttctctgggattagtttgtgtagctctattgttcagctttggcctataattgtcagtagtaaatggtatggaataatttttttttttttccaagatggagtcttgctctgtcacccaggctagagtgaggtgacttgatctcggctcactgcaacctccacctcctgggttcaagcaattctcctgcatcagcctcccaagtagctaggattacaggcacctgccaccatgcccagataattttttatttttaatagagacggggtttcaacatattggtcaggctggtcttggattcccaacctcaggtattctacccgcctcagcctcccaaagtgctgggattacaggcgtgagtcactgtgcccagactggtatggaataattttgagtaaaaacatcttttttttttttgagatggagttttgctcttttgcccaggctggagtgaagtggtgtgatctcggctcactgcaacctcagccccccggggttcaagcgattctcctgcctcagcctcccgagtagctgggattacaggcacctgccaccaagcccagctaatttttgtatttttagtagagacagagtttcaccatgtttgccaggctggtctcaaactcctgaccttgggtgatccacccgcctcggcctcccaaaatgctaagattacaggcgtgagtcactgtgcctggccgaataaagacatcttaaggaaaaagtgaatgactcagatgtttattttctcaaatacaatatttaaaatattgcaagaagacatctgtttagcattctcccctcatttgtcaattactttattatttgagaattaataccccacatgaagacaatatcacttgccaaagtccttcctctgacgtggttaagtcgtatcaaatccacaggctgacgtccaaataatacacagtttcatgcttcaggtgagccaagaacaaccttcccattgagcgccttgcaggggctgatatcaaagacaagactgaacttccttcattggcatggtgaccaccgtgggaggtgcagccctcagcctactcctcggctgtgccatccaggatgtgtttaaaggagaatggagaaaacttgtaaccatccccgacatagaacttgttctggaactcaaccctgttgttgaggggaggccgtggggtaagaaatgggagattgaaacacatcagttagaggctggaaggtggagggaaggaggaagcagagcgttcgtaaaatcaagcacaaagtcagaagggttggccacggcgggcacccaggctgatggctgccatgagaatcctgaggatttttttttttttttttttttgagacagagtcttgctccatcacccaggctggagtgcagtgtcgtgatcttggctcactataacctccgcctctcaggttcaagagagattctcctgtctcagcctcctgagtagctgggactataggcatataccaccatgcctagctaatttatatgtgtgtgtgtgtgtgtgtgtgtgtgtgtgtgtgtgtgtgtgtataatatatcatatatattattatatataatattatatatacatcaatattaatatattaatatataatatattatatatattatataatatattatatatattatataatatattatattatatagaatatattatataatatatattatattatatagaatatatattatattatatattctatataataattatattataaatatatttatatttatttatatttatatttatatttataatatatatattataatatatattatattatatatatatttatatatatataaaaataaatatattatatatatatattttttgagacagagttttgctcttgtggtccaggctggagtgcaatagtgcgatctcagctcactgcaacctctgcctcccaggctcaagcaattctcctgcctcagccttccgagtagctgggattacagatgcccaccaccatgcccagctaatttttgtatttttagtaaacaccaggttttgctatgttggccaggctggtctcgaactcctgacctcaggtgatccacacacctcagcctcccaaagtgctgggattacaggtgtaagccactgcatccaggccatgaatctgaggattttttaagcccttctctcatctgtctcttaccaccttccccttcccctccccttcatttcctccaggcctctctgcttgtgggctcatggtcacagcataacaactcttccttcatggaaggagcttccccacccccatgacaagccaagacaccctcactgtgcagcactctctcatgtcattttccatttccagctaattctaaaatgtgggactcacatattatagaacgcaaagacccttgacctgtatttttgtaactcacataactgataccatgtcggatgatttatgttttattttatttatttatttatttatttatttatttatttatttatttatttattttgagacggagtctcgctctgttgcccaggctggagtgcagtggctccatctcagctcactgcaagctccacctcccgggttccagccattctcctgcctcagccccttgagtagctgggattacaggcatgcgccaccaccccagctaattttgtattttcagtagagacggggtttctccacgtcgatcaggtcacaaactcctgacctcagctgatccgcccgccttggcctcccaaagtgctgggattacaggcatgagccaccgtgcccagcctcatttatgttttattaatttacagagttcagttcctctcctcaatgacatggaggggaatgacgtcatcatggaggcaggggatgctgtggctctcctcactcagtacatgaagtgcaaaggcttctttatgaatagtggccatagagggaggaagaaaacatcagggcaagctgggtacagtctctgcagctgaagggcatgcactgcacactcagaattcttggttgaaatgtaacttggaagacaaccagaggcctaaacatgtttccatattcatcaacctaacgacggctgattgtcactggatacatctgtgcatgtccagggctcccggtgagcgtctccctcctggtggtaccctccttctctttccacttttgagattttcataccttgttggtataactcctctactcagcaacaagagccaaacatcccagattcactgggcgcagtggctcatgcctgtaatcccagcactttgggaggctgaggcagatgaatcacttgaggccaggagtttgagaccagcctggccaacataggggaaccccatctctactaaaaatacaaaaattagtcaggtgtgacggtgcatgcctgtaatcccagcacttcaggaggctgaggcgggtgaatcacttgaggccaagagttcgagaccagcctagcaaacatggggaaaccccgtctctgccaaaaa

SEQ ID NO: 96276 - DNA, 47938 bp, Homo sapiens
aggtctaacgtttaagtctttaatccatcttgaattgatttttgtataaggtgtaaggaagggatcaagtttcagctttctacatacggctagccagttttcccagcaccattaaatagggaatcctttccccattgcttgtttttctcaggtttgtcaaagatcagatagttgtagatatgcggcgttatttctgagggctctgttctgttccattgatctatatctctgttttggtaccagtaccatgctgttttggttactgtagccttgtagtatagtttgaagtcaggtagggtgatgcctccagctttgttcttttggcttaggattgacttggcgatgcgggctcttttttggttccatatgaactttaaagtagttttttccaattctgtgaagaaagtcattggtagcttgatggggatggcattgaatctgtaaattaccttgggcagtatggccattttcacgatattgattcttcctacccatgagcatggaatgttctcccatttgtttgtatcctcttttatttcgttgagcagtggtttgtagttctccttgaagaggtccttcacatcccttgtaagttggattcctaggtattttattctctttgaagcaattgtgaatgggagttcactcacgatttggctctctgtttgtctgttgttggtgtataagaatgcttgtgatttttgtacattgattttgtatcctgagactttgctgaagttgcttatcagcttaaggagattttgggctgagacaatggggttttctagatatacaatcatgtcgtctgcaaacagggacaatttgacttcctcttttcctaattgaataccctttatttccttctcctgcctaattgccctggccagaacttccaacaaatttacaagaaaaaaacaaacaaccccatcaaaaagcgggcaaaggacatcaacacacacttctcaaaagaagacatttatgcagccaaaaaacacatgaaaaaatgctcatcatcactggccatcagagaaatgcaaatcaaaaccactatgagataccatctcacaccagttagaatggccatcattaaaaagtcaggaaacaacaggtgctggagaggatgtggagaaataggaacacttttacactgttggtgggactgtaaactagttcaaccattgtggaagtcagtgtggcgattcctcagggatctagaactagaaataccatttgacccagccattccattactgggtatatacccaaatgactataaatcatgctgctataaagacacatgcacacgtatgtttattgcggcattattcacaatagcaaagacttggaaccaacccaaatgtccgacaatgatagactggattaagaaaatgtggcacatatacaccatggaatactatgcagccataaaaaatgatgagttcatgtcctttgtagggacatggatgaaattggaaatcatcattctcagtaaactatcgcaagaacaaaaaaccaaacaccgcatattctcactcacaggtgggaactgaacaatgagatcacatggacacaggaaggggaatatcacactctggggactgtggtggggtggggggaggggggagggatagcatcgggagacatacctaatgctagatgacgagttagtgggtgcagcgcaccagcatggcacatgtatacatatgtatctaacctgcacaatgtgcacatgtaccctaaaactgaaagtataataaaaaaaaaagagaatattttagttcatgattatttatttttgcaaaacatctatttaattgtttcaagtttgtgaggaacaaagttattggacaggaagttgtagcaaaaattttctatttctcaaaagtaactgctgtaggtaaaatgtctgatttaccaaaagtttgaactggttcgcaaaggcagtaagttcattcctagttcgggtctttacaaattattgtgagatttaataataataagaccctgcagttgtttctgtttagcaattgctcatctcaaacaggttctttgtggtttttccaaaaacagacagcatatttggcttcttctactatagatactttcctacgtctatttctacatcattcaacatggcaaggctaacagaaaatcaaggtcaaatgaggaaactcagcaaatggtttttatctggcttcacactgaccaccaactggtaaacactataagaaaaactgtgcaggatataaatgataggtaaaagtacattttttcactatgggcccaggctctcataatagaagcaggcctaagatttaaaacaaatgatgtgggaatcaattcaaagtgctgaagaatcacaaattgcttttctatttaactaaaaaatctccatgctttaaaaattttccgctggtagctttttctcctgaatttgcactcttaataattttatcctataatcccatctgatgatgttattttagggaaaaccaggttaacagaagaacatttatcagatgtgtagatcatagcaaattcctggcacttaataaacacaatactgatagactaaagggaggttaaaatgaggtggaacacgtaagttatctctaacaatgattaatttttgtatattttactgatgagaaaaactcctttaaccaaaagctgcttaatatttttattaactgcttcagttcccttcaagttcttaatacgttattaatataacacagcatgaataaaaaatatgataatccattttttaaaaaacaaattcaagaatgccaaacaggtgacttacgaagggagcagggaagcctaaaggggcctcatttctgtcttcctgggacaaaaggataagtaattgactgaaatgtaactaccaggacatagacgctcctaggatgtaaaagaaagttgtctgcctccccctccccctctccctctccccacggtctccctctccctctctatccacagtctccctctgatacccagcggaagctggactgtactgctgccatctcggctcactgcaacctccctgcctgattctcccgcctcagcctgccgagtgcctgcggttgcaggcgcgcaccgccacacctgactggttttcgtattttttttggtggagacggggtttcacgtgttggctgggctgatctccagctcctaaccgcgagtgatctgccagcctcggcctcccgaggtgccgggattgcagacggagtctcgttcactcagtgctcaatgttgcccaggctggagtgcagtggcatgatcacggctagctataacctccacctcccagccgcctcccttggcctcccaaagtgccaagattgcagcctctgcccggccgccaccccgtctgggaagtgaggagtgtttctgcctggccgcccatcgtctgggatgtgaggagcccctctgcccgcctgcccagtctgggaagtcaggagcacctctgcccggccgcgaccccgtctgggaggtgaggagcgtctctacccggccgccccgtctgagaagtgaggagcccctccgcccagcagccgccccgtctgagaagtgaggagcccctgcgcccggcagccaccctgtctgggaagtgaggagcgcctccgcccggccgcctccccgtccgggaggtcgggggcgcctctgcccggccgccccttctgggaagcgaggagcccctctgcccggccgccaccccgtctgggaggcgtacccaacagctcattgagaacaggccatgatgacaatggcggttttgtggaatagaaaagggggaaatgtggggaaaagatagagaaatcagattgttgccgtgtcttgagtagaaaaaagtagacataggagactccattttgttctgtactaggaaagattcttctgccttgggatgctgttgatctatgaccttgcccccaacccggtgctctctgaaacatgtgctgtgtccactcagggttaaatggattaagggcggtgcaagatgggctttgttaaacagatgcttgaaggcagcatgctccttaagagtcatcaccactccctaatctcaagtacccagggacacaaacactgcggaaggccacagggtcctctgcctaggaaaaccagagacctttgttcacttgtttatctgctgaccttccctccactattgtcctatgaccctgccaaatccccctctgcgagaaacacccaagaatgatcaataaaaaaaaaaaaaaaaaagaagaaaagaaaagggccccaaagtgacgtcagccccatctcaaattcaaaccccatagtaaacgaacaagatagaccttaactactgactaattctccaaagcaaaaagtcaggaaaataaaaaaatctcgttaagctgtaaaaaataaaaataaaaataaaaatacatatccaggtacatactctttctttctttgagacagaggctcgctctgtcacccgtgcagtggcagtctcggctcactgagatctcagccttccaggctcaagcaattcttcggcctccacctccgaagtagctgggactacaggcactcaccactatgcctggctaatttttcgtagagatggggtttcgccatgttgcctacgctggtctcaaactccttaccgcaagcaatctgtccacctcggcctcccaaactgctgagattacaggcgtgagggattgtaggcgtgagggattacaagcatgagccaccgcgccctgctatattacttatttcttaaacacctgcaattcattaaaatacaccatgtataaattataaatcataatattatcaagaactgttatttctaagtgctgaataaatgaatatttccactcattaaaaaaaaaaaaagttgtccgttcaaagccagtgtcaagtaccaaaaaaagaaaattatcttgcggcagataatgagaaataatgcaggagaggaaagaggaactttaaaggctgtacgtgtaggattttctttttctctctcggaggaaagaacagcaaaaagcgaagagtgggaaatgctggacttaaattcctttctttaggtttacgaacaaaaaaggaaagcgagaagaaaaacagaatcaaggacttatacagcaggaagttgccctgtaagcatttagtccagggacctgccattcttattaagagctaaaaccaaagaattagtgcacgaaagtagaaagaagacaagccgccattgtggaaggagcgcagcgggacagaggcgcgcagaagcctcaccagacaaccaggccccgtccccgtcccccgaactgtgcggaaagcgccaccgagtccaggcgtctcattttacagcggaagacacaaactctgagatccaaatgacctgctcacggtcacagcacgaagcccgtgggccctgtgtctacagtcaccaacttccaggcttgcgactaaagggagccaacgagcgcgtgagcgtttgagaccagctggctgagggacgccgaaaatcccgcgcggaggaaggcgggagagcgctaccgctgctaccaaggcggcggcgcgggcgctcggccgggacccttccctgcgtcgccaccagatggcgcgctcggcccgccgttcgcggctaagctagggcgggtggggagggagtagggaggaggacgtcggttgccttggaaatgcagggcgcagcagccgctgcagtggagccggtaggcctggccggcgggctgaaaggaagtgcgagctgtccgcccagggccgggtatccgcccctgcaggctgtggaggggatgtcaggagactggctggcctcttttcttggcccccgactccttccagtctgacactgaagactttataagcttccccccgaccaccctccacgggctccactctccacgggcctgggcttgcgccgcttcgagatcagcctgggggtcgcgccctcctggtcttgtccacgaagcgccgttcttgggccgttaggagctgctgggaagggctctgataggcccactcctcttctccacccaggagatgagaaggagggcaggcctttttaatctgatcagaatgttaacccatctctccgccttgcggtagaacccctggatacattatttgccctctcgaaaggcaggctctgaatttgattcaggtttgtaaccttcacggtgccctcacacagcccctagcacacagcagacgcagagcagactaagaatgccttccattcttatgaggctttatcacttgacagttttcccaaagcgtttggagcctcatagcccggacagcaactaggacagatggaggaggaaacaggtcagaggttcagagacttggcctaggttatacaactctgtgcaggagctgggactaagctcggtcttgcttctcttagtgcctctctcaccaaattctgagtctagtgaatgctttctgaggacctcacatactcttgcatccttctcaataccagcgcaatgctcttccgctgtaggtacttcatatgtgctaagtgtgttattgatgtcttttaccctcatatcccaattcatagattggtttcaacttcttgctctggatactacaacattcttctaaagaaaacacttggtttcttttatgaatttgtcacatttgtacagtgccatgttgttgcctcactcccttccttatcccataattttctgctgggcaagagagagagttgaggaagtgattaagagatgggaaaaagtgccctatctaagccaaaaaaaaaaaaaaaaaaaggaaaagaaagattcctgtgatgacagaggggaaaaataatgactgggtatttatcagtctatgtgataattgctcatggattgccttacagccacctccagaagatcctctttagactcactactgctatttgaaggtagaaagaagcctttttgttctctaccattattattgcatatttttcccttatcctcataataatattttcatagttatttttcttttctttgttgataattctaaaactgaaggacagtaagagtgggaaaaaaatgtagttctggttactagagaagttagtgtaatatactgcagttcaaactatttgatattagcaactctggatcagaagacggactaattttaaagctaagactccaatatctttgggtactgcagtagaaaaatgtgccatgactaaaggattggtgaagaaaatacatgctaatgtaatgtacatcatcagtcgtccaagtgaaacttgaaaatgtcactcatctagatatttttaaataccttgattttaatatatgattttaacatatttccaaaccgggcaaattttacattttaacactaacaattttggtccctatcatatatacataatcaatatgaaaagcggtctcaatttttaaaattaatgttttaggtggtactattaccactgaatggctttaaattaattcaggatttttaaaaacatttactggagaccatttctaattaagttaaacatgtgttctgtgcaatctcatttgcagtagccacaaaacgaataaactacctgggaaccccctgcccagtgccatacccccagtgcctgtccccagatcgaggcttgggccccttcagccatgtctatcacaagcaccaccagcatgtctgacaaactgccctacaaagtcactgacattggcctggacttctggggatgcaaagccctggatattgtggagaaccagatgccgggcctgacgtgcatgtgggagctgtactcaaccctccaagccctcgaagggcacgcgcatcaccagttgcctccataggacccatggagatggccatcctcattgagaccctcattaccctgggtgccaagctgcagtggtccagctgcaacatcacccaggaccatgaggcagctgccattgccaaggctggcattccagttgtaygcctggaagggcgaaacagaggaggagtacctgtggtgcaccaagcagacattatacttcaaagacggcctcctcaacgtgattctggatgtcgctkgggcccccaccaacctcatccacaccaagtacccacagctcttgtyggggatgtgaggcatcttcaaggagaccatgattggggtccacaagctacacaagatgatggccaatgggatcctgaaagtgcctgccatcaatgtcaacaactccgtcaccaagagcaagtttgacaacctctccggctgccaggagtccctcatagatagcatcaagtgggccacagacgtgatgattgccagcaaggtagcagtggtagcaggctgtggcgacatgggcaaaggctgtgcccaggccctgtggggtttcaggcccatgtcatcatcatcaagatcgaccccatcaacatactgcaggctgccatgaagggctatgaggtggccaccatagacgaggcctgtcaggaggacaacatctttgtcaccaccacaggctgtgttaacatcatccttggctggcactttaagcagatgaaggatgatgccatcatttgtaacactggacactttgacatggagattgatgtcaagtggctcaacaagaatactgtggagagagtcaacatcaagccccaggtggactggtatcagctgaagaatgcacaccacatcatcctgctagctgagggtcagctggtcaacctgggttgtgccatgggccacctcagcttcttgataagtaactccttcaccaaccaagtgatggcgcagactgagctgcagacccacccagacaagtaccaggttatggttctcttcctgcccaagaagctgaatgaggcaatggctgaagcccacctgggcaagctgaatgtgaaattgaccaagctgactgagctgcaagcccattacctgtacttgtcccgtgatggccccttcaagccagatcactaccactactgaaagccagacctgcccttcgccttccaactgctgtccttgtccaggccctgcctctcctccctaagagcaaatggcacccactttgtgattggtttgtcagtgtcccctattgactccctggggctggtcactcagtttttggcctctgctgcatccctcatactgttccaagtgtggcagggggaattgagaggcccctcctcaagccttggtcatgataggggtacaagggagacagccacagggaactatgaattcaatgatcttggaacttctcactaagtcagtccttccttagcctggaagttggtaatggagtcacaaagcccatatactttaccatctaggcattcacccggtctgtggacttatacctgtgtgcttggttcacaggttcagtggtacctcagyccatgacagaaaagcagcagctatattgaagggcaaagaggaactgttgtttgaattttcctgagagcctgacttagtgctgggccttctcttccacctcataacaatgaggttggtacttttagtctctgttttataggagttagaatagactgttaagggacaactgagaaaggacagagaattgatagccagaggttgagaggggccataaaaacataaaagcaagcatagatctgctaccactttgtaacaagataattcctatcacaaccctgggtcaaaaagagaataatctggtccataatgtttatgttaaaaaaaaataaaaagcaggaaggtgggtaaataaaaatcttggtgccttaaaaaaaaaaaaaaaaaaaaaacccctaggaatacagcttaccaagaaggtaaatgagttctacaatgagaatttcaaaacactgctgaaataagtcagagatgaacacaaacaaatggaaaaacattcaatgtcatttttcatggaattaaacaaaactattctaaaattcatatggaaccaaaacagagccctaatcaccaaatcaaccccaaacaataagagcaaagccaggggaatcacactacccaacttcaaactatattacaaggctacagtaacccaaacaacatggtactgttacaaaaacagacatataaactaatggaacaggttaaaggacccagaaataaagccacacacctacaactactggttttgtgacagagtcaatgataacaaacaatggggaaagaactccctattcaataaatggtgctgggataactggctagccatatgtggaagattgaaactggaccccttccttttaccacatacaaaaattaactcaagatgaattaaatacttaaatgtaagacctaaaacaacaaacactctagaagaaaacctaggaaataccattctggacattggccttggcaaagaatttatgactaaattcccaaaagcaactgcaacaacaacaaaaaatagacaagtgggactaattaaagagcttctgcacagcaaaagaaactatcaacagagtaaacagacaacctgcagaatgggagaaaatattcacaagccatgcatccaacaaaggtctaatatccagaatctataaggaacttaattcagcaaacaaaaagcaaataaccccatttaaaaataagagaaggacaggctgggtgtggtggctcccgcctgtaatcccagcactttgggaggctgaggcagtcagatcacaaggtcaggagatcgagatagtcctggctaacacggtgaaaccccgcctctactaaaaatacaaaacaaataaataaataaattagccaggcatggtggcacgtgcctgtagtcccagctactcgggaggctgaggcaggagaatcacttgaaccctggaggcaaaggttgcagtgagccgagattgtgccactgcactccagcctgggcaacagagtgagactccgtctcaaaaaaaaaaaaaaaaaaaaagaaggcaaagaacatgaacagatacttttcaaaagaaaacatacatgtggccaacaaatatatgaaaaaatgctcatcatcactaatcattagataaatgcagatcaaaaccatgataagatactatcacacaggaatcacaatggtaattattaaaaagacaaaaaacaacagatgctggtgaggtttagcagaaaagggaacacttatacactgctggtgggagtattaaagaacacgtggaaagcagtgtgaagatttctcaaagaacttaaaacagaaataccattcaacccagcaatctcgctactggatatataccctaaggaaaataaatcattctgtgaaacagacacatggactcatgttcatcgcagcactgttcacagtagcaaacacataaaatcaaccaagatgctaatcagtggtggactagataaagaaaatgtggtacacatacaccatggaatgctacacagccataaaaagaacaaaatcgtgtcctttgtagcaacatggatgcagctggaggccattatcctaagcaaactaatgcaagaacccaaaagcaatactgcatgttctcactataagtgcaagctaaacattgaataaacatgaacacaaagatgggaaaaatagacactgtctattacaagccataaattgtggggaaaaaaaaaagtacaaattgtggggccacaaggcgaggttatttatcactagttaggacaataagaagaggcttctcaagatgaatttaaatattaaaggatacaacatctctttttgaattcccaagatgagggtttatagaagtagttaggtgtcactggcattaaaggaattgtattttgttgaagatgagtaccatgaatggttttgaatatgtatttcagctttgcaattaacattatagtgaggtatgtgccttctaagttagattgctctttaataaggcttttggaagtactgcattactactactactattacttttattagccttacagtttatagctgagaatccagtataatttgggaactgcagttcaaaaccatgcagttaatggctcagtttctagctagttaatggctgagccacaactagacttcaagactcctagcacccaaatagagaycttttatatcatgcactcatgccttgatggaatcttattctgaacttctgtcattgctaatgctgttaagtaaatatctttcattttaatctacattgtatgtaaaacattagctatcaaacctcaaactccattttatatgtccagaaaggtattagggcagaactgccatccctcccagcctccacagaattaggaaaggagtcattgggaggcttctggatattcacgccttcacaaagtcattaaaatagtcattttgggccaagtgcggtggctcatgcctgtaatcctagcactttgggaggccaaagtgggtggatcccttgagctcaggagttcaagaccatcctgagaaacatggcaaaaccccctctttacaaaaaattaaaaaattagccaggcatggtagcatgcgcctgtaatcccagctactctggaggtgatgtggraggatgacttgcacctgggaggcagaagttggaatgaccctgcatttttagcttgggcgacggagccagaccctgtctcattaaaaaaaaaaaaaaaaaaaaaaagagagtcatttattttaagctttctagatactgagccaggatgctgagatagtgcaggaagggatacactgtgtgttctataggtaactttgcagagccaaagcagtatgggataactacatatgaaaaaaatgattgtgatatgtccatttttagtaaataaacttctggcttttcactgagaggcgtttgggaaatatttattgcaagattttatgacagaaaatgatggagtagattctggaaaggttggctggagtcctgagtctttcaaacccaggatgctcacctgtccttacatcacggtgtatgttttagagacctcagacacagtcgggagaggaaaacacacatggccacaaaagggaggtcacatgctggatgaagatctccctagcattatctgcatgattttgcaatgaattttaaagctgctcatttttttaaagttctgctgcagtgtgcttctgtcttcctatctgtctgagaagggtcttgcctcatctatactttataattgggggccaggtaaagcaccatgcacagagcaggcattgaatagatgtttgtagttactgacagattcgacgtctatttgtcagatattctaagtgtaaccttcctggaagataattgcttttactttgtgaatatttttctaggattctcaccctttactgagagaaatcttctgggtggtcaggaactgtgaatccttgtaaatgtttatgaaagtccccatgatttatagcacattatcaaatgcaaaaatagatgttgaggtactatcattagcccattggaaaaatgcagctattaagcagacagtccaattggcttactaattttcttaaagtgtgtgaaacaatgaatcttaatagagtttatgtataaagcatttgtgctttaatgggtccacattttcactcatattttattaaaatcctttgccataagctgcagttaggtaagtaattatacattagtcagagagttaaaaacataaaagccaggtaactaaggtaattgagcaggatgaggtcatttttcctccagcaccagatgggtaccacaggtaaaaaccgtaacacttgatctcttccatatgacttagaaagagattaatgttggcattggttttaacttttaaatattttatagtaaaaattattactaaatggtaagttattgttttaaaatgaaacatttgttagtatgctttttgtgcaacagccaagtttaaaattctaattctaaaatggaaaataatataaaaattcaactctgcatctgaaacaaagagtaatcttctcttagctgataattttctgtgaactgtggtggtatcatgatgacaccttttggtgggagcctattaaattattctcaatactttcatatttgagaagacactacttaatgtactaatgtattagatctttttgttgtgtcatctgtgtgcttttcagttggaaagtattgtggtatatttgcattcatgtatatgctcaaattagttagcatacagagtagtgcaaacttggttagaaaagtcacagacataaagacagcctgactggaagtctgagtgtgcaggcagcatgtctacagagaaaaagcgtgttttcatattaacaagtttctccactttggagctgaatggtctacaaagatctatgtggattgccaattcagtgatccaaatcaatgaaggttgacaacagcaaaccttatggattagtctttccacgcatcatcgtacttgcagaaggcagccattctatgctttagttacccagaatttgaagaagcttgacctggagcaacaactgaagggaaagaggaaggggcactatacagagatagagctagagatatatgccctttttctatatctcagacactatgctaggtgctttaaatattagcttatttaatccttacaatagctcttagagtagaattgttatccttctcccttgacagatgatgcaactgaagttcctcaaaaagattaagtaacctattcagggtcacagagataacagtgatggatctaggattaaagcccatgtctgcctgattcgttcatgcatccactcatgtgtttatctgacaagcatttattgtgtgtctattgtgcttagtgaggaaatacagtggtgcacaagaattacattatcctcaccctcatgagagtttccagccacttaaataattacaaaggttatattttatgctttctaccacacttaactactgatacatttatttaaggctaggtacttattcttttaagattagtggaaattaaaagataaaaatgtgttaaggaagactataatctgaaaagtctactttagtacccaaaccaaacctatgaaagtactcctgcttactataaacatctgtgaacagtgggtcttgattttcccttttaaaaggtgtttttgatttttttattattaggtatgaaaccagttaatagctgatgagcagttattagtacattattattattcgcatgtgtaaatctcaaccattttaaaagtacttcaatgtgtgcttttatttgctgtttgtaacaaccctgcccaaacctaatttttttggatcctgattctaattcttaagtcttttggatcctagcttcttcgtgctcatagaaaattgtagttttgttttcattttctttgaaaaattaatagacatttaattaatgtctctctgccaaacactgtggagaaataaaattattgaaaagctcagttctttgctcttaaaagacctagatacgggcaacagatatagatgaataacataagagagggagtctcttagaaagttttgggtggagggaatgctatacatgggctaaacatggaattcaccagaatcaagaatccaatcatttcatgatgttccaccattgtggtgaatgttagatctggggacatggaagcaatcaggatagaaagccagtattaagtcccagaggtaccttatctagagtaaacaaaagtagggaggcaaagatggaatttttcactttcgtatgtctcctttctaaacaggtatatttcttcatagctaaccagcacaatggaaaactcagggaaagcaaataaaaaggatacacatgacgggccaccaaaagaaattaaactgcctaccagtgaagcacttctagactatcagtaagtttttattctgaaatctgaaagttgccatagataaaaggcagtcattgttaagactcatataactgcaaatgcaaacaatacatgcagcagctgccaaaagaatagaggtgggtttggaggcctaattgcactcttgtgctatgcacatatttttaaaggtttttgaaactttgaatataacatagtccaagtagtagctatgactacttagactattttatgaaatgaaatgagagctgctatgaaacagctttcattgatgtactattggctccttcagttgtttattggttactctcacctatgtatacaacagcttgctagcttacctcttaaaatacaacacagaatggttagtttacatttatagagagtagaagaggccgggcatggtggctcacacctgtattcccagccctttgggagaccaaagcaggcggatcacctgaggttgggagttcgagaccagcctgaccaacatggtgaaaccaggtctccactaaaaatccaaaaattagtcgggcatggtggcgcgtgcctgtaatcccagcttctcgggagactgaggcaggagaattgctcaaacccaggaggcagacgttgcagtgagccaagatcatgccactgcactccagcctgggcaacagagcaagattccattgaggttccatctcgaaaaaaaaaaaaaaagagagaatggaagagaaattttccctttatgtgaccttttatttcttagacattccaacttacattattcctaaatggctacatatcaaatccaaatgatttacagaaaattctttttaataataataaaattttataatgtctcactcctaggagctggagacaaaaccatgggtaacatttattccatatttatgttttattccaacaaatagctccttgagggtctgtgaaccttagcttttggcacaaggtaagtgttttaacttgtaattcttacagaattaatagataagtgttagtcttttcttgcataaggctgaaatatacttcattcatgtacttattcaataaatacttgggtgtttaccaagtgcaagtcaagtgctgggtactggaatgtagcagcaaacaggaccacatggtccctgccttgatgaagcatgggagacagacaataaaccactaatttgagctttaaaaaaaatgacagggtggtatggtggctcatgcctataatcccagccctttgagaggccaaggcaggtggatgagcccaggagtttgagatcagcctgagtaacatgatgaaaactcatctttacaaaataaaaattagtccctgctatttaggaggtggagacgggaggattgcctgagcccagggaggtcaaggttacagtgagccatgattgtgtcactgcactccagccttggtgacagagagggaccctgtctcaaaaaaacaaaacmaaaaaaaaaaacagaaaaaaacatggctataataaaggtactataaaagaaaactgtagggtgctgtttaacagtgtaactaaaggactttagtcagaggagttaggaaaaacttgtttgagaaagctttgagctgatttctggaaaaggaacaggcattatggaaactcagagcagtgaagagcatgacttatggaagacaggagggtaggaaagagcttatcacaggccagaaactgagaaaagggagggtgagggaggcagggcaagagcagatgctggtgatttaggcaagggtcagatcaagaagaacacttgggtttttattagaggagtataaagttgaagatggagagcccatgatgctagtgactaggtctttgtttaagagagttgttgttgtttaaagacagagtctcactctgtcacccaggctggagtgtagtagcctgattatagctcattgcagtatcaaactcctgggctcaagtgttcctcctgcctcagatttctgagtagctgggaagacaggcatacaccaccaggcccagctaattttttaattttgggtagagctgggtcttaaactcctggcctcaagcgatcctcctgcctcagcctcccaaagtgctgggatttcaggcatgagccacctcacctggccaagaaggattttagattttaaaatctaaaagaaggatttattttwaaaaatgtaccataaaagatgtatgttgtccttaacaacattcagggaaaatctgtctccttctttggagatcccaatatattcgtatgaactttttaggattgagtgaagggatcagaacaccaagagagaagaggctttcacctgtttccttttattttctacttgaaataacattaactaataactagatactattcatactcatttctcaacataactgaaaactttgttcatctcatcttaggagaggtggacaaaaagccaagctctgtgaatgtaacctggtctctaatttgctcccatggtgtaactggtgacatccagttaacagctgtttttctctcttttgggtggaccagaaaccagtctttctcctctttaacaaaggtttacaaaaaggcaaacgtttaaaaattctcatgatctagtgcaagttataaactgaacatctcatacccttgttcttttgtatttggtaaaactaaataaataatctcatggactggaacagccaaggccttgctgtaccatgctctactgatgacagtttatgcattccatgtgttcctcggtgacagaactgttgtcacatgacacatagccaagacatttcctctcaccatctgaggaaggattgtccaggagttccctggcgcctcttatatctctctcagctcctaacaaagcagtgagcacatagtagatagttaattcatggtttttgagcaactgaacttttttcaaatttatcccaagaaaagaaagtcatgaacttctatggttgtttgtgaagagctgatactaccaatgttcagtctataaaattatcgtctctgaataatgatggtttttattttctcctttatacttgtcttgccccccgttttctacaataagtatggatatagatatagaaacgggtgagaatatggtcgtgagtgaaaaaatggagattatgatatagatttttttgaaagtcaagtttatttggatcagtgatttgtttgtttttgagacaagagtctcactctgtcacccaggctggagtgcagtggcatgatctcggctcactacaacccccgcctcctggattcaagcaattctcccacctcagcctccccagtagctggaattacaggcatgtgccaccacacccagctaattttttgtgtttttagtagagatggggttttgccatgttggccaggctggtcttgaactcctgatcttggcctcctgccttggcctcccaaagtgctgggagcctcccaaagtgctgggattacaggtgttagccatgtttgtttatttttatagagacagggtctccctatgttgaccaggctggtctcaaactcctgggctcaagggatcagcccacctcaacctcctgaaatgttaggattacaggcgtgagccactgcgcccagcccagatttgtgtttttatatgaataaggcagttagaatatttgaggtgaaggaaaaaatatggcaggtcatgtgtgcttcattctccctcaacaaactgtgagctccttgaagactattctttactcatctctgtacctctagtatctagcacagccttatagtatgagctcagagtttctttgttgagtaaatgttgtcggatcttgtctgaaagcaaaatcacactcatgaaaacaaatacaatgttatttttgcctgttgatacaggaaacaaattttttaacgtactaacactcagtgatgaaatgcccaccaataaacaagctctttcttacccactggtgagtataaattgttcaaatattctgaaaacatttgtaacaaagcaatcctgcccttttatcaggtaatttcatggatataggaactctttcccggaacataaggtcatgaacttctatggttgtttgtgaagaactgatactaaatctataaaccaatactaaatctataaagtgatcatctctaagtaacggtagtttttattttctcctttatacttgttgtctcccagttttctacaatgaatatggatagagatataaaaacatgtgggtatggttataggtttaaagaaaaaaacacaaaaatatagtttttttggaattcaaatttatttgttttccttcccagaattttcaatgaaattgcatgggtggggggaacattgacacattactaacattttaacaatatagagagtgggggaaaggtgacatattgtcttactaacaatttaatatcactgtgctttagaatagtgccataaccttttcaaactgctttaatgtatattgctttattatcaccccacttgcttcagcacctagtgtgacatgtcagattctagggcactgagtagatgggggagatattaaaaaggaaaaaagtgtataaggaacaatgatgcttgaagtccccataatagtgttgagttctgaagttaagcttcatctgcttcctggtaaaacacaccttttcatgaagccagagaaggctgaagtggctttcaaagacaggctcagctaaattagacccacagctaccataagctccacaagcgggccagtgaagctgccaaagcatttagggcatctcagaattccccactgaggcctgctgctgccactcacatcatcctgaactgctcactccacaaatggacaagagacaaagcctgaggccatttgctcctaaatgctctgagggaggggtggtgggcttaagtgtggggatgccagttgtagcaaatagaaataaacgatgcccaattaaatatgagtttcagataaacagcaaataatttgcttagtataaatatgacccatgcaatggggctggggctgcacatggtctccagcccaatcgttgcatgctcagtcatcaccaaggaaagctctcagctgcagccagggaattggtctattaacgagcccatctgtagactcagtttaaccaatgaagaccacatcttgagattcatttgcctgctctacccatgtaaagaagtagtattaatagatttataactgcagaaattatgtcagtaatttgcacatttgcataggttcttttcagataattttcatttataatactttttttttaatctcctgaaaaacgggaggtagaaaaggcactccttcaaaatttttgcacaaatgtaagctttaggtaagaagtcaaagatgagccaagtgtcgtggtgcacatctgtaaccccagctacttgggaggctgaggctggaggattccttgagcccaggagttcaagcccagcctgggcagcacagagccttattttcttattattttgtggaggctgccctatctactatagtagtcccctccatttatggtccttcttatatcctgttattttccccatggtatttatcataatgtgtaaacaatatgtttcaatatgtttatgtgtttacttcttattatccagtaaaaggtactccttgaaggcaaggatcatgaaggtgttgttcaaaattatctctgtaggccaggcgcagtggctcatgcctataatcctagcacttcgggaggctgaggcaggtggatcacttgagaccaggatttcaagaccagcctggccaacatggtgaaacctcgtctctgcaaaaaattcaaaaattagctgggtgtggtggcgtgtgcctgtaatcccagttactggggaggctgaggtgggacaagcgcttgaacctgggagggggagtttgcagtgagccgagatcatgctgctgyactccagcctaggtgacagagcaagactctatttcaaaaaaacaaacaaacaaacaaacaatctctataatgcctaaaacaatgctgggcacctttcagctctttaaatctacattgtatgtatgactgtttgaaagggaatattggtccatttaaattgcagaattttgtaactgaaaaggaagcatagagttcatctccatcaatcctcttatttctggaggttaaatatccttagagaactggaaaaccagctctaaaattcaagtttcatagtatccaaaygagcttttttttgaccagtaaaggatttttttttaatgttgcattttctcattattgggaaagaaagagcctagtttttctctctaatgagtatacaatgtcacaaatataattgatgtttgggggaaagggctaaggatataaggtttaattcaactgaaatttactaagcatttattttatgctagaaacattcacatatgatttcttattttaatccttacgataatatgcagagctaggtatttttatcccatttgactgcttggacatttaggcccagggaattgacttgcctgagatcatgtagacaagaagtgataagggcaagacttaaaaccagagtttctcattctttaactactcttcactctactacagaggtactatatttctgtttttgttttattttgtttttaattgagccaaagggtttaggtaacacacttctgttgccttattttggtctcagatttaaagttataagatttattaggttatagtgatacaagatatactataaagttttaaaaattattttatttatttactttaagactgcatctcactctgtcacccaggctggagtgcagtggcatgatcttggtttgctgcaacctccgcctcctgggttcaagcgattctcatgcctcagcctcccgagtagctagaactacaggcattcacctccacacctggctaatttttgtatttctagtagggacagggttttgccatgttggccagcctggtctggaactcctgtcctcaagagatccacctgctggccgggcacggtggctcacacctgtaaccccagcactttgagagcccgaagcgggcagatcacttgaggtcaggagtttgagaccagcctggccaacatggtgaaactccgtctctacaaaaaatagaaaaattagccgggtgtgggggcaggcgcctataatcccagttactcgggaggctgaggcaggacaatcgcttgaacccaggaggcagaggttgcagtcagccgagaacatgcaactgcactccagcctgggcgacagagcgagattccatctcaaaacaacaacaacaacaacaacaacaaaaacccagatccacctgccacggcctcccagagtgctgggattacaggtgtgagccaccatgcctggcacatgtttaaagagatacactatacttaacacctcaaatagctatcaaatagcctataagaaagtctttctgcacttttctatctctctttcataccttacagacactcaacaaatacttgttgagtgttaaagaaatgtatttgtgccaggaaagaagtttttattatttgtagaagagatggcacactaatgaacttgaaccaataggcatgcctagtttaccttagtatttcaagaaggtgtgcttgcccttataaagtcttagatttgttcgtcgtttttgtctaaatgtttttagaattctagaaagcatgttttctgtatgcccactcctagttttcctttaggctaaattatttataaacaattagaaagtataaaattatgactataaaacatgaacagggatttttttttcaaaaaaaaacaaacaactttgaagttttctctccaatatatattttagtgagtaaaatagattcagaaacacaaaaccgtttaggaaaggtttttatccctaaatgtgttttcataatacatttaataattcacttcaaataccttttaaattttttctcatttcctaagataaatgattctaacacattttatctttgttgattctcagatgtcaaataaaggaagatgccgtggagcaattcatgtttcaaataaagacacttaggaaaaagaaccaaaaatatcatgaaagagtgagtataaaatttagaacctatatatagtcattaaatatttacactcatgctttaaaaaattgtggattatggtgaaatatactctaggaaattatcttcttcaaagcttggaattgattgatttacaatctatttaagtttctttatacatgtgaggcagaaggatactgctgttcccattatattagttataatgtcagtggaagttgggttgaattatgttatttagaccctgaagacactgaatcttaacttcaaaattttaaagttttgaaaccacatttatcttttgactttttatttaaccaaacyataaaacattggttctccattttaaatctctttgtcttttttcttttagattttcagagagtatgcgtrtgtaaataccatttgaaaagcacaatctcagttgttaaaattagtaattgcatatttaagatgatatactgtttttataaaatcagattaaaatgaatatcaaaaaggtgctatatatgactatcgggactaaagatcaacagaaataaagtttggragcaatcaatgataattaacacaatttatccctcaaggtatctcatgaatgatgaaatactgagagtgcccccttttaacacatttattttatatgggccctgaaactttcacagctaactgttttattttrgcttctgtctaaaaagaatatatctacaaattttagtagagcctggagtcagagacctgagtttgcatcctgactgtacagcttactgctgatgtcattttggtcagatttggtatgagcctcaatttcactcttgtaaaatggggattcctgtctcccccatagggctaatttatttgttcattcagtacatatttagtggataagacaagccagtaatataactgtgactctgacactatcacgattcttaaggttcattcacttgtaatagggactaaaacagaagctcagtttggcctggtgcctgaatgcaggctccacatgagatccagagcactaaagagaagtaagtcccatcgatgcacccatgcacatcctccagtgatcagcacagggacttgtagatcaggacttggttgtggaaagtaaaacaaatcaggattgagtaatcattttccccttagcccatcatttggagccagaaatagttaaagttcttgtttccatgaagattggctcaagaatgcacattagtggacccagcagtgaggagcaaggaaagacagattctaactacaactctgtatctgaatatcatccatttctttccttttatgttgttattgctgtaatttaaaccaccatctcttactcatccttccctcaaagtacattttccacagtgcaaccaaattaccttttgaatattgtaaaccaggtccattctttcattcctactattctaccacgactgctctagcaaaagttattaatgactaatttgccaggtctaatagactcttcttagtccttaaactttacctctcatctcttaacatccttcagtggcttcctattgcacagaaaataaaatctatcgtctttactaaagtcttcagcgcccttcaaaatctgacccctgttcacctctcaaaccttgtctccagctgctgatggaggattttttgctccttagctcagctaggtctgggttcttgactcacaaccaggaagaggtaggcatgcagacatgcgaagagtgagcaaggcgggaagttttattgagtgatgaaacagcttttagcagggaggggatgcaggggtggtccccctacccaaaggcaggaaagttcccaatatggctgagcccagggatttttatgggttcagagtagagactgtgtgctgattggtttctgagcatgcaaaaaatgttagggtgggcacaatagtgtagaaaaccaattaggaaagggtaggtatatgtaaaataggtgaaggatgaggaccaatcagaggaaagctcgccaaacaggaaggcgggttatcaatatggttggaggatttacccaggactgtttccagcttgaaggttggatttcactggggaccggccccatctgcctaggcatttgtctgcctcctgcctctatcactgctccaccttttgcttaccatctcttctttgaaatcttgaaaaaccaatctatttatttatgcctttactcatgctgtttcctcttcctggaatgcttttttcttggttagctccttttcattcccccaacctaagttggaatattgtgtaaaattatatctccattattaaacagcaagctttttagacagcagcaatccagtcttacttctttgtttctccagaagagtccagcttaagtaggtgttcaataaatatttgttgagttgattcatgctaacactagtggaagaaaaaatgttttgaggtcatagatatttaacatgactcatgttttctcttcagttatttcaaaatcagaaatgcccctcttctttcctacacatcatctcttcctatgtatatttagttctgtttggattatcaccccatttattatctttctctcagtttgcattcattgctccacctacctcattagatgttccgtagttcactctgtctacttccctactctccattcattctttcattcctactattccaccacaactgctctagcaaaagttattaatgaccaatttgccaggtccaatagactctttttagtcctttctttacctctcacctctccagcagccacttcctttatcttaaaacccttttctcctttgggttccaggacctcactgcaacttaactacttcactgaccatttcttctcatttttcattcactgctctttgcctagacccatcccttaattatcacatttagcagagttctgatctcaacccttttctctcactcctttttggggtcatctcacttaacactatggcttcaaataaccatctatttgttaataattttcatatctatatttgataaatttcataatattgtacaccaaaaaaaatgagtgtatgtacaaacggaaatgaataaagtctctagcttagttaataacattgtactaatgtcactttcctggatttgataatgtactatggttatgtggaatcttatcactggggaaagtaaggtgaatagtagattggaactctctgctctgttttggcaacttcctttcttgttttttcatttgtttgtttgagacagtctcactccgtcacccaggctggagtgcagtggcgcgatctctgctcattacaatctccacctcccagtttcgagggattctcgtgcctcagccacccaaatagctgggattacaggcatgcgccaccacacccaactaatttgtgtactttttgtagagacagggtttcaccgtgttggccaggctggtctcaaactcttgacctcaagtgatccatttgcctcagcttcccaaaatgttgggattacaggggtgagccaccacacccagcctcttttcttgttcttatgagtcttaaaaagttaaaagggtaagcatgacatgactttatatgaaaacaaaatcaatcttttttttgtagcttatttactgaatatcctttttccatttttataatgtgataattattcttaccttaaatagtaattatttacctcactttgtaggataaacatatttttagcacattagtgatacagctaactaaatttcgtttctgtatattactcaaaataatttttgagacattgaattctgtcaaatgctatcagacacattctccttccattcaaaattcatatggggtttgggaaattaatatagatgatattaaatttatatataatgtcaaatagtgtttaataatgcttatgcaggccaggcacagtggctcatgcctgtaatcccaacactttgggaggccaaggcaggaggatcgcttgaggccaggtgttttgagaccagcctgggcaacatagtgagagcctgtctctacaaaaaattgtagaaagtagccaggtgcagtggtgtgcacctgtagtcccacctactcagggggctgaggcaggaagatgcttgagcccaggagtttgaggttacagtgagctatgaccatgccactgtactccagcttgggcaacagactaagatcctgtctctaaaatggtaaaaattaaacaattttttttwaattttgtaaatgaaaaatatcacatgcttgaaaagaatagtcattgtgttaaatatttgatctaggagatctggatttattttaagaagtattgtgtcaagtatggaaataaaactaaaatttctttgtatattatatacatttctttgtcacttgtatgtagtggttttaaaattaccactctttggaattttttgcctgtatatcatggtaaatatttttgagctgggattgaatttagaggccactgttgtcttactaaaattaactaacataagtaaaatcagatatctttacttaggattcaaaacatagttgataaaggaattttccacttctacaaaaataagtggaaaagtccatattaagaaaaagtagtagcagagcaatagtttggcaagtgatatttccattgctattattcaagtttctataaatatttcattttaaaataacatgtcaaactaaaataattcaatttatttataagcaaacaaaacatgaatctatttcatttcagaaaataaaatatctgagaattggttaaagagtagtaaattatttatttttcagttgttaatattcattggccttcattttttagttaaacttcattttgaaataagtatagattaacttatagttataaaaatgatataaaaatgatagaaagttcctatgtacctactacctagcttctcataacatactacaaaatcacagtacaatattataactaggatattgacaagwttaacatggaaagtcaagatacagaagatttccatcaccacaagtatccctcatgtgacctttaaagccactcactcccctcccagttctgccccctcattagaccctggcaaccattaytctgttctccattattataacgtcacttcaggaatgttatacaaatggaatcatacaataagtaaccttttggtacttggctttttaaaattcagcataactctctggaggtacatccaggttgttgtgtgtgttatcagttagtttctttgtattgctgactagcagcatggtggggatgtaccagtttgtttaaccattcacctggaggacatctgggttgtttccagttattggacattttacataaagctaatataaacattcatggacaggtatttttaagaacaaaagttttcatttctttggaataaatgcccaggagttcaattgctgggtagtatgatagttacacgttagtttttaaagaaacktgaactactttccaaactggctgtaccttttacattcccaccatcatataagagggatccagtttctcctcatcctcttcagaatttagtgatgccgctatgcactattttatgttagccttctggtaggtgtgtagtaatatcttagtgtggttttaatttgcatttccctagtggctaatgatgttgaatatcttttcatgtgcctgtcttttgctaattttataattagactttttgtactcttgagttttacgtatatatataatcttctaaaactagtcctttcttggatatgttatttgcaaatattttctcctagtctgtagtttgtctttcatcctcacaaaaaggtctgtaacagagtaaaagtttttaattttaatgaagtccagtttatcaatttttcctttatggattatgctttcagtgtcaagttttcaaactctttgcctagccctaaatctcaaagattttctcctatgttttattctaaaatttttgtagtttcaccttttacatttaaatcatggtccattttgagttagtttgtgtataaggtgtgaggcttaratcaagattcttcttttttttttctacctgcagatgtccagttgcgtctgcactattagttgatmaagctmtctttcctgcattgaattgctctcatacctttgtcaaaaatcagttcgacattgaataggcatttctccaaagaagatatacaaatggctaacaagcacatgaaaagatgctcaacatagttattagagaaatgcaaataaaaaccacaatgaggtaccactttctcctaataactgagcctcaaaatacataaagtaaaatttgataaggataagtttgaggattaacaatttttttttttttgagatagaattttgctttgttgcccaagctggagtgcagtggcatgatctcagctcactgcaacctctacctcctgggttcaaacgattctgctgcctcagcctcctcagtagctgggattacaagcagctgccaccatgcccggctaattttgtatttttaatagagatgtggtttcaccatattgtccaggctggtcttgaactgacctcaggtgatccgctcgcctcagcctcccaaagtgttggaattacaggcgtgagccaccgcgccctgccttgtgtgcgtctgtttctgagttctctactctcttcagttgatctctatgcctacccctctgtctataccacatagtcttgactactatagctatataatacgtcttgaaataaggtaaattaattcctcttactttattcttgtttttcaaaatcattttagctatactgtttcctttgtcttcccatataaattttagaattatcttgtatatatttgccccctgacccaaagaaaacttactaagctttacatagggattatattaaagctgtatatcaaaattgggatatctttactatgctgtcttccaatccatgaacatgatatgtttctccatttatttagatcttgttttatttttatttatttaattaatttatttattgagacaggatctccttcagtcaaccagccttgagtgcagtggcacaattacggctcactgcagcctcaaccttctgggctcccacctcagccttccaagtagctgggactacaggcatgcaccaccacacctggctaatttttaaattttctgtagagatggggtttcaccatgttgcccaggctggtcttgaactcctaagctcaagcaattcaccttccttggcctcccaaagtgcagggattacaggcaagagccactgtgctgggcccagatcttgattttttttttaatcagcgttttctagttttcactatgcaagtcctatacatgttttgttagatattttcactgggtctagcattctagatggacagttctttattttcatcacataaaaaataatgtgccacttcctattacctttcttctagctagcatggtttctgatgaaaaatatgctgacatagttcgagtaccccttaactgaaattcttgggaccagaagtgtttccaatttcagattcttttagattttggaatatctgcatatacagaatgatatatcttggggatgggactcaagtctaaacatgaaattcatttatgttgcatatacaccttatacacatagcctgaagttaactttattttccccttggggatgctgaataaactgtgtttggtgtgcctgcattttgactgcaacctgtcacatgacatcaggtgtgtcattttccatttgtggcatcatgttagtactcaagaagtttcagattttaggctgggcacagtggcttatgcctgtagtcccagcactttgggaggccgcggcagatggatcacctgaggtcaagagttcgagaccagcctggccaacatggtgaaatcccgtctctactaaaaatacaaaaaaaaattagccaggtatggtggtgggcgtctataatcccagctacttgggaggctgaggcaggagaatcgcttgaaccagggaagtggaggttgcagtgagccaagatcccaccactgcacgccagccttggtgacagagcaagactccatccccccccmaaaaaaaaaagtttcagattttaaagcatttcagattttgaattttcttatttttattttttgaaactgggtctttctctgtcacccaagctggagtgcaatggtgcgatcatagctcactgtaacctcaaactcctgggctaaagtgatcctccctcctcagcctcctgaatagctgagactacaagcaccaccatgcctgactaaattttaaattttttgtagagacagggtatcactatgttgtccaggctagtcttgaactcctggcctcaagtaatccccccagctctgcctcccaaagcactggaattacaggcatgagccaccacacgctgcccagattttggatattctaattaggtatgccctgtatgctaattgtttttctcctataggtaaggtgtggtttttctctgactgcttttaagacttttcccttgtatttagttttcagaagtttgattatgatgtgtcttaacatggatttctttctgcttatcttgtttggggtatgcttagcttcttgaattcataggtttatgtctcttggaaatttgggaagtttccagccattatttatttgagtactttttcagtcctgccctctttctctccctctaatactccagtaacatgaatcttttgttataggccaggcttgctsgctcacacctgtaatcccagcactttgagaggtcaagggagtttcagaccagcatagcaacatagcaagacctcatctctaaaaaaacaaaaataataataataataataattctaaaatgtcagccaccttagtattggcatctacatattgtcatttttcatttagtttacaatcttcctggttcttggtatgatgagtgatttattgaaacctggayatttttttaataatgtcataagactctagatcttatttgtaatcttctgttttacctagcttttactggcattgctctgccaggggaagyagggataccayctcataatgtctgatggaagtaraagtccaggcttcccacttgccttcctgtgatacccaaaggccgggaacttcttgactctattttgaggaaacrtagtgtacatagttgatcaaacrtgaattactgttgattttcatgacagaatagccgcttaaaagaagaacagatttggcacatacggcatctactaaaggaactgagtgaagagaaggcagagggattgccagttgtaacaagagaggatgttgaagaagcgatgaaggaaaaatggaagtttgaaagagaccaggaaaaaaacttgagaggtgatttaggaacatagaaaactatcatagagttgtgmcaagttatttcttgaatatattaatgctttattcttccaatatgttcaaaatgctgttaagtgtattttaaacggcatcattaccaccgcagccacaaacacatgtaggtaaatgggcaggagagggaaataataaagtgggtagaggtratgaagccaagcaaggaggtggaagaagggtagtgatcagaaacagatgaaatttatctgactgttttttttgggatagggtgtagttcagtcacccaggctggagtgcagtggtgcgatctcagcttactgcaatcttaacctcctgggctcatgcagtcctcccacctcagcctcccaagtagctgggactccaggtgcacaccactatgcctgagaattttgttccttttttgtagagatgaggtcttgctatgttgcccaggctggtctcgaactcctgggctcaagggatagtcccacctcagtctcccaaagttctgggattacaggcgtgagccaccatgcccagcctcatctgactcttacaacaggacagtatcttgttaaacaccattactcatagtagggttttgttctttttcttttttttctttttttttttaattctgttgtttggtggtttcattgacttcagcttcagcttagatttgggaatgataaggcaaataaaaccatgaaaaatgtttctcccaatatctctaagggagccaagcaccccattagatggaggaaatagggattagcgttgggaaaggggaagtttggagaacatgggtagtaatgacactaggtgcaggcaatgaaagacccagggcatactcttgctgtaggcttaggaaataccatggtactgagggtaaatcatgcagttctgacatacacattttgaaattcctattctttcattctaaacttgctgctaagatttctaggaccacttttgccaaaacctccataaataacatccctgctaggaagctggaaaacatgagaaagagacctaagtgctatcatttgttagcccttaggaaatccacgtatttctggatttctccaagtgcctacttagctgagcactttgcacacagcaggctctccactcaatagatatttgctgttttgagtgaaatcgtttccaagaccaaacatcaataggcaagtttcatttttaggggagtccaaaactgttcccatagacctcctcctacccaagtctcttcattggcaatagggatgtcatgacatggtagatagtatattttgcatgacttctttccaaaagagttctgcttatatttggaaggaatactttagtaagtcccttgagatggagtgagaccccaaaggatgctcagctgtgctcgctaaactgccttctaaaggaatgggcccagttagttgagatgcgcctgttgatggtttgggctgagcatggggatgtgtcatacaagactgggccacacggcatgactgagcacaatagaggaggactggacatgcatgggaagaaaggaagctcacagacatggaggaagagagggaaagtaagagaacagaagtgtctggaaaacatttccgaggtagtcactttatgtcccaggtagtcccttgcaactcattttggtgtggagcagcagcaagtgcttcacctatcagcttgttacaatgccaattcccaggccccacccagacctactgaatcagaatccgcattctgacaagatcccaggggattcctatgcacagtaaggtttgagaaatactgctgcaacccttttcatccaacttttagtaaggactctttcagttgcaaggataaaaaatccaagtcaaactagcctaagcataaaggggatgttagtcttttcacatcacttaacacagaaagacagagtgcttctgacctggatacaaggcttcacatgctgtcagatctcagcttaaacaaacaaacaaaaatctctggggcgtatgtgttactagaagggaagggaagaagttctaagaaagtagaaaaacagccactacatccatctcccttttacaatcttcagtgacatctaccaaccctcccctcaaaggccaaatggggcactggcctgagacagtagcagtctgctcgaatgagagaacaactacccatctggcttatagtagtactgataattgtttaatgaaaataaccaccatttgttaagagattttaaatatagtatcttgtggccaggcatggtgactcatrcctgtaatcctagcactttgggatgccaaggcgggcagattgcctgaggtcaggagttcgagaccagcctggccaacatagtgaatgaaaccctgtctctactaaaaatacaaaattagccggacgtggtggtgggtgcctgtgatctcagctacttgggagactgaggcaggagaatcacttgaacctgggaggtggaggttgcagtgagccgagatcgcgccactgctctccagtctgagtgacagagcaaaactccatctcaaaaaaaaaaaattagtatcttgtgtacatctttggaaaaagatgagtcctgagtccttctggacctctggactgaagaatatcaccctggcctgattgaaatgcttcagtcattcaacagacatttattgagcgccaactaattgccaggctctgtgctaagtgctggatttacagagatgaatataatgtagtctttccttcaaagaactctcaaacaaggtgatatatggtgatgagataaacagccattaagtttgttgtacttgactcttttgtaatgcttctttttcaaaaatattcagcaacatgatattcggcctaaagattgaatagaatatcatgtttagcaaacaaagtttatatccctgaaatagttcagtatttgtacacatttaactggggaacttgcccatcactctggttttaccaaaggggggtgggaaaagacatgttattatgactatcagaggctatcatttcatacaagagaaatccaaataaatgaactttagatgactgaatcaaacaatttacttacaaaaatggttgccaaggacctgggaaggacacaagttgaaatcacttttgctcagagggtataatggccagaaaaatgacaatttcctaataaagaatacatattatacatattatatgatacactgtacaaaataggacccttatcaggaatgatgtaaacttgcagcttcctaggcatatgggttgtctattacgtctttcaatcaaccctcaaaccacacatctactttgtagtcagaagtttaattttgcttagattttgaatcaggggagatagataaacaayagtttgaatagtttagaatttcctaaattttagatataaaatagtatttatgagttaacagtattttaatatcagatyttaacttcttaaaaccagattgcaacatataatggttacaaggaaaacagaaatgacacagtgtctttattttcaacagatatgcgcatgcaaataagtaatgctgagaaactatttcttgagaaactcagtgaaaaggaatattgggaggagtacaagaatgtagggagtgaacgacatgctaaactcattacctccttacaaaatgacatcaacacagttaaagagaatgcagagaaaatgtcaggtcagttgcaacaaaactagttcaagttcagtaaaaaacatctttagtagggcatacattgatggaagaaaaaagtgcatactccctgaatcattcattactctgctgtcagcacaagcagctgtgagcctaagggtaaaggtggagggaggaagcagaaaaatgatcccaggaccacctgtgaaactgagaaggggaaataaagaaatgggcgggtggggggcagtgtgcagaagccctgtgaccaagtgactttaagaaagacgcttctggctggatgcggtggctcatgcctgtaatctcaacagcctgaggctggaggatcgcttgagccaagaagtttgagaccagcctgggcaacacagtgagaccatatctctacaaaaaattaaaaaatcagttgggcatggtggctcatgcctgtagccccagctacttgagaggctgaggtgggaggatcagttgagccccgtggtcaaggctgcagggagctgtgattgtgccactgcattccagcctgggtgacagagcagaccttgtctcaaaaaaaagaagaaagaatcttcattcaatggatggggtctgtatgtttccacactgggacagaagcaattccaccaagataggagtgtcctgaggccaggttatattagaaagagaattcacctggggcaagctaagtcagcttagccaggctggatagccagaatcatcatrgagaaacgtcaaagtcaattaagttgtaaccagggaaaaactggggaacaaacatgagatgagaagtggagaggctatagagtaggatgccgtcaggagcaatgaagcttaccaggactagatctggacacgatgagggccagctgtctgttactgaggcaagcatagcagcttaaaagaacaccagagacccagacacagaagaatcataggacagaattaatgggggaaatctggcccaaaagagttgctgtgggtggacaacagtccaggactcagctggagatagtgccctgcgttgtggaggggttcctgtgggtggttcccatgtccccctatcagggctctctgcttgtggaccaatttgtatgtaagtttctcagcttagggcctctgcaccacagtggtggtgtaaacttggccccatatcagtctgggcatgaagttccaatttgtcaaaaggttcttcttctgaaaagagaacaagagtgccagcctgctactccctctgtccgcactcaaatcctctcccactactaccagtttcttatttagcagtcagaaatattctatgcatatatatatatatatatcacaaatagcatgctataaatatgatgtcttacttgcttttcatgtaacaacatgaacatccttctaaatcagtatatcttaatactgcctcattcttccagtggttgcatggttttattgtacctttttttttttttttttcgagacacggtctcactctgtcacccaagatgaagtgcaattgcatgaacacagctcactgcagcctcaacctcccaggctcaaacaatcctcccatctcagtctcctgagtagctgggacagcaggtatgtgccaccatacctagctaattttatttattttttgtagaggtctcactgtgtttcccaggctggtaaccataattttttgaccagtttcttacacataagcattaaggttgtttctagtgttttagtattacaaataatgctgcaatgactatccttacacatgtctcattttcctatgacaaatattcttgtatttatgtcatttcacttatgtgtatctctgaaagaaatggttgtgtgaaacagactattttactgtgataaatgtggccctccataaaggttgtaccaagtggtacttctaacagtatgcatgaggatacctattttcccacatcttcagcaacagggggtggtatccaaatttttgttctttgtcagtcttatgggtcgaaaatggtatctcattgtagttttaatttccatttcttttattaaaagtgacactgaatgtgtcttttcataacttcaagagctatatgaatttccttttccataaaccatctgttcatatctgtcacccatttttctaatgtgttgtggcactctttacattttaaaaaaattagctctttaactgtgatataaattgcaaatatttttcccatttgtcattagtttttttgtttgtgggttttttaatgaagaaatgatgtgcttttaaagtgcccaacttatcagtctttgattttacgtttatgagattatgaatgaattctccaatattttattctaaaatttttatggttttgtttttatatttaagtctttgtttttgtgtgagagagtgatccaactttatttttttaccaaatggttttccagttgttccaacatcatttatcatcaatttttatcctactgatttgaagtgctaactttattatacttttatttctcatatatatctgaatcttattctctactatctattctgattcactgatctgcctatgcatttgttaaccagtagaatactttttaaaaagttattgttctggtacattttcaaaatttcaaatattttagccagtatttatttcacatttttaaagtaggaaaagtgatcttctcatataaacttaacccattatcttgatcagaagtttggatgattgggccaggcgtggtgtctcacgcctgtaataccagcattttggggggtccacggtggatgggtcacctgagctcaggggttcgagacaagcctgagcaacagggtgaaaccccatctctaccaaaaatacaaaagttagctgggtgtggtgccgcacacctgcagttccagctcctgtgaggcttaggtgggaggacgacctgagcctagtaggcagaggttgcagtgagctaagattgcaccactgcactgtagtctaggtgacagagagagaccttgtcttaaattaatgaattattaactaggatgatttctttgacttaaaaattttcatgtggttgtattcaactttggggtggtaaaaacatttatatattgaattacttgctggtcaagccatggggcgcagccataagaaaatggttgttatgggcttgtgttattttccattagttttagggacttgtcttaaccatccaggtagcagcagccactccaccaggggaactattagaacatgttggggaccactaactggacacaatgaatatgagcaagactcctaaatcaatctatctgaaggcttactaccatcatcccctctttttctcctaccttctacacaggctgccttctttcatgattttcctggaattctcctccaatgattatggggtttgcgttagttaggctgctttacatgcaaggaagagagatcaagtcaggctattgttgtgggctgggaggttgctgtaagtgaaagaggatattaaaactttttaaagtctcagtttacgctgaggtggcaaaatgagatgagataccaccacatagatttgcaatttgatgaagaagaaaaccagtttcrcrcctttgatcatcgaattccagtctatacaagaagttagagaggccaggaaaaggttgttagaaattaggggacaacttttggaaagagcttttggtgtgctatcagtcctactctttcccccaccgaggagcaggtaaaaggtaattcctcctccatctcaaatctgggtgaaaggtcttcagagagatttctcagatggttcagtatgtgtcccctgcagtctgggcattcaggtctagtttatgactcatccctgagaaatctagggagtaagtggctgaggagctaaccgcactgacagcagaacacagaagaggtggctgctgccctgggctgggcctgcactcccgagtttgtcagggcaaagaatggaggagtgtttcttgtcaacttgttatgagagagagttggggaacagtcatgtgaaatcttgctggagacagctgactagggtgttgggggccggtgataggtccccaacagaaaaacagggattttgtatgtgtgggaggggagtgcagaattgaaaaccagggaccaacagaaaagttgttaccaacttctaaggacagtacttgccctggatcaagggaatgcagatgaaatcccatttgaaatggggaagcttgtcctccaaagaacctactaaaacactcccatgagacaatgtgtcagccttaaatgccagctaggtccagaaagtagacatgagcttgagacagtatcagtcaagtgagagctttcttaccgttttccatgtttccctcttcccttcagcactgagagaggaatcatggaagctcaaggcaaagaaaatggcagcaggcccaagttaggaaaggggattggcataactttgaaagaagtttaaattgttgcaatattctgaacatactaattactcgttggaggaccttttgttaccacaaagaaaccagaagtcataggatttaccatatattttattgagcagaagtcaatagcctcacagtatgagttttaaaggaaagagacaaaaattaagttgcttgactccccaagagtaatgcttgttggstgtaacacaaatgaggaaagggaagactgaagacagaatgatatcagcggtggttctaggcatggctcctccccacatttctctcccctgatctgtgactgtccctctcattggcacctctgctttgctctgcatacctgtcccccttctcttctacttcccacagaacagtccttgcagtattctccagcccatttctaaagacatctggtgccatcatgcaccttatcaaacatgaccaatggcctttgtccataccacctcatgggtcaccagtcagccccagcacaaactgttcctcggtcacctgccttactcagcagcctctgctgaaacccagggggcgaggaggagaaaacacttagagctgcttccctgaactttagctagaatgggatattgggatactagtatagaaaacagtcactaacatatccaggccaaggttacttctcctcaataaaaggaaaaggaaccttagaataagcccaggaatgagaaggtgaggggttattacaagtcattagataattacagtcacagagcatttttatttttgtcctttactggggcacaggacagggattcttaaaagttctttgtacactaacagtgaatttttttaaattaggttcaagactccgtacaaaaaagtaacattgtttctttgaatgttaattttcttgcctataaaatcagagtccctaggtgatctccaagaggactcacatttccagcatttgcttttccatgtcttgtctaatccttacaagttcctttgagttagatataattaggccagtttaaagataagaaaacaggcccagggaagttaattgccctaaccaaagtcacaatgctagtaacaaatggaacagggatttgaacctaggtgtgttaggccccaaatccatctgcttcaaatagtccccctgaatctgtgattcagtgagttggggcggctctaaaaagattactacctggccagtgtttctgctagctcctgttcagttttctgcaaaagggactaagaagaggccactgccacaggagagggtcaacacaatggagctatgtgaccccagaagtcagagaagagtatataataaagctctcaacaggccaggaggagtgaaccaaagcagagccagacacagcagggaaggtggaacagtgcaaagcaaactttagccagtgcagtgtggggtcagcttctgggaagggacgccattagatggggtgtctgagaagcaaggagtcttctgcacagtcctaatctgccaagctcccccttgcagtgtttcgagcttttacgaggagacttttacatgccccactttctttggctgcattcaccaataaatggttaattgttaccagaagcatcatctgaatcacagaggctaacaatgagattctcacattcacccttgtcctgggtactgtgtttttaagaagaaaaacggtccatacacttttatatggaagttggaagagaatagattgtgaatattgctttttcagtattaataaggcaatagagaaagctacatctttagtcagagtgtatttgataatctatttttaaattatttatagcaaagaattaatacttcatgttatcaagctccaggttttatggtttcttttagatgctaagaatgtaaaatccattatgctcctgatccattgcaacttttagattgattattgtgttttgttgggtagaagttcaaataaataaccaacattaagctgatgggctagggtaaattgaaaaaagaaattccatcagaaattagtttggaaggattaaaatattcatgagattagttcaaataagtaagaaaaacgcaggctgtataaacaggaatatgtaggttggaataataaaggcttccacttcttattctctagatgtcaaattagactaactccaaaaacctaatgaattcttgcttatgaactactgcctcactctagtccatctctattagaggcagaaactgccctctcctgaccaccttttctggccaccccacaagttaggagaactctccctttctctctctctctactccctcttccccttcccacccaagctgccagagaaggggaagagccaatatttgctttctggtgctgaagcctcagatcactgcccaccaaagacttgcagtttgccaaatttgattttcttcaaaatattttttggcacgtattgtgtcccagggatacagtaatgaaaagatatggaagagaagtttttactttctgctctcagcgttttcatctaatgggagaaacagttatgctagtacaaagtatagacgagggctgaataactcttgcccagctctctggcctgagttctggtggtagctgccttagctgggctcctggtcaattgaaagaccagacctgcagatctccttccctacagcataaaatccctgagggttctgctttggctgacttggtctgtgaagaaaattttccctttgaaacaacgccctaagtcaggggttccccaacccccaaggccacaggccaagattagtctgtggcctgttaagaaccgggccacacagcaggaggtgaacagtggagaagcaagtgaatctttgtctgtatttacagcggctctccatcacttgcattaccgtctgagctccgcctcctgtcagatcagcagaaaccttagattcttttaggagcgcaaaccctattgtgaactgcacatgtgagggatctaggctgcatgctccttataagaatctaatgactaatgatctgtcactgtctcccatcacccccagatgggaccatctataaccaagaaaacatatcacaaggacagggtttttttctgtcttaaccagcaatatttgcagtgtcttacatactgtttggcatacagaaagagcttgatagttacttgttgaaaaaaggaatgaacaaattggactcacttgtccagctttcttataatgtagaatcagggctcccactgattctacattatagtgagttgtataattatttcattatatattacaatgtaataataatagaaataaagtgcatatgtaatgcacttgaatcatcccaaaaccatccccctctgccacccagtctggggaaaaattgtcttccaggaaaacagttcctcatgcagaaaatgttggggaccgctatcctaaatggaaataaggttctatagtactgttagtacaatactgttgtttagctgtagaataagttaagtgagcctctggacctgcccagaaatctagcagccacgattttcaacatcatttgtatgggaaaatactttctgaattccaaacaattgccctgcctatgttacataaataaagcacaactaatgggaacatataacacagaagtaataaaacacaactaactttgattattctcagattaactcgtttggagtagtacaggttcctcatttttcacattgctgactacctgactcagtccctgaatgttacctcctcaaaaaaagctttctctgatcacccgatctaaaattgagaattttagtttttcttcctcatacacatcaccacctgaaatattatttatttacctgcttacttatttatgatctggcttccccattagaatgtacatatcacaaggacgggttttttttctgtcttaaccagcaatatttgcagtgtcttacatactgtttggcatacagaaagagcttgatagttacttgttgaaaaaaggaatgaacaaattggactcatttgtccagctttcttattctccactctttaaagcagccttgctgtcacagtgtctcatagtccttaagaagggatattgatttcatgatctctaagcatctttcaaggcctaaaattttatgattctttgctctctcaataatgacatttgtgagcatatgaaaatcttgagaggacagagaatcctgtgcttcatttctgtctgtatttctcacctgagcctaacttataaccaggtctatcaactttctgagcccccttaatccctctctactctcctctcctcgttctgtctttcctggcccaggaaacatatgccaagaatagtggaaatctagttagatgaagtcagacagaatgctacccgaacagataataaagtcttcatacttctgttgtggagtagtaagttgtgtgatatgaagagtagactgccacacatagttttacctagaatcatgcttgataaggcttttaattttctttttttttttttttttttttttaaagaacactataaaatcactctggaagatactagaaagaaaataatcaaggaaactttgttgcaactggaccaaaagaaggaatgggccacacaggtataattcaattttcttaaaaacagaacaaaacaaacattttccccctattttttctttgggtatattatagtggttaagaactttggatagattctcagatttgggatgctcaacctgtaataatggctgtaacataatattaaaagttttgaacgatttataaaatgaaatataatttgtctaaaaaatactttattttatatccaaacctaagaacgtggattctgaagttagacagtttgagtttaaatcacagttctacacttactggctgtataatgaatttgttacttagcttttctgggcttctgtttcctaacctataaaatggagaataataccagtatttaccttaaagaaatagtgtgagggttaaatgagatgatttaagtactataatctctcacaagaagcaacagctcagtgaattttttctttttttttgaggcaggatcttgctctgtcgcccaggctggagtgcagcggcacaatcacagctcactgcagtcttcaccttttgggctcaagcaatcctctcacgtcagcctcctgagtagctgggactacaggcatgtgccaccactcttggctaatcagtgaattattaatcagttatttttttaagtataagaaatatacgttgagtatcccttatctgacacatgtttcagattttggattttttcagattccggaatatttgtattataccagttgagcatctcaaatccccaaatccaaaatccaaagaagtctggcctgggtgcagtggcacactcctgcaatcccagcactttgagaggccaaggcgggtggattgcttgaactcaggagtttgagatcaagcttgggcaacagggcaaaaccctgtctcagctagtcccagctcagtagtgccagctacttggggcactgaggtggaaggattgcttgagcccaggagatcgaggctgtagtgagccgtatttgcgccactgcactccagcatgggcaacaaagtgagaccttgtctcaaaaaaaaaaaaaaaaaaaaaaaaaaccaaaaaactgaaattctccacaatctgaaattttttgagagccaacttgatgcttaaaggaaatgttctttggagcattttagatttcagattctcagattttggatgctcaacctgtgataatggttgtaacaaaatattaaaataaaagttttgaatgaattataaaatgaaatataatttgtccaaaaagtactttcttatatacccaaacctaaaagagtatattctacactgctggcactttaaaaatctggaatataaaatatttttgaggcataattttcaatcttatatgttctctaattcctttgtttttacacaaaatatctgatttttttttttttttaacaatcttgacctctcttcaaactatctgcaaaatcagtgaggtccccactaagattgtctgttcatctgggacatttctgtctcagaatcataaacatctggtcttttttcaaaaggttccttactgaatttcagttgctgttattggttgcatccatgttggttcagttgttcttttagtcttactttcttattgcattatttttactaatttacacaaatacagaaggttttggaaaactgatcagcaatttgtttgctcatgcaattcagctactttgtaagtgaatctgactcactcacatggtgaaatcaaccattaagtaatcggaccatagttagacgattcaaagtagatatataggccaaataagcctataatttcaagcatatatcgtgaggactattctaaatattctttcaagcattacacatttaagtccctcagcaacccagtaagctgtagagacttgctaatgaggagactggagcacagagaagttttatgacttgcctagagcaagtgggagaatcgagattcatttcaggagggctccttcagatcactgctcctaatcacta

SEQ ID NO: 96277 - DNA, 12496 bp, Homo sapiens
gaggagcccagaacctaggagcaccttaaagcatatcccctccatctgcctccccttgtccccaagctctgtgtccctagtctgagggatcccatagaccaatagctaaaatcttgagtacttactatgtgacaggcaggtttcacactttatacattttaactatttaagttaaaaggtatgatgagttaaaagaatgatgagcctgaaacctagtcagtttggtgttatgtttttgttttcttttgttttgttttctagagacagggtctcactctgtcacccaggctggagtgcagtggcgcaatcacagctcactgcagccttgaactcctgggcttgaggtgatcctcccatctcaacctccctagtagctgggagcacaggtgctagggagcttatttgtttactctttgtaaagacagcagtttggcttgagaggataaattcttaaccatgatgctataaataccacatctaaggtgactccctccaagcagtgctgaggcaactactaatggcaagtagtgactgttggaaattctgaatggtcaggcccaggaagactaaccgtccaagctgaactcatggcccctcaaccatcctctcacagagctgaatacataatcctctctcgtggcacttggttcattggattttggtcattacttattgatgtttgccagtttttcagtgatcagaaagtctccacaaaaatttctccctagaaaacaattttaaaaataaaactacacttcccaggcagatcccagcacttccctctcaaagaatcaagatgaaacctaatgaatatgggggtgtgacaacctagagcaattctgtgcagtcagtgtacaaaactggaagttcctacagccatttttagtaataaagctatgtggcatggcccagcaggtgcaggaaattaaaaagtctctctgggtgagttggggaggctcagggaggatttggaagagaaaataagagatggggagagttttacaagtggctccgttaaaatggaggctattaagaagagagcaattgagacagaggggtttttatatgtccagtgcattatgaatgcagtctctccaagccacagcttcaccctggcattttctcaagagactaagtaaataattaaaggacttgtaatactatttgtttgatgaaatatgtttctttgatcttgatgctcctaagactaaaacacataggttcccatttatatttatatgacttgtactggctctgcccattagcaaaccaaaagcttctcaaaagcagagactgtgctgtgcatctctgtgtctctgtctcctacgatcctagcactatttataagaacaagtcaacctaccaaatattgcacaaagaccctgagaacaaaggtgaatggaaaaaatcattactaaacctacaaggaggacatatactgtcttcatcaattattcagtccttactgagtcccactgcaatccagcccctgaagaggcagggcctcttcatgtataaggcatgattcctgactccagagagtttgtgatctggaaacagaacactttcattctacagcatccccttaattgttgagataaaaaatcatcgaaggaattctaattatgtaatgaaaatccaggttaagacatgctaaccaatcctcccactaaaaatagctagaagaaaaatgaacaacatgtaaaagcacattgttaaagttatcagagagtttataaagcagtgaaaaattatggggccaatatctggaagaaggaaattcagagaggtgagatcagcatttctgactgttgttccctggaggcatcttctgattccataaatggcagctaaaaggctgagaagctgagcagagctcacaataaaactcaaggaactaagagaacatgaagttcacgtccctcctattagaaagcgggtatacataaaatccatcagtgttgaggttggtaccacagagggctatacccaaagagtaagagtgaacgagaaatgaacagccctcacaggaactgaagctcaattttgaatcatcacaaccctggattgaactaatgatctggaatctctggtagccctaacctggctgccaactagaggcaaatataagttatgactagaggaaaataacatcaaccagagcattaaattattcctagaatgtttcatacacaatatccaaagtgaagtataagaaaaggaaacatctccaaaaaccaacagaagaatagagacaacagaaaccaacaaacagggcatctacataatagagttgtcagtcataaactttaaagtaatcatgtctaatatgttcaaggaaataaaacataagtttaagaatttcagcagagaactagcgtgatagaatgcaaaaataccatgtccttgcaatgtgactttacagctccttctgttatcaagaaatggggttcatttccctgtctcttggaactgggctggtcttcatgatgaaacgcagcaaaaatgatgttctgccagttctaagcctagatctgaaaaggcattgcacatttctacttgttctcttggaacctcatctggctgacctgtgaacaagcctaaaatagcctgctggagaataagatatcacatgatacagagataagccaacacagctaaggccattctaaatcagctagccctggcctggtgcggtggctcatgcccgtaattccagcactttgggaggccaaggccggcagatcactcaaggtcgggagttcgagaccaccctggccaacatggtaaaacctcgtctctactaacgatacaaaaattagccagrcatggtggcrcacacttgtaaccccagctacttgggagtctgaggcacgagaactgcttgaacccgggagatggagcttgcagtgagccgagatatcatgccactgcactctagcctgcatgacagagcaagacytaatctcaaaaaacaataaaaaataaataaatgaatcagccacccgtggccagtctggcagctgaccacacatgcatgactgatgcaagaggaaaccaaaagaaccacctagctgagcccagcccaaattgccaactagcagaatcactaactaaataggtagttgttttaaactactggattttggagtaggtcattatgcagcaatagttacctgaaattggattttttttaaagaattcaatgaaaattacagaaataaaatgtaaaataactgtaaaacaaactcaattgaaaggttaaaaaggccatttagatgccattgaaaagagaattagaaaactgttataaaatatccagagtgaagtaaagaaaaacaaaaggataaaaatacacaagaaggagtgtaaaagatatttgagatatagcaaaaacaaaacaaaacccctaaactaagtgtaattggaaagcaaggagacgagagaggaaagaggaactaagcaaaagagataaaagataagaatttcccaaaactgacaaaagccatcaagatagatttgtaaaatgtgttacaaaccccaagcaagatcaaaacaaaccgacaagctgggcacggtggctcacgcctgtaatcccagcactttgggaggcccaggtggatggatcacctgacgtcaggagtttgagaccagcctggccaatatgacaaaatcccatctctgctaaaaatgcaaaaattagccaggtatggtggtgcacacctgtaatcccagctacttgggaggctgaggcaggagaatcacttgaatccaggaggtggaggttgcagtgagccgagatcacgccactgcactccaacctgggcaacaagagtgaaactctgtctcaaaaaaaaaaaaagaaaaaaaacaaaccaatgaacaaaagacaacctctcaatacatcaaaaaaattatggaaaccaaagataaatagaaaaatcgtaaaatagccagagtgggggaaaactaaattcccttcacaaaacaaacaacttagctgacatttcagcaaaaataataaaaagcagatgatggaatggtatcttttttttttatttttccataggttattggggtacaggtggtgtttggttacaagagaaagttcattagaggtgatttgtgagtcggtgcacccatcacccgagcagtatacactgcactctatttatagtcttttatccctcactcccctcccacttttcctcccaagtcaccaaagtccactgtatcattcttatgcctttgcatcctcgtagcttaactcccacgtatcagtgagaacatacgttgtttggttttccaaggaatgatatatttaaagtgctgaaagaaaataactgcctatctagaatttcggtacttcaaagatgaaagcagacgcagtggctcatgcctgtaatccccgcactttgggaggctgaagcaggtgaatcagttgaggtcgggagttggagaccaggctggccaacatggcaaaccccatctcgactaaaaatacaaaagttagctgagcgtggtggcacgcgcccataatcccggctactcaggaggctgaggcacgagaatcacttgaacccaggaagtcaaggctgcagcgagccaagatggtgccactcccctcctgcctgggtgacaaagtgagactgtctcaaaaaatagtaataattttttaaatgaagctgaaataaagacatttttagaaaaaattaaaaacggaaagaatttgtcacaaaaaggcctgcagtaaaggaaataccaaaggatgttctttagatataaagaaaatggaaactcaggcacaagaagtgaaaaacaatagaaacagatgtaatttgtgacaataaaagtggggggatagagctgtataggagttttctatagtattgaggctgaattggcatcaattcaaactatattgttggaggtattcattgtaatacctgtggtaaccattgagaaaataacaaaatgtacagaaaaagaaatgagaagggaatcaaaaagatgcagcacaaaaatatcaattaaatacaaaagaaggcaataacggagaaaatgaacaaaaaaagacataagatgtataaaaaatatacagaaatagaaggaaatgtcatcattataaaagaaccaattaagtargaataaacaatcatcttcagtttctatgcatataacaagtttaaaatatataaaataaaatttgatagaactaaaaggagaagtaaatccacaactatagttggagagttttattacatctgtctctctagctgctacaagaagcacacaaaaaaatcaataaggctataagaatttgaagatcattaaaccaatatatatataaattatatataaaacaattctcctaacaattgcagaatacatattcttttcaagtgcacatgcaatagttaccaaagtattatcatatgctgtgcattaaaacaagtgtcaacaaagttcaaagtattgaaatcataccaattatgccctctaagcacagtagaattaaacaaaaaatcaataacagaaaaataaccagaaaatctctgaatgtttaaaacataagaaacatatttctaaaaacccatgagtcaaagaataaatcaaatgaaatttgggaaatatttagagcaaagtgataatgagtatcaaatgtgcaatatagctaaggcagtgtttagagggaaatttatagctttaaatttgtatattggaaaagaaagaaagtttgcaagtcaataatgcaagattcaatctcaagaaaccaaagaaaaagaaatagtaattcaaataatgatgatgatgatgataatccagagaaaggagaaaggagaaagtaaatgtaagagctaacttcaataaaataaaaagcaaatacacaatagagaaaattagcaaagccaaaagtaaattcattaaataaaagtgttaaaatgtatatacctggtgctttggaggtgccttcaccacctagagtctcttgctatcaaccgtagtcaaccccaccatgttcattaatatagcagttgaccatgaacccttggaccgtgtctccttggagctgtttgcacataaagttccaaagacagcagaaaacatttgtgttctgagcactagagagaaatgatttggttacaagagctcctgctctcacaggattattgcagaatttatgtgccaggatgttgacatcacacaccataatggcactggtggcaagttcatctatggggtgaaatttgatggtgagaacttcatcctgaagcatacaggtcttggcatcttgtccatggcaaatgctggacccaacacaaatagttcccagtttttcatctacattgccgagactgaatggatggatggcaagcgtgtggtatttggcaagttgaaagggggcatgaatattgcagacagcatggagccctttgggtccaggaatggcaagaccagcaagaagatcaccattgctgagtgtagacaactctaatctgatataaatcaaaagaccctcatttcagagaagttcctgcctcagattctagagaaagaaatgctacacagagagaccaagaagaatctgaacagacaggccttgctgggtttctccactcagcctgttagtatggaatcatacccttttcatccagtcacatttctacaaggttgttggtcatgcctatgaagtgaagtctccataaaaacccaagaggactgggcttggagagcctccagatagctggagattcctggcatgcagtgtgcccagggaaggcatggaagcttcgtgtcccttcccccataccttgccctatgccatctcttcatctgtatcctttgtaatatctcttataatagaccagcaaacataaatgtttccctggtttatgtgagccactccagcaaattaattgaacccaaggagggggttgtgagaaccccaactggaagctggttggtccgaagttctggaggcccagacttagaactggtgtggtggaggggtggtgttggggactgagcccccagcctctgtggtctgacactctctccagttagtgtctgaactgaattggagaacacccagctggtgtccactgcagaatacattattcagtttgctgtgaggagaaatccacctccctgcatttggtcacagaagtcttctatgttgatgattgttattattttgatgtgggagcagaggaaaaacatggttggagaggtttgttcaaaacaacaaacattcacatttgtacccatctctttcttttttttttttttgttttactttaagttctgggatacgtatgcagaacatgcagatttgttacgtaggtatacgtgtgccatggtggtttgctgcacctatcaacccatcatctaggttttaagccccacatgcattaggtatttgtcctaatgcctccctccccttgcccctcacccactaacaggccctggtgtgtgatattcccgtccctgtgcccatatgttctcattgttcaactcccactttgagtgagaacacgtggtgtttggttttctgttcctgtgttagtttgctgagaacgatggcttccagcttcatccatgtccctgcaaactcaggaacagaaaaaggattccataattacctcttttaatcaacattgtactggaggtcatggctagttcaacaaaacaaggaaaatagtcaaagggaataaaaattagaaatgaatatgtgaggctgggcgcagtggctcacgcctgtaatcccagcactttgggcagctcacctgaggtcaggagttcgagaccagcctggccaacacagtgaaactccatctctactaaaaatacaaaaattagccaggcgggtggcagtcacctgaaatcccagctactcgggaggctgaggcaggagaatcacttgaacccgggaagcggaggctgcagtgagccaagatggcaccattgcactccagcctgggcaacaagagcaaaactccatctcaaaaaaaaaatgaatatgtgaaactgtcattattcacaaactatatacctgtgtatataggaaaccaagaggactatatgaaaaattatttgagtgtagaagtcagttttgcaaaattgctagatataaggtcaatatacaaaaatcatttttatttctatatattagtacaaacagataaaaatgaaattttgaaaacaatactatttacagcagcacaaaaaagataaaatatatagaaataatttcaagaagaaatatttaagacctatacacctattgcaacaaaagattgctgagaaaaaattaaagagctaaataaacaggagactataccatggtttttattggaagacttaatattgctaagatgtcaattcttcctaaattaatttatagattcaatagaattccaataaaaattattgcaggttatttttatagaaattaacaagttgattctaaaacttatatgaaaatgtaaaagacatagaatagccaaggcaatcttgatgaagaacaaagctagaaggttttcactacctaatatcaagatatattgtaaaacttcagaaattaagatagcattccagtattgcaaggattgaaaagtagtcgatggaatataatagtctagaaatagaccctgtgtgtgggaaaaacactaactgtttttcctctggtttcacaccacaacaatcaacacagaagacttctgtgaccaacgtgtggggagtttcccacgtgccaagcaagcaatcagctcttcagtggacaccaactggatgtcctctaattcagttcaattctgacactatctacctgtagatatccaccagatgccaactgcaagctccagattgttttacctgcgcttctgaccaactagctataaactgggtttcccgttattccctccttgggttcaattaatttgctagatggctcacagaactcagggaaacacattcactggattattataaaggttattacaaagggtacctatgaagagatgcataggacaaggtgtaggggaagggatacagagtttccatgccttcccagggcgtgccaccctccaggaacctccgcatgtttagctctctgaaccttgttctttgggtttttatggaggcctcaataaatgggaatgattgaccactggccatcggtgatcaacttaaccttcaatccctctccttttcctgaaggttggggacgggctcagagtccaatattccaaccctgccttggtctttctggtgaccggcccctatcccgaagctgcctacaggctgccagccatcggtcacctcattagcctacaaaaagacatcacttcggaatttctaaaaattttaggaattgtatgccaggaaaggaggttgaaaaccaaatatatatttcacaatatcacacaaaccaacacatacttgatcttttcaataaatggtgcttggtcaaattgatatctataaggaaaaaaaaccttgatatctccctcatatcatatacaaaaattaatttaaaacaaatcataaatttaaatatgaaagctaaacctataaagcttccaggaaaaagcacaagagaatatcttctacatcttgagatagacaaatgtttccttttttatttttacattttaatctatttttatgtttattttgagaccagattatgagactggctaatttttgcatttttggtagagatagagtttcaccatgttgccaaggcttgtcttgaactcctgggctcaagtgatccacccgccttggcctcccaaagcgctgagattacaggcatgagccactgcacccagacaacaaatgtttctttaacaggacacacacacacaaaaataaatcactaaccataaaagaatattgataaattggacttcactaaaacttagaacttctgtttggtgaaagacaacattgagagagtgaaaaagcaagccaaagactgggagaaaatgtttgcaatacatacatttgaaaaagggctcatatccagagtatataaagaattccatcaataatagactgatgacaataatagactggaaatcaataatacactgatgacaataatgacaaaaaaagcaacagacttgggcaggcactttaggaaagagaatatccaatagccaataggcatgcataagggtgcccaacaacattagttatcagagaataatgagatttcacattcccaccaaaatagctaacatttaaaggtctgaaggctgggcgaagcggctcaagcctgtaatcccagcactttgggaggccgaggcgggtggatcgcttgaggccaggagttcgaggccagcctggccaacatggtgaaaccccatctctactaaaaatgcaaaaattagcagagcacggtggtggcgcctgtaataccagcttcttgggagtctgaggcaggagaattgcttgaacccaggaggcagaggttgcagtgagccaagatcacgccactgtactccagcctgggtgacagactgagacttggtctcgaaaataaatgtaaataaataaatgtgaaaattccaagggttgacagagatgggagcaactgagattctcatttattgctagtgagagtgtaaattggtaccagcactttggaaaactattttacggtatcttctaaaactaaacttacatataccctttgatccagaagaatttgtacacaagaaaatctgggccaggcatggtggctcatgcctgtaatcccagcactttgggaggtcgaggcaggcggatcacctgaggtcaggagtttgagaccagcctggccaacatggtgaaaccccatctcaaaaaaaagaaaaaaaattagctgggcgtggcagtgcacacctgtaatcccagctacttggaagactgaagcaggagaatcacttaaatctgagaggcggaggttgcagtgagccaagatcatgccattgcactccagcctgggcaacaagagtgaaactccgtctcaaaaaaaaagaaaatctggtgtttatatccactaaaaatatgtacaagagtgttaataatggctttagtcataataactcaaaatgagaaaaaacccaaatgtctatcacgattagatgagcaaataaatcgtgttatagtcttataaggaatattacacagcaatgaaaaagaaaagctacttttcctggcaataatgtggatggatctcaccacaatgatgagtattaatgaagctagactccaaaaagtacatagtgaattatttcactgatataaagtttaaaatctggaaaaactaatatatggtgagagaggttagaatgtgattacccttgcaggaggggggttatcaacttgaagggccaaaaaggaatgactgggtgctagaaatgtgttacatcttgatgtgggtagttttgatatgtacttacacatataaaagttcatcaagctgttgatttaaattttgtgcacacagctgtgagttgtatcttggtaaaaaagcagaaaaagagtaatgactacctctcactcaactgttctgactattaactaagatgtactttgataaaagcaaaatatgacttgcccattgtggaaacattaccatagcaagtgaatttgtagatttcctcactcatctcagctaaacccaactcttagctaaatatcagaaaagcctgggaggcaggggttgcagtgagccatgactgcaccactgcaccccagcctgggtgacagagcaagaccctgcctaaaaaaaaaaaaaaaaaaaaaaaaagtgaaaaaggaagatagacctaaaacagccaactgaaatgcaatatggaatgtgctatggaggtgtgcccagggtgtgaggcaagcataaggaaagcatgttttcctctgccctgcagagttaggagtggctgcccagaggcggtgggtgggagctgccattgaaagaaaaagccaaggcctgcctggtgtatgcagaaaggaacagggaaggygggtattatggacmcagcagtagcatggttaagggaacacaaaacacacgtgtggcttatgggtctggtaaagatggagcaggtttggagaatggggtgatggaacatgagtttaattttcaggtgtttagtggtggtttcactttatttttatcttttataaaattgtgagaggtagcacaagtattaaaaggtacttaaatataaatatacggtgtaatgaaaaataacgtaaactcccatataatccaccagtagatcagaatgtagagcgctatgtagaagaaggttgttctctgctattataaaactgaataggaatcacacaggaaaatggttaagttattgtctagacttctttgtttgtttgtttgttttaagacagagtctcgctctgtcacccagactggtgtgcagtggcatgatctcggctcactgcaatctctgcctcccaggttcaagtgattctcctgtctcagcct

SEQ ID NO: 96278 - DNA, 12716 bp, Homo sapiens
acatatacatccaatgtgtgctcaccttgcacatctattcacaaatgacttccaaaagacaactgctttgatatttaagcatgtgctcaaagttatcttagttgagatttgaaaaatgctttaaacagataacattctgagtatattggattggtcacagcagaatttactttagttagatgagttctacaaatttaaagctttgaaaagctactacttttcccatccagatgaatacgatgcagcaatatcagcttgtattccagagaaatctcattaagtttttctggtaatggaaccacttatccacatctgttggtaccgtgcaggcagattcacagggtggtggtaaagcatccacaatggctctggcagcatcaggatcacacttgaaggggctcttggacacagttgtattcatgcaactgattccttttacattcattttcttagtcactaatgctttccaatggtcatgagtggttttaatagtatcaatggcaaagtccttatctttaaattctgcattaaaagcaaactcatttctagttttccatcaggaaccttataccttctaacccagtccacagtagcttctaagtagccaggtttcagctgtttgacatcattgatatcattacaattggctgcatcaggatcatctacattgatggcaatgactttccagttagtttcccctttgtcaatcatagccaatatgcctagaactttcatgccaattatttcacctcttgcacataccttgcttccaatttcacacacatcaattgggtcactgtcaccacaacagccagtatgttcatcattgtgccctgggtctttccaagtctgagggatggcaccatagttccagatatatcctttatacgggaacaaattcgcaacataacgaagtttttcttttttcacatcttgtttaatggggtttaaagggtcctttgtagcaatctccatttttgcattagacagcgtggtacttccaaccaccacgtggaacacatccttatctgcataaattggaatattatgaaatggagatatatattgtcctttctcatttttgaggaagactcggtactacagggagaagggtgcggtgtgcacttcggtgctgaagccgctcattgcgccagagtccagccaccgccgctgtcacagagccactggccccgcaggcgttgccgactgacaaaaggagagagccctgcgcctgcgcgctgcaagcactctatagcaccttttttttttttttaaatccaatcatctgttgatggatacataggttgatgccatgactttgctattgtgaatagtgctacaataaacataagaatgaaggtttttttttttgatataacaatttctcttcctttgggtagatgcccagtaggggggttgttgaggggggttgttagttatttgagaaaagggaatacttctacactgttggtgggaatgtagattagtataacctctatggaaaatagctggagatttctcaaatagaacttccttcagtatttaataggcttctgacctaattgcttctggtcagttctgtagtcagatatttggtaatagagatcagattcataatccttgagtttggaaagtagatcttttgaggataggtattggttcatgtgcaactggccataattttccacccacttttgttttgaaacacaaatatcttagatcatctcactaatgcgtatgactagctaggtcttgtttctttgccttttcttgaaccaaagcttccactaggaatacccactgtgatctatatccatagtgcatgcttgccaagctgtaaaatcaactgtcaggcaaagttggaagggtaaatccccagccaccagtgctcaactactctgccctattgaggctggcgtcatcttggctgactgtatgattgcgggccttatattacctttatctttcttgcccaggttgatgggagcagtttatagacagaagaatgcctcatgacaatatgtcgatcaacaaaatgggcacctgaactatttaaggcattataccaggcatcatcccctttcattgccattgctccaacactagctgaagtttgagctgctctataagacttttgtaaaggtctattgggagaaaatatgaagacaggcccaggcatttatagaaaggctttattttgtatccattttcacacatcacccagacaaatcatgaattttacttttccaattttcatataaaactacatacaccgcactgtacatgtaaaacaaatttggaaaggagcctcaagctggcctctgaaattgtgtaagcaattatcacatttttgtgcgcaaatgcagtaattatatgtgtaatttggcagctgggtttgaaaatttggccttaaatggaacatagacaggaaaaataaatgttggaaaatgccaatattttataaagattttgaatcaaataatggtggaattattgcaagccatcttaatttttaattataatgatcattacacaatatacaataattttttgaggaagaaaagaactatagatcaattgcccatagtttttgtcagaaaaaaatgcctaatttctttgggaggataattgtatttttcagaggttatggtacatatttcaaaagcttttttttcttataaagaaaagatagtgattgcctagtagttcaagttctatgacatattttactatgggaagaatagaactctttgtactgattagaggaaaagtagtattaagtctgtacttatatttgagctagtaatcttaaattagataaagctttcttataagctttaagctttggaatataagattacagcctaaatgaagagtaatttagatttctttgatctagatttaaattgaatttacatagtaaaatcatagtttttatattgtcatcaagattgactctaatgcatgtgctttttcatgtggttaggagggctagggattggatttaatataaggatggctgtggagtagtatcttctattcttagcagggtaatggagaggttgattttgcaggttctgtagtcagccagcctggattccaatcctggccttactactctagtagccctttctgcacctcagtttcctcatctggtaaaatgggagtggtaatatgtccatcaaatagaggttttgtcaggactgaatgagataatcatctaaagcactttgtacagtatctggctctggtaagacctcaaacatggcaagctttttttttttaaatcatcatttgctttcagtgtttaaattgcaatcatgactaagtgatcagaagagattgtgcaactcagaaatgcaatctgaggggaagagaaagccagtgagtgacccaagtatgtggaaagttctcaagaaattcaggttcttcatgatgaggtagtgtccccaatagaatgataaaggaagaagacagtgtgggctgagctcagttgtggaattttatttcaattctgtatctagcaattacagccttccaggcccgtgctaagctagggtataaagaaagattaagcaagtctctctctaggagcctacaatctttagaaggaattagataagtacgcaaatggttataatgcatgatgcaatacagtccagggagaaatgaacaaaaaagatgccatgggcattataaaaaagaatgggggaaaaatacgtaggttttttttttcactaagattctgcaagttttcttagaataggtaacttttgaggtaggcatcaaatattgtaaaggttttggttaagcagacgtaattgtactggggagaaattccaggtgaagaagaggagagaagagaagggtgcacccaagaatacctggggcttccaacgtggtgaggagtcatggacacaggccattaagggaggcttggctgtattaagggaggcttggctgtatttggaaagcctttaaatgatatggtgagaaggctgcttcaatttcataagcagcaggcagcttttaaagaggagtgttttgatttgatctgtatcatgccttagataatcactttgagatcttgttaaaacccatattcctgtccccctctcccagagattctgattcagtaggtttagggtgaagccccagaatttgcatttccaacaatgtcacatgttacactgatgctgtgggttcacaaaatacatcacaaatagcactgccttccaaaagttttgtttgcatgtcccattagtagaagaattttgagtgtgtatcctcactgtatttttactcatttgtaagttatagacaaactaccatgtcaatatctattatgtatatcataaaacctataccaattataaccctaaaggctgagctggctgggtgtggtggttcatgcctataatcccagcactttgggaggccgaggcgggccgatcatgagatcaagagatcgagaccatcctggccaccacggtgaaaccctgtctctactgaaaatacaaaaattagctgggtgtggtgtcatgcacctgtaatctcagctactcgagaggctgaggcaggagaattgctggaacctgggaggcggaggttgcagtgagccgagatcgtgccactgcactccagcctggtgacagagtgagactcagtctcaaaaaaaaaaaaaaaaaaagctacgctaatggtaatcatagctttatttttatttaaattattaatagtacagaagtttttgctctcactaaaattataattatatttgagtatgcatcactattttacaaacttttgttaaaaaaattctttggcttttgttaaaacattcaaatgtgtttctcaattcagcttttcagcactttgttgtaatggtttttgcaactaaaaaacatgtctcacaaagacgcataaatccaaatggaagaatttccttactggctgttttaagtaattcccattcaccaaatttgaaaatgcttatgttaaaatttggctagtagatttccatcttctttgatgtcaatcagtagttcttacagacaattaggcaatattactgttgttttattgttatcaaaatgcgttcaaattccactgaaattttttgtttagaataattttaaactggtttaaaaatcttgcttccaactttttagaatgtactaataggagatttaaaaaaattgatgatgattgcatttatcttgtttttgcatctaaatcacatctgtattcccagctactcgggaggctgaggcaggagaatggcgtgaacccgggagacggagtttgcagtgagccgagatcgcgccactgcactccagcctgggcgacagagcgagactccgtctcaaaaaaaaaaaaaaaaaaaaaaaaaaaaaatttctagttcattattgaaacattaactttcaccttgaagggataagttttttttattttttattcttgccataccaatagctgtttttaattttttagaggaaatactataattaaaagagttccaggccgggcgcggtggctcacgcctgtaatcccagcactttgggaggccgaggcgggcggatcacgaggtcaggagatcgagaccatcccggctaaaacggtgaaaccccgtctctactaaaaatacaaaaaattagccgggcgtagtggcgggcgcctgtagtcccagctacttgggaggctgaggcaggagaatggcgtgaacccgggaggcggagcttgcagtgagccgagatcccgccactgcactccagcctgggcgacagagcgagactccgtctcaaaaaaaaaaaaaaaaagagttccaaaaaatgttaacagttccagcaatgattatttctaaaatgtaaagatttgaaacataatttatacaaagctaaaaaccagaaggattcattcttgctttttccttttttttaaaaatccagacaatttgttacaggacagttcagcatgtgatagcagctgcagcctcagtcaccctcagaattgcagtccctccccatggggacagagcgccgcactgaggacagcaacatgtgttcaatcggcttcttagggttttcctccaggtccatcttaattgctccagattcagacagtttccgctccaacttatctcttgtcaggtgcatgccaccagacaccagaggaccgataaactgagccttgatatctccttccaagaaaacaaatattgtgggcagattcctatcaggataattgggtatgcaggttgttgaaatggctttgataaatttgacatcaggaaacttcctggcaagtctgctgaggtgctagtttatcagggcactgaggggaattccttgttggtaaaggtgcaagatgacccagaaaccctcaccggctttggtagcttcttgaacataatccttccctgagatctccaaaacttctccaaatgtattcttcagtttagatgctttccactcaactagtctctgccgtgtgtacatttcaatagcacgttcgtcctcctcattaaactcatcttcatgatcttccagctctttcaaagccytatctttatatgttgtcaccactgactgctggaggatgcgcttctcctcttccacctcattttccaattctttcagactttccttggagggcaagataccctttttggtaagatgtcattccactcagtgtctgcgttggggtcctgcatcttgtttccaatcgctcaagccagttgctccaccatgtttattaatattaaaaaaatacttgagaggtagcatgcatgctatggatagcccccttatcatcacagacaaggttagcatatttggaacacttgtctattttgtaaatatatgtttttagttctaagttttaatactttgccacaagcaaacctctgtgctgtagaaaatacatccataagtaaatataaattgagaggttaatttattctctcaatttattttaaacaattaaattaactatattttaaagttttttaaaacataaaattaactaaactgatgacatcttgcagtattttgtgcacttctggcttcaattccttagctgcaaatggttgcctgtatatagcaggatgtcacatgtgatctgtttcaggaaacttagccaaatccttttaaaattttggtcaagggagtcgctctgttacttacacagctttactgttaaagaagttatttactcctgggaatacatcttatctgcatattttacctttggcggtttgaaaaaagtacagttcttcatacattttattattgaaacacaacctagtgaaaatcatatgctgagacttggtaaaaaagaaatatttggacccattcaaattacataacaaactttgtaaaacagtagaatttgtccaaattcttgattaaaaataaaatctcaggaatggtttctataaatcttatgaaaatggattccaattccactgaacttccttgtttgaaagattttaaactggttaaaaaatcctgtatttgttgacaaaggtgtccattttagtttgtaccaaattattttgaatgtattattttaacattcaccaaagcaaaaaattagaatttcataataaaatgtagccttttgattttcactgttaaaaggaaactttacggttgggcgcagtggctcatgcctgtaatcccagcactttgggaggctgaggtgggcagatcacctgaggtcagaagtttgagaccagcctggccaacatggtgaaaccccgtctctacttaaaaaaacacaaaaattagccgggcgtggtggcaggtgcctgtaatcccagctactcaggaggctgaggcagaattgcttgaacctgggaggcggaggttgcagtcagccgagatcgcgccattgcactccagcctggaggacaagagcgagattttgtctgaaaaaaaaaaaaaaaaaaaaaaaaaggaaactttacatgtttagtgaaagcttttaaagtaaagggttgagttttacttaatttaaacatctttgaaaaattgcacaggcttgtgtctatgttttagagtatattatttctcttttttcttatttttgaagtagtttgttaattgtgattggttcatgttatcattaccattattttaaagcacagttctgtatatgcatactataatcattaaccaatatgtcaagatgcaatatacacataggatgaaactgttaatgaaaatatatctaaatccatattttaaatggtcttctagataattttgaatttttaaggccaatttcttattactgattttatcttatagtgtgtttgatcaagagtttatactaggggtagtaaatagattgggtagtaaatagattcaataaacaatacagttttccagaaacaaccaagaaataaaatacatgtctgatctcaaggagctttaaattacataaagagacaggatgtattctcatgaagccattccaggagagttacaaagccatggattactgatttgggcaggactgtaaactgaggagtatgaggaagaggtaggcttgcttttcccatggaatcacttgctccttgatgaataaagttgtgccagactgattcatttctgttgactaagtcagcttcatccagtctaataactcagaggagaatatagtaagacccaaacactttaatatgagtgagttttaaggtattttataattttcagggtttttgtgaggatcaaatgcctaccacattgtctggcatattgtatgtgctcagcaattagtacttattattgaccggattaggaagaggggtttggatgtgggatggaacagccttgtgtgtatctctgaggaggtgtgtggtagagaaagggctaaaacattctgaatctattttaggatattatgcagttctgtgagaatgggtaaaatgcataaagtatactcttaagggtgtatgtgcactatctagggggattgaaaaaaaatgactggtatggaaggaaatacttacgttactagggagcctaattagggaaagtgggttttaagaggagttgaactttgagttgagagataaccaatgaagttaggtgaaatttaggagagtgagaagatcaggaaatattccatgtggaaacattgacataaaaaagtagatcatgaataaaaacctgaactccttaagtttcttttttttgaatgtaaaatggtgcataattccacacaggcaaacaaaattctcatttattcattgtctaaacacacacacacacacacacacacacacacatatttagagacagggtctccctctgtcaccaaggctagagtgcagtcacatgatcatagctcactacaacctcgaactcccgggctcaagtgatcctcccatctcagcctcctgagtaactaagactacaggtgcatgccactctgcccagctaattaaaaatattttttttggtagagatgaggtctcgctatgtttctcaggctggtctcaaacttctggcctctagcaagccccctgcctctgcttctcaaggtgctgggattactggtgtgagccaccgtgcctgaccctaaacccatatttattaaatgcccactatgtgcaagtcaccattacaggcattggaaaacagcagtgagcaaaagaaatagtctctgctgtcatggagtttacattctactggtggcaatagacacaaagataagtaataaacagagaagagaaataaagcaggatcagggttttgagtatagcccgattgtgtgtgtgcgggtgtaagcatatcttagattccctaaaacacagagcctgagatacaccttatgtcctaaaaaatcttaggagatgtggttccagggcagcaaaggtaggggaaaagggaacataaagcagtgaaatcagagaagcaaataaaaggtggcgcatttggtcacagccccagaaggaatagttggctgcttggtcactaaggacatttccagagaggctatatggagctttatgctttaaaactgtctgctggagggaggaaaggagagaagtttatgttgctttcttcccaccttttgtttctcactgatcaaagcttccctaacacgatgttccacttctggtttttgttatctggtctctctgggaagctactggggaggccggaaccttcatgggccaagttggtttggacctggactcaggagctatagagggctgactctctctgcacggggaaagccgactcagccagcagagctaagagatgagcagatgaaggtgtcaaccaggggtttgatcacaagaattgcagagctttaattgcatttggtggagctactccatctaggaagtagggcaaatggctgatgtctgggaacaggtaggacaaatgaatctgaggaggcacataaattggatctgttatatgaactcttttctatggtggtcagacctctcggataaggtgctacttgagcagagttctgaagtaagtgagaaggccaaccagatggatatctggcagaaatttattcttggcagagggtatctcaagtgcaaagagcgtgaggaaagaataggaggtggtatcatagagtatttgaggagcagaaagaaagctagtgtggctagattggaatcagttagggaaagggtgatagaagatgaggtcagaaaggcaatggggtcctagcccatgaagggctttctgggccatgataaggtctttggctttttattcatagtgaggtggaagccactggagatgttgaagcagaagaatgacatggtatgacttttttttttttttttgatggagtctctctctttttgtcactgaggctggagtgcagtggggtgatctcagttcactgcaacctctgcctcccaggttcaagcgattctcctgcctcagcctcctgaataactgggattacaggcacctgccacccatgatgggctaatttttgtatttttacaagagatggagttttaccatgttgatcaggctggcccgaaactcctgaccttaagcagtccacccacctcggcctcccagagtgccaggattacaggcgtgagccactgcatccggctctgacttctgtttttaaaggaacattctggcttttggtagaggatagtttatggaggagtaaaggggaaaggtgggagaccagcttgaagactctaggatcagatggcggctgttgagatagggagacaatggattctggttacattaaactagggctgttggtgtgaaagaaagagagaacttatggatgatttcaagagtcttggcctgatcaacttgaagtaaagaaatgagtctcactaaggccaagttcatttcctttgataggaacttatctattttgccaataagaagctgtcgctgagcaggatcttcccttgtaaaatattctgagttgaagtcacacataatgcataatatgttcaattaatttatgttttagatccactgggtataagtcaattgaaatttaaaattttcattatgtgttaaatctagttatagtatctctgtcaaagaaaaaggcagaatttagccctaaaagtaataaattgcctaagcggtggcaattagtgtgtgtggtggttgtgtgtgtgtgtgtgtgttggttgagggatgatgaaatgaatttatttttagtagccctacaatgaaagggaggcaggaactcccatataatattttagattgcttaagatgttgtcatgccagttttcattgttattgatgctaaacactctaagaatatctctggctcatacaaaaggtcctgaatatttcaatgatatatgaaacaaaaaggcttcctagatgtctgtgaaacaacactgatggcttcaacgaatgcagtggtaagcatttattacagcacctggaatgcagttacctggttgctttttgttccattaacaagttgtgaaaaagtcttgatggagcttttagctgtaaaacatcttagagcgtaatctgtttttagaagattaattccatctgaaatagagaagcaaatgataaacagcttaaaagacaccagagaaatagatcgtgttacagttgaggacaataatattattccacatttaagaaaatttttagcaagagaaaaaaaaacctgaaaagaaccatgagtttagctgtgcttattgcaagaaattagttcggatatttttgcaaagacgtgttaaaggggaacgaataattaggacttttctcagctaaaaaaaaagaaaagacgtagaaaatgttattttaaaaacatttttggtttatgtaattattcgaaagctccccttagaccctaaaaacaaaaacaatcctccaaactttaaatttatgatttatttatttacttatttttcaatctgaactttctgaaaagagtgactgcaaactcgagtgaatcctgatgtctagtcaagaacaatacagatgagacttcactgacagaagttctgcttgggacagacaaatactttattgataaggagatgaataattcgatgtgttctctgaatctgcagggaatatggttagattacaaaattttatttgtttttttttttaataacagaggtcaatgcgcattgttgtcagcaacatcagtaagaaggaagtaccacatcagctgtaacccactacagctgaacaggagaaactgatccaggt

SEQ ID NO: 96279 - DNA, 12749 bp, Homo sapiens
ttcgggtccaacctgggcaatatagcgagaccccaacttttcttttcttttttttctttttttaaaaagggtgaggtggggtgggctgggcgcagtcactcatgcctgtaatcccagcactttgggaggccaaggtgggcagatcacaaggtcaggagaccgagaccatcctggctaacatggtgaaaccttgtctctactaaaaaatacaaaaaattagctgggcatggtggcaagcacctgtagtcccagctactctggaggctgaggcaggagaatggcgtgaacccgggaggcggagcttgcagtgagctgagatggcgccactgcactccagcctgggagacagcgagactctgtctcaaaaaaaaaaaaaaaaaaaagggtggggggggaatcggctagtaatgcagccttaaaacaaaaaaagaaaaaagtttaaataaataaaagggtcaaaatctgtgtaagaagcagtagactcctaaatttcctctctgactctgagcaaccaggctactactctcccaccataacagaagactcaaggtttactgtggaaagattgaagtaggtggtctctggactcttagacaacagactcagctaaagacaggagtatcatgctgaaaaacaagagattaaattaaaacctacatacttagttgtgagatccatcccctggcttcattccctgaactggctttagaacactggcagtctagcttataacccccaggctgactagagaactcaaggtaaaagcagcccaagaaaaacagaccaacagaaaagcaatgagagaaaggatgaaggttcccttctcgatgatccattaaatggaagagtaacccaagaaaacatcatggaatccaagaatcagtggatccagcacaacaaagaggcaaagggaattccctaggacagtgtttatggaatcccatgacagtaattatccaacagacctagcgaaccaggccagactggagcagggaaatggagggctcttgggatacatatttcctttagccaaaaaagaaaacaaatcaccagtctgaacaatgaggatatttacagtactgagatttgagggtgacttattgtggatacccagaaaacaaaatgttaaaaaaaaaaagaggtatttgattaccaacaggaaaaaaaaggttccacaaaattttgttttaaaaataaaacttaaatattagtaaaactacataaagatttcaaaaaaaactaggtgacattatttgatatttttgagccagcaaactggaaaacagtgggttatgatcacagcagaatgtctgaatcagtgatttggaggtgtggtgacttttttttttttttgtacaatcttgctgtttcccaggctagagtgcagtagcgaaatcatagctcactcagtcttgaactcctgggctcaagggatcctcctgagtagctgggactataggcaaatgtcaccacacccaactaattttcctatttttttgtagaaatgaggtctcgctatgttgcccaggctggtcttgaactcctgggctcaagggatcctccaccttggactcccaaagtgctgggattacaggcaagagccaatgggcctggcctggctggcaacttttttgttttttttgaaatggagtcgcgctctgtcgcccaggctggagtgcagtgacacaatatcagctcactgcaacctccacctcctgggttcaagagattctcctgcctcagcctcctgagtagcagagactacaggtgcgcaccaccacgcccagctaatttttgtatttttagtagaaacgggttttcaccatgttggccaggctggtctcaaacccctgacctcaagcgatccgcccgcctcagcctcccaaagtgttgggattacaggcgtgagccactgcacgcccagcctgggtggtggctttttagtaaagacaagatccagggtgtgattgtgtgaccaggtggctaaagagaatgaagaggtaaaggaatcagaaggccaaagtgttagctgaactgtcaatccagatgctgaagttgcctaaacgtgatgtgttactgctggatattttccagatccacttttccaccctcctctatcatgttttctgctccaataggctgacctgtatagactttaccaacaggtcactgtgcccctggcttccggttgggtttggccaatggggaatcccagcaagaaattaagagaacagggtcaggatattcattcctccagcttcattctctcaaggtcacctgaaactagctatgtcccttcggctgaaagtcaccattcctctcaaggcagccaactccatacttttcaagtaactattccctcttttatgggatgttaaccgttcagctataggttaccaaactatttcttgtcacaccactatacctaaatctttataatagtatctttataaaataaactcagattatcctgtcaagtgtgccatctgttcctgtctggactctgactattaactgtgatggtgaagatgatgtaaggttgtaatagagtattggaaagtaaggagagaaaagtgactaatacttaaataacaattgctaacattttaatctctatgttccaagaacttttctaacctcttcgtagaatattaactcatttaatcacaactaccttctgtggtaagcagagatttttgtctggttcatttccaaatccaaacacccagcatagttgctggcacatggtaagcactcaaatattgatttaaaatacacacaacaagcaggtttaattagaaagagattacttttttagtatagtgtagcacttctcctaattacactttagaaaactatacaaagatcagggaattgttgactctccagagatcacagaaacactaaatgagaccatatgtgaatgattttcttgtgtagcctacagtgagtcgtattcctttattttctgaagaggacttgggtgccagttttttaggtttaatattcaaagtcaaagttgcagcggggggcgatggctcacatctataatcccagcactttgggaggccgaggcgggcggatcacctgaggtcggagttagagaccagcctggccaacatggcgaaaccccgtttctactaaaaaatacaaaaattagctgggtgtggtggcgtgtgcctgtaatcccagctactcaggaggctgagacaggagaatcacttgaacctgggaggaggaggttgcagtgtgccgagatagcaccactgcactcctccagcctgggcaacagagccagactctgtctcaagaaaaaaaaaaaaaaattagtcgggtgtcagggcaggcacctgtaatcccagctactcgggaggctgaggcaggagaatctcttgaacccgggaggaggaggttgcagtgagctgagatgggaccactgcactccagcctgggcgacaaagcgagactctgtctcaaaaaaaaaaaaaaaaaaaaggcaaagttgctccataccaagaccagatttttaaaaagtcaaagttgcaaatttttaaatattatgcacttgcagcctaggagctgatttaataaggcagagcacctttaagtatcagttatgagttaaaataaagggaagggggccaaaaaaaatatggttgtgagtataaaatgcaaaaataaaggtaaaggtgagtattttgtcagcctgtaaaaaaagcctctttagttttcaaagtacttaatttttaaagtacatcctacattagaacctaagtcagccagataaccaagaatacacatttacacagaaatgaagcacagcaaaggtgtgaaaattagggcaggaagcataaaacatgaatcaaagaatgcagaaatacaacagatataagctacaattaaatatctcaccggatgcacatacagttttatatggaataatcaaagcagcagtgatacccatcttataaataaaaatctaaaagccagagaaataacaaggttagaggattaatatgaaacaaaatgagaactccaaagattttctgaaagcagaattactgttttttcttcatattatgttgccactccaaagcaaggggaaaactcgcatgagtaagaatctagaaacctgagaagtttcgagaagaacagactcaaactggagtgaaaataggcaaaaagagtgaggcataaggctacgactgggagcaaaatgccagatgcaagtcttggacacggaggggagacgaataaagccttcttaagcggaaggtggagaaacactggggttggatttggtgggaggaagacaaaacggaaaagcacggcccaagaagcaacggcaaagggagaacttaaacaagattagattgatgccacaatcgaagagtataagacctacaaatcagattctgccgggtggggaaagggccagwtcgcgaccgatcaggtgcgactagtttcccaaaagcggcaaagatgtagcttcgcagccccaccccacgacagcagctcctccccaaggaggacctcacgaggtcaactgccgggctcaggttctcccccggagcctaggttccaccccgycccggccgtgcggcacagaactgcctctctgggcccctcaccgaacgctgcagctccccaagccaaaaagaggcgcgctcctttccgctgggatctgggtcgtggtaaagcgcctgcactgcctggtacacgagctgcaatgtcggctttgctccttccatggtggtggcggtagtggcggtagcgacggctctgattcttctccggaggattcctcggttgctccgccttcgcgcttcctcactgtctgggccacggccgctccctgactggcgccatctcctcctctttggccgttaccagggcagaaggbtctccgtggaagttgccccctcggaaacagctattaggtcgtattcaggttcctggccttttttccggtttttccacttgattctagactcttgagtccacagattctggcgctcccgtcttcagtcgctgacttgccctcagaagcctatcttgggaggccacacaccagtgtacctaaggttcgtttacccggaccggaagcgacagcaccgatacctttggcacacttccgcctggtacactacaaacggcctccttcccggcacgcctcctcttgtctccccgccccctcccggaagtraccctgccgggccaggagccgggaagaagagccggtgttctctctgttcctcgctagcagcttgggacattagcgccgagatgtgccccatatctgagctgccttcagctccttggaaacggatccaggtttttcctaccccttccgactgccccatccctctccagagaatccttttctgccctggtgatcaaggcgcgtcaattcaactctccctagagtggccacagtactggagatccaaagatgacttaagacatggtacctacgctggctctagtggaggagacagacacgtagtcaactgaactattttacaaacctgaaatatgtgccacattgagataaatccaaaatgcctagaatctttgttcagctcccctttacttagttcttaagcccaaaagaggtcttcattctgcttacagctcctggtgctctaactccagagcattttgcatacatctttagggttattctcacattgaactgtatttttgtgaatgcctttctgtccgaatccaataccagtggtctaacaattcacaaaagaaaacagaaatattggaaactgtactatggagaaattagggacaaaaggtaacagtatattgatattaacattgctgctagtcctttgcactagtaaataactgctatttgataaatgatcacaatgtgtaaaacactgtagttacaagatctcatttaatccgcctaacaaccttgccaagtattaataaaacccgttttaggcgctgacactgacctacagcgcctcagctccagcgccatggcgccctccaggaagttcttcgtggggaggaactggaagatgaacgggcggaagaaatgtctgggggagctcatcggcactcagaacgcggccactgtgcctgccgacaccaaggtgatttgtgctctcgccactgcgtataacgagttggcccggcagaagctagctcccaagattgctgtggctccgcagaactgctacaaagtgactaatggggcctttactggggagatcagccctggcatggtcaaagacttaggagtcacgtgggtggtgtggtcctggggcactcagaaggcgtgtctttggggagtcagatgagctgattgggcagaaaagtggcccatgctctggcagagagactcggagtaatcgcctgcattggggagaagctagatgaaagggaagctggcatcactgagaaggttgtttttgagcagacaaaggtcatcgcagataatgtgaaggactggagcaaggtcatcttggcctatgatcccgtgtgggccactggtactggcaagactgcaacaccccaacaggcccaggaggtacacaagaagctccgaggatggcttaagtccaacatctctgatgcagtggctcagagcactggtatcatttatggaggctctgtgaccaaggcaacctgcaaggagctggccagccagcctgacgtggctgccttcctcatgagtggtgtttccctcaagcccgaattcgtagacatcatcaatgccaaacaatgagccccatccgtcttccctacccttcctgccaacccaggaactaagcagcccagaagctgagtgactgcccctcccctgcacatgcttctgatggtgtcatctgcaccctattgtggcctcatccaaactgtatcttcctttactatgtataccttcaccgtgtaatggtcgggaccagaccaatcccttctccacttactgtaattgttggaactaaatgtcaccaatgtggcttctccttggctgagaggtgaaagggatggaatttgctcctgggtcccctaggccctagtgaggggaggagagagaacccatcctctcccttcttacactgtgaggccaagcagaagccaggggtgctgccctctcccacggtgccaacgcctttgtgtgttgtgtatgtgagccatcccacatgtgagggaaataaacccctggcacttaaaaaacaaacaaaaaaacgcattttaaagaaagaaaaatagtaatgtaatttgcccaaggatacagttcttaaagttaggatttgaatccagatcagtgttgctccaaaacctgttaaatcacacaatccctatcatcttgtgcattcgtttgcttctgaattgttagtcaaggaatttttaactgccaacaacatgatgaaaacaatgttactgcacagagttgatacaattttagacagaaaaaagaaacttgatattttggttacctaatccattcattcattaaaaaaaaatttagtgctgggcttggtggctcacaactgtgtaatcccggcattttgggaggccgaggcaagaggattacctttgaggccaggagttcaagaccatcctgggtaatgaaatgagactccatctctacaaaaaaaaatgcaaaaaaattagcagggcatggtggtgggtgcttctaatcccagctactcaggaggctgaggtgggagtattgctttagcccaggaggtgggggttgcagtgagcagagattgtgccactgcactccagcctgggaaacagtgagaccatatctcaaaacaaatttttttgtgtgtatcaaaggacactatcaagaaagtgaagtaacagtccacaacatggaagggaatgtgcaaataacatatctgataactgattagtatccagagtatataaagaactcttacaattcaacaatgaaaagacaactcagtttttgggtttgttttgtgtgtgtgtgtgtgtgtgtgtgtgttttgtttttttgttttgagttggagtcttgctctgttgcccaggctagagtacaatggcacaatctcagctcactgaaacctccacctcctgggttcaagcgattcttgtgcctcatcctcccacgtagttgggattacaggtgcccacaaccatgcctggctgatttttgtatttttagtagaaacagggcttcaccacgttggccaggttggtctcgaactcctgacctcaagtgatccacccgcctcagcctttcaaagtgctggaattacaggcgtaagccaccatgtctggcctcagataattcagttttttaaatgggcagtgaatttgaatagacatttcttccaagaagatatacaaatgcacatgaaaagatgctcatcattagccctcagggaaatacaaatcaaaactgcaatgagatacaacttcacacccactagaaaaactaaaatttaaaaaatgataaatgctggtgagaatgtggacaaatcagaactctcatgcactattcatgggattgtatcatggtgcggccatgttgaaaaagtttggcagctcttcaaaaaaatgttaaacatagaattatcatatgaaccagcagttctacacttaggtatatactcaagagaaatgataacgtgtgtgcatacaagcacttgcacgtgcatattcatagcagcattattcataatagacggcagaaacagccccaatatccgtcatttgatgcatggataaacaaagtgtgctatatccatacaatgaaaggttatttgacccttaaaaggaatgaagtacagatagatgctacaatatagataaacttgaaaaattatgctaagtgaaagtggccagacacaaaaggcacattaattacgcgattctatttacataaaatgttcagagtaggcaaaattctaaatatagacagtagattggtcatttccagggttggttttttgttttgggttttgtttttttttgtattgatggaaataaatgctctggaattattgacgatgttcagaaaaacctcatgaatatattaaaaaccactggcatatgttttttatatgttttaaaaggatgagttttatggcaatgtgaactatatttcaataaaacttatttttaaaagttctatggttaggaattattaaaacaccacatggatatttagctaacagttggagaaaaaagaaaaaaaaatagaggtgatacctaacccagagtagagagattggtaacaccatctggagaaattatgtctaaactgagaccagactgatagataaataggaagcaattaggcaaagggtttagtattgtaggcagaggcaacagtatgaaagcctggaggcaagggaaaaaattaccttctgaagactgaaagtagctgaaggatagagttgacattgggtaggagtaagaaatgaagctaaacagtgtttaacccatctttgtgacctcatgccattacctgatacatagtgggtgcttagcaaatgtcttaagtgacatgtttctttgttccttagtcttaaaaaaaaaaaaagtctagtttgacatgaaatggcttgggcagggaaggtggctagaacagaaataagaaaagattgtaataatcgtggtgaggagtgatggtagcctggagtaaagtgttggcggtgggcatggagatagagaggtatttaggaacttcagaggaagaatcttgatatggtgattacttaagctgcaaggtgtgacaagagggaagaaaacccaggcttttgagatatggaacctaaaggaagaaatggcttttatggaaacagaaagggatatgaggatgaagataagtttaatcttagccatgttgaatattgaggcacttaacagacagccaagaccagcaggctgtagcatgtgtgggactgaagcccagggggtgggttgaaaatccagatttgcgagttgtcagtttctagttggtggctaaagacaaaggagtgattgagacgcgcatctttaagcaccaaataaatgcaccagagatgtcgaatattgttagaaaatacatttgaaataaaatattagaaatatataaaatatttaaaatatcaaaaccccataacttttgtcattaggcacaatggtaaccctaggaaaactggactctaatgcaaagtttcatgagaccaaacccacccccaacaaaaagagccctgactccttccttctgcaagcaagctaaatatggattctctgaaggaaagaaggaaagagataatgagtgtttcttttactgacttggggtgagattatccaaagattgagggctgtacctcaagcactccagttctctacaggcaatgccatgaagccttccataaaagctttgatctggccaggcgaggtggctcacacctgtaatcccaacactttgggaggctgaggtgagtggatcacctgaggtccggagtttgagaccagcctggccaacatggcgaaatcccgtctctactaaaaatgcaaaaattagccaggcgtggtggcatgtgcccataatcccagctactcaggaggctgaggcaggagagtcacttgaacccgggaggcggaggttgcagtgagccaagatcgtgccactgagctccagcctgggcaacagagcaagattctgtacccccgaccccccgccaaaaaaaagctttgatctgccatgagaaggcacccatgatttgtggtgaacctcaggttacaataataagcgtaggttgtggccccacagaggcctccttaattctcttgtagcctcttgacacccaccccaccccacatcatcctccaacctcagggtaaagtgagccactgcactttggggagaagttgcaaaggcagtgtgtcagaggccagtggttttactctaatacccattgttttctttcctagagttctttgaagaaatattctttttttctcaagctaattcaaattaagtttctgtcacttccaccaagaattctgaagtccaacttcatcaaaatcttagctcgacttaccataacaaaataccagcttgaagaagggaaatttattttcttacagttttggacgctggaagttcgagatcagggtaccagcctgatcaggttctggagagggccctcttcctggcttgcagatcaccactttcttgctcctcttcttgtaaggccacagtcctcttggattagggctctaccttatacctcatgtgaccttaattacctcctaaagacactatgtctggatacagtcacattgggggctagggtgtcaacatatgaattttggggggacacaactcagtccataacatctgtcattatgcccactggccttggagagttagtagaaggccctcatccttgcccgaaagaatacgataacatcagacttctttggtacacagattatagtaaaagttcaggcaaagccatgctgactgcactagggacagggatatgttatgcttcactgaaagacaataccttgattcttttgtagctgataagcatgatgactggagtttcacgtgcatgtgtgagatatacctccctccaaccttgttaccacatctgcacattacctgcctgatgtgaacaaaagaaaagaaagatttttttttttaaagaccatgcctttgaattggatttcacagctccctgctaggaaaacaagcagtcacaattttctctggtagtaacgggacacttacaggataaaaagatgtatgcataagaatgttcatcctagtgtggtttcccctaatgaaaaagtagaaatatcctcaatgtccatcaataggcatcttgatgtccatcaagaactttaggatatatgcatgctttggatactagacagccactgaaaatcaagcagaaatgactctcattaattttgttacatatggtaatgatattggggctatataggaaaatgtccttacttatttagaggtacagacagtccccgacatgattttttgactttatagtggtgcaaaacagctacttgtgggggctgaggcagaagaatcacttaagccagggaggttgagactacagtgagccgagatcacaccactgcacttcagcctgggtgacagagtgagaccccgtctctaaaaaaaagaaagaaagaaaggaaaagaaaaacaaaaatcataaattgaaaatgcactttttatgtgtgagatagggtctcactctgtcacacaggctggagtaaaggagcgcaatctcagctcacttcagcctcgacctcccacgctcaagtgattctcctgcctcagcccctcaagtggcggggaccacaggcctgcaccaccacacccggctaatttctttttacttttggtagagaggtttcaccatgtcgcccaggctggtctcaaactcctgagctcaagcaatccacccgctttggcctcccaacatgctgggattacaggtgtgagccactgtacccggtctgcacttttgacttacaataacttcaatgtactatggttttgcatatactaaaatacttaggcacaatgtagtataataaagaatatatcaagtcttcatcccccattcctggcacagtgcttcaaatgctcttgaaattttccaagtgatggcaatgcctttgttacagtaatgaagtgactctgtgcagacccctagatatcttcaggatgaggtttggtgaccagaaagaccaaccatgtgtttagaaggttggga

SEQ ID NO: 96280 - DNA, 41375 bp, Homo sapiens
cccttcatttcaccatatacaaaaatcaactcaagatggattaaagacttaaatgtaagacttaaaactataaaaatctagaaaaaaacctaggaaataccattttagatataggcctttgcaaataattcatgatgaagtttccaaaagcaattgcaacaacaacagcaacaaaacaggcaagtggaaactaaagctgaagagcgaaagaaactatcaacagattaaacagataacctacagaatgggagaaaacattctcaaactatgcatctgacaaaggtgtaatatctaggatctataaggaacttaagtctatgagtaaaaacaaccacatgagtaaatgggccaaggaaatggacatctctcaaaagaagacacacagttaacaagaatatgaaaaaatatttaacatcattaatcattagagaaatgcaaatcaaactacaatgagatatcatctcataccaatcagaatggctattaattaccagtcaaaaaataacagattttggcgacattttggagaaaagggaacacgtatacactgctggtgggaatgtaaactagtttagcgactatggaaagcagtctggaggtttctcaaagaactaccattcaacccagaaatccaattactgggtatatacccaaaggaatataaatcattctaccaaaaatacacaggcacgtgtatgttcattgcagcactattcctaatagcaaacacgtagaaccaacctagatatccatcacagtagactggacaaagataatgtagtacatatacatcatggaatactatgaagccatacaaaagaaaaaaataattttctttgcagcactatggatgcagctggaggccattatcctaaatgaattaatgcagaaacagaaaaccaaatgccacatattctcacttgtaagtgggagctaaacattgagtaaacatggacacaaatcgcaacctaatagataccagggcctacttgaaggtgaagaagggagaagggcgagggtcaaaagactatgctcactacctgggcgacaaaatgattcgtacaccaaaccctgacactcaatttacccatataacaaacctgcacatgtaacccctgaatctaaaataaaagttgcaaaagaaaaatataaataaataaagtgggtttcttgtaggtggtacatagttgggtatcttcttttattcactgtgacagtattgatctttagttggtgtatttagaccattgacatttaaagtgatgattgttattattacattgatatctaccatatttgctacagatttctatttgttgcccatgctctttgtttctgttttcgtcttctacattatttatgtcttttgggttttaattcagcattatttaagattctattttttctcatttctttaacacatcaattatacacaaactcatgtacatacacaaatatatatataccttacttagtgattgccctaaaatttacactgcatatatttacaactaattcatattaacttctaagtaacagtatactgctttgcagataatgcaagcacctcatggtaacaatatatttctaattccttcaccttttgtatcatcattggtcatttaatttatacataggtatacatgatcatatataaatatagatatgcattcgagtacacataattgaaaacatttttctactattttgaacaaattgttattggttggatcaattaaatatgaaaaaagttttatcttaccttcacttattcattatttgaccctcttcctttctgtatgtagataaaagtgtctaatctgtatcgttatcttctccctctgaagaacctttttttcaactttattgagatataattgacaaaataaaaattgtatacatttaaggtatacaacctgatgttttgacatacagatacactgtgaaatgatcaccacaatcaagctaattaacataaccattatctcacatttgtcatttgtatgtgtgtatatgtgtgtggtataagatccactctattaaaaattttctaatatgcaatagagtgcattcactgtggtcagcatattgtatattaggtcaacagaattcgctcatcttacaactgaaagtttctaccctttgacaaacacctacccatttcttcactgctacccccgcagtccttggtaaccactattctattctctgctttgatgagtttgactattttagagtccacatgtaattgatatcatgcaatatttgtctttctgtgtatggcttattttatttagcataatgtcttcctccacgttattctatgttgtcatacatgtcaggatttccttctttattaagggtgaatttccctgcccacacttttcgtcttttttataattgtcattgtaagagttgtaagctgataaccccttatggttttgatttccatttatctgatgatgagtgatgctaagcaccttttcatatatctgttggccatttgtatgtcatcttttgagaaattcaagagtgccaagaatatacaaatagaaaaacaatagtcttttcaataaacagtgttgaaaaaactgaatatccatgagcagaaaaataattatcagacctttatttcacaacatatacaaaagtcaattcaaaatgttttcacagactatgtgtatgataaggagttaatatccaaagtgtataaaaaacccatgtaacacaatagcaaataaataaataaataactcaaacaaaaagggggcaagaaaccttaagaacctcctttactatatcttgcaaggcagagcttacttgcaacaaatttccttaatttttgcttgtctgagaatatctttatttttccttcacttttgaaagatgcttttacaggatacaagattggtgataattttttctctgaatgctttaaagatttcatgccattctctgcttctgtggtttctgaggagaaaatgaatgtaatttttatttttcctccactatagatgaagtgctgtttccctttgtctgctttcaaaattttcttcatcttctaaagtttgaatacgatatgcctaagtgtcgatttcttagaacttattctgcttggtgttctcagaatttcctggaactgtgctttggtggctgatgctaatttgaaaacattcacagtcattactgcttcaaatattggcttagtttctttctctcttatcttcctctggtattctcagtatgtatatattacataatctgtaacagttgctccatagttcatggatattctgctctgctttttatttttttctttttattcagtctgtttttccttcttgcttttcagttttggaagtttctattgtcatgttctcaagatctgagattctttcttcagctgtgtccagtttattaatggacacaactgaagaaagcattgttcatttctattatggtgtttattttctctaatatttcttcttcatccattcttaaaattttatctttctgcttaaattacctatctgtccttgaatgttgtctactttttccattggcaccctcatcattattttaaattcctagtgtgataattccaacatccctgccatatatgactccaattcttatactttttcagtctctttaaactggtttttaaatggttggtttttgccttttagtatgccttgtaattcgttgctgaaatctggacatgatatactgggtgaatgaaactccagcaaataggcctttagtggtgtgatggtaaggttaggagttagagagggcaagagttatatagttctatggttaggtctcagtattggtgagcctgtgttcctagactacaaactatattagtgactctcagtgttattccccctctcccttaggtgggactggatggctagagaagactacgattgggtatttcccttcatagaaagaaagagctaaaactaactggagtttggtattccccttttccaggtagggtaaactctgataaaatcccatcaggttaggctatagtaaaatagattctactgaggacagccattgttaaaaagaacagaatgctctgccatatgttaaaattatttcttttcctgttcccctactaaaagcatgaagatattattttttcctaatatttattgtgaggagctggaatagctactaaaagtaaaactcacaaaaggatggggcctcccatgaccctgtcctgtgctttttactgtcagacttttccaaccttagcctccagcaatccattcattacagtttaggttttcttacctggactcctgcagagatttctgcagttttgaggatagtagtttgtcttgtgatgtcaatttctctgacagtctaagaagaaatttttatttttgagttttgttcatctttttacttgttgttaagacagagtggttgacttctaaggcgcttatatgacagattgtttggcatgctttttaaggtaatagggagttgatcattagcatatgaaataaatagaatcaattttaaacagatattaataattttatctgaatatttgccccaaaatttatattatcagataaaacatatcacatataatcaataagaacgttattataaaaacttttaaaaataaaaagttatctaatttatgcatttttcatttacatattttatatatatatacacatccatatatacacatgttatatataataaatataatatataagtatataaacagtatatattgtgtatatatactataaatgctacaaaaaatatatatataattagtttttggtattgtatatgacattaaatctcatattaaaataaatagaaaacaatatttctatttttatttaaaaatcttatttgcagtttgccaaattgcaatttaacattataaaatattaatgatggctaaaagttggaggagtaattataccaaatattttgttttttaatatatatataaatacacacacacacacacacatgcatatactgagggttcaaatattattcagagttagcttcaacaatgcagattttcctctgagagtttcatatcttaatctgcaaaaaagaaaagaaagtgtggttacattatcataaaggatatagcttctagcttcagagtgctataccttgataggtatatgaataaaaccttgggcatatttcttaattatcaaaaattcaatctcttcgattgtaaaatgagaataagtacctacatcctacatttctagatgatgggggcgtgtacaaatgtgcataaagcacttaacaacagtgcctagcgcacgacaagcaggcattaaatgacagctattactagatattaactggacatgtgttctcataaattcatatggcctgcttcctatgttgacactggtagggataagggaaaggaaaagcaaagtatacgggtaattaaactgcccctaaaaaccaagaaattctatgaagcaaaaaataataggtaaacatctccaagtatcaattttttatgtattatttttccttgcttttttttccacagggttctttaagtttttcagtatttgagaaaaaaatgtataaaagatgtctttctgaagcaaaaaaagtagtctattaaaaaaaaggccccatccactttattttttttctccagaaatgctgggattgctggcattctttttagtcttcctttttcttctatttgttgatgtaaacacgctctccatatttccatgagccatgtctcacatattataaaagggcatgctaaatataattaaaagtagaggcagaagcattaccagcaaaagagtgggtagcactaaagcacaatattaatatccacagtgaaatgtcattgagtcatcaaggtttgtgccatatgggtctgtggcttaactcatccccaaagactgaattgatttgcaattacagcatattttggggttaaagaaaaaaatgtaaaaatggtagttaatcatcaattaggatcgcattttaccgtgctgaaagttatttaataaaagatgataagagcaggaacccgcatccaggaacagagccctttgctcctccctcagaatggagaccagaaatcagatatttatgcccaagaaaagcaggatttcattcggcacttctcccagatctttagagtgctgactgaggatgagatggggcacccacagacaggagatgctattgcccagctcaaggaggtcctggagtacaacgccagtggaggcaagtatcagcaggctttgagagtgctagtagcattcaggaagctgatagagccaagggaacaggatgctgatggtctctagcgggccctgctgtgggatggtgtgtggaactgctgcaaactttcttcctggtggcaggtgacatcacagattcatctctcacccaatggggacagatctgctggtatcagaagccaggcataggtttggatgccatcagtgatgctatccttctggaagcatatatctaccgcctgctgaagcgctattgccgggagcagccctgttacctgaacctgatgaagctcttcctgcagagttcctatcagactgagactgggcggacctcatttcctgcatcaggacttactttggtcctggatgaataatattgaagatatatgcttaaaatacttctaacatcagaatttgtgcacgtgttttcttccccaagaaagctataaatagcaaaaattttgctgtaagcttccctatgtyctctctccttctcccctcccctaaaactcaaaggaatgttaaaagcacgtttctctgtgagcgttggaccttatctatgctcccagttccaattccttgtaatcatactttgtaaagtcctgtaaaatcctgtctcctttgccatgacactgcaaggtcataaagtagatgaaacctaagttacaattctggttttccttaaaatctaagatatgtcacaaaataatttactgcctttgtttctcgctctggtaacatcttccctctgcacctatttmccgcctatttaaaaggtgatcgaaaaatctaacactgtctacccacttgggaccccttccatgctatggaagctttgtactgtcactctgctcaaaaaagcctacagttttgttttgtttttttttctctcagtcgtgtccctctcacttgccgcaggctgccgccacaccagtactttggcgttgctaaggcaagaacctttggcgttacataatgagtatgggtttagacaaagccataggtagcaaatgataatgaagagagaaatgtgagtttagcagaaaatgacatgattaaaaagtccatatttggtttaacaagattggtcccttctgtgaccatgaatattttcacaccattgtaatttctgcttaatgccagagaaatgctacagaaacttaaaaaaaaaggcagtggagattaaggaaaggattgagggcaggggtgagagaatgtcttcttggagaagtttgtattttaggcatacatttagaaatacgtaggttaaaaggtaggttggtggggctttgacaagagcttcccagaatgaaatacatggaaggaagtttctagttgtatgttcaggaaagtagacttaatttgatgcaaataaaatgtgggacatagggaagaaagtaatttccttataaatattttaaatagttttgcatatatagaaatgacacggctcatcaaagcatttaaaaatacttattagatactttgaagggcaatttcttcacgtgtttggcaaggcaagatattttccattgtcattaactttyatgtgatagaaaaactaatctggccccaatttagaggtttttttttgtttgttagcaattataaagtcatyaagaaagtgttcagaatgtattgaataagtgaattttaagaaagtatttgaaaccaaaaagagtaggcctgcaggggraaaaaaaaaaggagattgctacttgccacagataaaatggagaatacatcaataagtatgttgtagaatgccataaaaattatgacatcttcagggcaaggcaatagaagaacataacattttttttataaagaacatcaagaaggaattttacccttaaattaatagacaagtgattacctggtgaaaatgatatttaaagtgaagagaaagtgactttttcagaaatgtcaaaagctctggaaaaattaataaattgactcttatttgagaagtcagcgaatctctcaacaagaggtttaaaatcaagagaccattcagaatgaagctgtgacttaaatggcaaatgtctaagagagaaagaagcgggaagtgattacagtaattgacacagcaytgtccttaaaggctatcttggcagttctgggaatgactcaacatataaagggtaagttataaaatattacgcagctcttgtgttgagaatggtattccagcattaggaaaaaaaatatctggcaaaaaatgataggtgataaaaattctcacattcacagggaaattaacctgtttggcatttttcctatatggtgagttagcagcaytgaagttaaaataaattagatatgtaagcccaggagaagttttagatgaaatgttaattgaagttaatcatggcattcacatatatgatgtatactctttaggtttaatgacttttttttccaggcaattctcctgcctaagcatcccaagaagctgggattacaggtgcctgccacagtgtgttcctaatttcttttttttttttttatacttctgggatacatttatctgggatacatgtatctgggatacattctgggatacagaacgtgcaggcttgttacataggtatacacgtgccgtggtggtttgctgcacctgtcaacccatcatcttcattaggtatttctcctaatgcaatctctcccctagccccccaccccccaacaggccccagtcagtgatgttcccctccctgtgtccatgtgttctcattgttcaactcctaagtatgagtgagaacatgcagagtttgcttttctgttcctgtgttagtttgctgagaatgatggtttccagcttcatccatgtccctgcaaaggacatgaactcatccttttttatgggtgcttagtattccatggtgtatatgtgccacattttctttatctagtctaacattgatgggcatttgggttggttccaagtttttgctattgtgaatagtgctgcaataaacattcgtgtctttacagcatgtgtctttatagtagaatgatatctaatcttttggttatatacccagtaatgggattgctgggtcaaatggtatttctggttgtagatccttgaggaatcgccacactcttccacaatggttgatctaatttacactcccaccaacagtgtaaaagcattcctatttctccacatcctctccagcatctgttgtttcctgattttttgatgattgccattctaacaagtgtgagatggtatctcattgtggatttgattggcatttctctaatgaccagtgatgatgagctttttttcatatgtttgttggccacataaatgtcttcttttgagaagtgtctgttcatatcctttgcccactttttgatggcgttgtttttcttcttgtaaatttgtttaagttccttgtagattctggatattagccctttgtcagatggatagattgcaaaaattttctcctattctgtaggttgcctgttcactctgatgatagtttcttttgctatgcagaagctctttagtttaatcagatcccatttgtcaatttttgcttttgttgcaattgctattggtgttttagtcatgaagactttgctcatgcctatgtcctgaatggtattgcctagattttcttctagggtttttatggttttaggtcttacatttaactctttagtccatcttgagttaatttttgtttaaggggtaaggaaggggtccagtttcagttttttgtgtatggctagccagttttcccagcaccatttgttaaatagggaatgctttccccattgcttgtttttgtcaggtttttcaaagatcagatatttgtagatgttgtgtgttatttctgaggtctctgttctgttccattggtctatatatgttttgrtaccagtaccatgctgttgtggttactgtagccttgtagtatagtttgaagtcaggtagcgtgatgcctccagctttgttctttttgcttaggattgtcttgactatacgggctcttttttggttccatatgaaatttaaagtaatcacttcctctttaacaccccaactacagaatacttaaacatgtttaacagcatttagcacattctgctttctattaaagcaatctaggtggtaaagtctagtcaataaaaggccacagggacgaacctgtaatctcacaaaccaggagtatctttgtaggatttggctttccatgggatgattttgagaaaggtttaagaaaatatcagttttggatgattcactttttctcagacaggattagaattggggattaatttggcattgggtgcctgcataaagtgaggatggtgtagtaattgggtatctccagttataaacacaaraagcatgatagagctgggamtgtgattgcaggaaagcaatagtcactccaaaaggagatcctcatgatatgaatacggaagaaacaatatttcctgctaatgtagtagccactgtgttcttttattattattattctatatttatttttaaattttcattgttagtgtttttttaataattagagtcttatttctctctcttttttttttttttactttaagttccgggatacatgtacagaatgtgtaggttttttacataggtatacacgtaccatggtggtttgctgcatctataaacccattatctaggttttaagccctgcaygcattaggtattkgtactaatgctctccctcccctggcccctcaccccccgacaggcccgcagtgtgtgttgtttccctccctgtgtccatgcgttttcattgttcaactccaatcatgagtgcaaacatgtagtgtttggttgtctgtccctgtgttagtttggtgagaatcgtggcttctagcttcatccatatccctgcaaaggacataaactcattcttttttatgtttgtatagtattccatggtgtatatatgccacatttttttaatccagtctatcattgatgggcatttggtttggtttgaagtctttrctattgtaaatagtgctgcaataaacatatgtgtgcatgtgtctttatagtagaatgatttataatcctttggttatatacctggtgatgggattgctgaatcaaatggtatttctggttctagatccttgaggaatcgctacactgtcttccgcaatggttgaactaatttacactcccaccaacagcgtaaaagcattcctatttctccacagcctcatcagaatctattgtttcctgactttataataatcaccattctgagtggcatgagatggcttcttattgtagctgttgttttctatgcctgtccaccccatctcccctctagcctgattaatgagagagctttttgtctttttcagtccaagcttatttttattttcattttcaaacactgtttagcaatgttccatgtgcgtactattggccctattacttgtgtataggaatactgtttgttcaactttttcaggggaaatgatataaccaattggtcaaaaggcagttctataattacatgggttccagtccaggttcctctaatttgcaattttttgaataatttacttccctgcgctatccactcagaaagaaaatgagaataataatacaatagctcataatcttgtattgaataatggaagtaataatttataaattgtgttgcatagcgattagcccttacaagccttcaaaaaacatcacatgatatttcattattcctatatagttcctactacaaagacctatacataacacttataatcacaggaaaataaaagagaaaaatataccctgttatcaaaactctaagactattactattttattgtgatatacttactttcaggtatataatcagggatcatttcccatttattgcttataaaatccagttacaaacatatattttaaaaatatttttaaatgttttactatttgtcataatttctttaggggtgattttctgaaggagaatggttatttgaaataatgtgtctatatgattaaattacataaaaaygtattattggaaattaagtgtttcttgtttgtttttgatgaacacagtcgaaatttgtgagggaaagtaaaaacactaagaaaaaaatgtaatagaaattgatccttttcttcaacgtgattacctaaataatttatcctttaggatacccccagtatatataaatgtacttcttgcacttgaactgtgccagaaatacttattgctatataggaagtgctcaagatccttgaattaagcaattgaaaaaawttgtaccaccctgtttgttcaaaagcagtgaaatttaacagactcacgagaccaagggctgtggcacagagagacatttaagtcatagatgatcttcaagaagttcagaatcttgtaaataaactaaaatttatcatgtagttttatcatccaggaatatttccaaaccgttcaaatggctgaaattgtatcttcaaagaaaggcagagagtgagaaggttggcgggggtgggggcggcgagagagagagataaagagagagagagagacagagagaaataaggaggaagaaagaagggaaaagtgcatgatcaccctggcagaaacttagtaggggtgtactcatttgtgaaaattgacattttcaaacatgtcctacttgtgaatcatacattttacctgattcattaactccatgttacagcagcagatatcctgagagatggagatttagccctctcttacattcttgcatcacaaggaactattaggttggtacaaaagtaactgtggtttttgccattataatataaagaaaaagctggaacatccttgccacctatcactattgttcggatatttcaaaggggcagttttttattcttgaaggtaaaagttatttatcaagtaatttgataaattatctagaagagatatggaaaacaaaaataaatagaatcaaatatacttggaaaacacacaacactgtcttgtttttacatacattaaatacattatttttatacacattaaaataattttgttttttaagtgaaggaatacttcagttcaagagttctgaagcaaggctgcctgggtttgaatgcctacaaccatgtctactatgttttatcaaattgaatacattagtttttaatgggcatcattactctacatactattgcccacccacctgcaaatgacttgtaggaytacaattatttcaagatgtatattgagttcagagatgtagtgatttggaaaaaaaatgtgcatattacagttaatgaaatatggcagtagcagaatgggcaaatcacgtcatctacataaatctgagcttttttattttcaaaaaagggtgacaataaaagtacccacctatttaaactgttttgatgattaaataataaagttcacgtaaagcacttagaaaattgcaaggcacacattaaatttattagctggaataaaagcctaaaccattatgactttttttttttttwaaaaaagcaatattttaactaaaaaaaaagaaacaaagaagcatatctttttcatataatggttttcctgggaggcagtagcaaacatctgggataatatgcgttctgcacagtggtgactggagtccagttccatcaagtgaggaaccagaaagacagtatatggaagaggtcacagtcttacagagtcagacctcaaagtagctcattgccattcactttcccaagggataatttaattttatttgtctatgtctacttctaaggtgggctgagaaatgaattctctagccagaaagccacatgcctaggagcaaccctattcctaggtaaaaacaggagaatggatttagtggagagctaaaaaattctgccacagtacaagtatatagtcaataaatatcagctattgttattacttctagctacaatcaaaaagattgatgaaatgagaaaatgctgcattcatttaataaaattataacgtatgaaaggattgttcctacctaaaacataagatatcaaaatttcatgtgtgacattttaagtatattgtgtttttagtattttatcgacacatcatcttttaatgaagacacaagtgtaactagatctcattttttaccacttggtgataagaacaaggcatatttccactgcattatttggtcattttcatagtcatctagaaacgggcagctatgcctcttagattttctatacattatttggaaatacattagaaaatgttcaatgatactggtgcaggatttttctcgacctctttgccgtaytcccaacaggggctctccgtctacttgacccactgcgctcagccccttgtgggaaggagcaggtgaacgagtgagtgggggatctggccagctgctctaggcactgacacaggagcatgctccatgaggggcccatggccagaccaggtgtgtcatctgaaggggaatgtgacggaatccaggtgagggtgcccacgaccccaaaaccccacagtgggtgttacagtactcttttagttctgccaccgcagtctgatggacggtggtgtgttagcagctcagctggccctttgcctcgttgcatggggcagctgccttccactggcaagggcaaasggccaatgtgacagcctttttggatacccatactcagtgagtcccaagctcttgaccaacatacaagaagaatgagctcacaggggcaatttaaggatggtgaaggtgtttaatttcattgagtgatgaaaagggctttcagtgcagaggggagttggagagggagtgggaagggcaggttatcttctccaaagtcagggtgtctcttccatgaagtcrggctttctccctctctactgactgagtctggggtctttataggcacagggaggggagtgcgtgctgattggtttgtgagtatgcaaaaaatgttaacttgatgacaccactcaaaggtgggcacaacactgtagaaaaaacaattaggaaatggtggggatatgtaaaacaggtggaaggtggggatcaatccgaggaaagcatgccacacgggagtacacgttttcaatccagtctgaggaggtctgaggatttaacttgtagtttgggtgtcaggctttaaactgtcttcagcttggaggtgggatttcactgggtacccgcccctatctgcctaggcatttggctgccttctgttgttatcagtattttcttgtagttaaagcttattttacctatgcattttatataaatagtatggtcacagtaattctgtaataatggaatcaaaatctatttatttcaacaacaacaaaaaaacatcaccatgctgcatatagaggacagtttctgtcttttatacctcatgggaaacatggagtagttgcttcaccatgtttctgtaaaataatctttaaaatgcttgaagaattcattcctttgaatgcaggagcttagcaagaaagcctttttttctaatcctctctgtttctctgcatttggtttacacttttattaatctgtggtacctgacacttaattgaatctctacctttccatttggctgagctttagacccactgccaatcttgagtaattatttttctatacatcagctgttccgattcacaagcaggctcttcttatgaagtctgtcaaccttgagaaattgttttgaataaagcaattctttattcctaccaatattccttatttctatccaatattatactgatctgtagaaaaatgtgccttcaacttatattctgctggtgctttaattcagttcaaacaatattgttgttaaacaatattttcacatgaacaattgtttttactattcctctttttgaagtcaatccatcattaaacattgtttatgcttaagtgaataatttactagattaaactcatctacctaagttgaaatactatgaacaaaagatacatattaaatattaacttttaaacaatttttgattcaaatctatttggctttgaaattgctgaaatactctgcctattgttggaacactatgtaatcttcatccaatgaatgttttatttcttaagattttaatgaaaatctccacatatatatatatatatwtaaacctaaaattttaaaagtcagttttctgaataaactagaatgattttgtaattgagcttattctgcaactggcagttcaatccagaatctgtgcaggaattaaggtcaatgtgaatctttcaatttctttagttactttgtgtattaaaccagatacacaaaacgtaaaatactattggccataaagagggatgttaaataacgtatatttcttaaaaaagaaaaacaacactggcactggtgtcttgataattctccctctttttctgactctttctaaaaatacaagacatgttaagcatattctgaattcctcaacacagtgtatgagaccacaaccctcaaatggtaggatcaagcctgataaagcattctctgcactaagtactaaacaatttgtttaagatgtagctcatttctcacagctcattagctcactgaatgattttgtccaaattatgaaggcaaagtgggtttatattcctagggtgcatctattcttcttctagtcatgtaatttccacctttatcacttggtctcagagcaaagagccttttcactaatgaaagtattttgaagcattgctaaagaaagacataatgaggatatatactgagtcagttaaagaaatagaggagacttaagaacctgcatactgagaaaaagacttacacaaacacttaacccaagagctctctctgggcttcacggttttgctactttatttagaaaagataatgtgaatagacaaagaattacgccagggtttaagttcatcttgtagcaaaggagcatccacgtgtttctgtggttcgaaattacaaagctatttttatatggtttcgttagactgctgtgtgtagaatcaatttacagcagggacctaaaagcaaggcatttaaatgattctttgagaatgattcctgtaccatgtagtttggggaggtggctattaatgataaagagaaatggagagaagtaacaaaacaagtatataaagatatagatttttataaatagaattattcaagctaagtcttatgaaacttttcaccctcttgaaaagcacatgtatatgtgaaaatataaaattattccagtttgtgttgtgtacatttacaaaataaattccgcataacttcatttatatatatgcatataagttaaatatgtacttggaagaaaatgtaaaaaaaagaaaatatgtaagtagaatttactgaaggtcaaatcaaaataaaatcaacatattacccaactgtaatgtgaagggtagaaattgaaggactactttaaaatgaaacatctaatagatcaaaaaacaaaggcaatttgctgaaagttccaaaatacatcaaaaatagtgaaaacayttgttgtatatataggaaaactactgactatgggtattttttaatggtaattcctaattcttcaaggatatgacaaacctaatttggaacatcaatgtgtaatatgattgtacatgaagtgaaaacacagctaaaaaatgaacaaattaaacatcagaaaattgcccccaaagaataagtcacataagttatttaatttgtgttgcatgaacttatatttttacataataatatgaatggaataaaacatatagtatatattttttttctaaatgggatcgaataactgccttggtaggaacactctacattcgaatattaattacaatattaaattgatctgttgaaaaatgtgccctcaacttatattctgctgggtctttaattcagttcaaacaatatcgttgccaaacaatattttctcatgaacaattgtttttactattcctccttttgaagtcaatccatcattaaacattgtttatggttaagtgaataatttactagattaaactcatccacctaagttgaaatactatgttctcaaagagaacaaaaggtacatattaaatactatttaaaaaaaatttttgattaaaatctatttggctttgaaattgctgaagcactcttgcttattgtaggaacactacttataatcttcatgcaaggaattttttatttctttagatttaaaaccaaatcgccacccatacatatgaaattaatctaaaattttgaaagccatttttctgaataaactagaatgattttgtaattgagcttactctgcaaatggcaattcagtccggaatttgtgcaggaattaaggtcaatatttctttgacactttaatttctgtacatttttgtttttacgacgtttttatttcctctggtaaaattaataaaattcatgcgtggttgaacayttgtactctgttggaccaattaattttgaactttaaaatatgaaatgagcaccttttgttgtactgtgactatatttctataaaaattcacttacttttaattataaaattttaggctatgtaattaatgcataagaagtagattgtcagtcaagttagaagtcaactgttctcaaatattcaaaagagaaattttgaagaactttaatactttgcatttatctatacatctacatcctatggtatattgtataaatattattgscttgcaaatataaaaaatatctcttttgttaaaagaatagtaaataaattaattatgtctaaaatacacatagcctggtttgaaattcatcataagttttgaaatgcatgatagactgtaatgcttccaaggatactgtaatcattaatcatgttctctacttgcagtgtttatctgaaaatatttcttaaatcaatagcttgaagagactatttgatagtgattattagtcatattttattttatcagacaagcactgtttcaatttaaaagcatttagatagctcttacatgcctaaatcattatgtacagtctttacaatttacattataaagtctcctaaactaggtaatcattatcatgatagcaatatataagattacaaggagcagatggcctaacatctttcagctttcattggaaatattttagcaaaaatatrtagttaaaatttctcagttataagagattggttttccgaaaatttatgttaatattgataaaattcaatataaaatttactaattttatcatgaatagttttcagtaaatcacttcatgattttcagaaaacacagagtaccattgtctaaattattttatatgacttgaaggtttttgttttgktttaatataaacatttagaaggttttctctcagaaaaaaaaaatcaatatattcagggatatttaggcatcccaaatgctacatatcaaaatccaagtaataaagtggtggaaaattgtaaaaggttattttaacattttcttattttgtgtaacactcttttgactaaggacagctatagaatgcaaagttaagtgaaagtaaagatcaaataactagctcattttactcaagggaaaaacaaatatattatctcactattgtgatcacgcaagkatagtttcagtccccaaggataccctcccaagagctcatgtattagatagcaatgtattaagatgactataaatgataaacttgacattcttttaatgctactcctactgtaaaatttttttaaaaagtgtttgactagatccttccctgctgtcccatttttttattgttttggttttgtgttttggatttttttcttctacactgccaaggttgcagtgagactgaaataattaatggggatggtgaaagtaggtggatacttacgtgataatggaatacccttttaattgtttctgaaacaataacttcctgtcttaatgaacataatttttaactcaataacagtacaaagacaacaaaatcttaagcttcagaattcatgtaatatattgaatatacaaatgttgcaatgtcatttttgtagtagtactttctactactccattcccaatattcagatatcatgatgttgagataacatgtaatgtatgtatgggtgtcagaagcagaggtagtggtgacctcattgtgaccaaattgtaggcaatgtgttctctcctacatctctttgccgtgtcacaaatatgctaaggtaacagtatcagggaagacgagcatattaaaaatcttacatctattattggatttctaatattattaattgactcacagcaagttgtgattcgtttccattcatccatatattctttcacttatccatacataatatttattatgcactttttctttgtctgccattgcaccctgggagtaaaaaggtgaacaaaaaaaaaaacagtacttgccttcatagagctgacaatttagggaggagacaaaaatacgctcaataatgctcaaaataaatatgtaaccaaaaaatggaaaagtaaaaatgagcaatgctaagaaatggtrgaagaacagtatttaacctagtatgaggaagaaaagaaagttctctccaatgaaacctataaaacgatcatgaagaatgaatagattaaaaaagtgaaagcacatttagataaagacaatgccagacagaggtaagatggagtgtgctatgttcgtggaaataaatgcaagccagggaggatgaaacaaaaagaataaagaaagagtggagggagaggaggttggagacagtagctaagtgcagatcatcctgggccattctaatggcaaggactgtgtccggaatttattccttctggtgggttcttggtctcactgactttaagaatgaagccccagaccctcgcggtgagtgagtgttatagctcttagggacccaaagagtaagcagcaataagatttattgtcaagagcgaaagtacaaacgtaccacaatctggaaggtaacccaagcggattggcagtgctagctccggtggccagcgtttattcccttatttggccccacccacatcctgctgattggtccattttacagagtgctgattggtccattttacagagtgctgattggtgtgtttttacagagtgctgattggtgcatttacaaccctttagctagacacagaagttctccaagtccccaccctacccagaagcccagctggcttcacctctcaggactttggtaccatatactcatttacagtttccatgcgagggaattatattaagctttcttaatgacattctgattacttgtccaggtgtgttgcggcttcttatttcattcacccagaaactattgagtgattactcgggatccagtgctttttcagcaaacccaaattagtcaccccaaaaaagcaaataatatagaccagaggaactagtgttgcttactctcctagggtatcaagtgtttcacagtataatgcatccaaaaggtaatgattcataaaatatcaatactaattaagaaatacggcaaagtgaagatttattctacctcaatttcaagtatttgaagggactgagagtcaagatyatttatagtgcttctctatggtgacattattttaatggtgtcatttaaatccatttttggtgcaatacagtaattcctaaatgataaattacactatttaatatttcaacagagacatttgttagatatagaggtccaattttttaaatgaagagtttaaagatttgcttgcatcttaaactgaaatcctgcattaaattagtaatttgtaaacttaccatttgatttgtaagaaatatcatatattgattgtaaaacaaatgttatatgttgttttttagatccacttaactttcagtgttcagcaactccacgaagaatccacaacttgaaaacaaaagatgaaaaatgmtgagttcacgtacatagctgtactcttagtcccaaaccaataaatcttttgccctctttctaatttatcacatgtttgtaaaagagatttgcttctggggagaacgtgttaaatagggaagttcatatttgaaacatttacatcattttcttgccctctttctgtttaccaacaaaacaaaatgatatttggaaatgaatgattttgaggaaatattatgagtatatattaaaagttttgacctttttcttatttatatggttcaaatgagtgcattgtgagccaaaaatgcaagatggatcgagaatgttcttgtycaactagaatttgttaagaggctccaaactgccgttaggaatcagagttggagagacagtgatttctatgtgtatctgaatgttactgtgttctggctgttatgcaaaaaagaaaagggcataaatagtcaagcagcaataggaagcttactggagcaacagttaatgttacaacttggtgacaggtatgcgattcccattatcccatcaccaccagaggcagctgatagacatccaaagtaagctcctaggaacccaaatgagactgaggaaaacacagggccgcccgtgcactgtggggctttaagaaagaaccagagaacttctcctctagtgtcagtaggggccagcatacataagcaatgccatagttcagatgtttgaatcgcggcagccctctatagccagctcagtgtaggggctgaggtttggaggggaaactctttcccctgatatgtttgggggcagggatacaagaattgcagttgcagttgtattatgtagtaagatctttgccacaccattggtgatgaatgaactgagacacgggtctaagctttgagacagaatgaattaagcactggatttgaaagtgaccaggaccctctctaggattttctccttcaggagctcagctatggacaagttaccycttacttgtcactggcatgtatcaggggtacttttacaccatttgaaggctcaataggacaggtattaaagacttacaattatcattatagttatttaccccctttagcctctatttgtgtgtctctgtgggaactcattcacattcctcaggaagctgctcacttctgtttcctcagaattatttacattttggaacatttccatacaggtgtagtaggagacatgagctatgataaaatggagtcggtttactaatatcttctgatcttgtaattgaattaatgaaactaattttttactctttttgtaaacactttttttttttcctcaaaagcctattactgtggtttggtcagtttcaagtattattaatatatattgagacggagtcttgctctgtcgccagcctggaatgcaatgacggcatctcggctcattgcaacctccaactccctgattcaagtgattctcctgcctcagcctcccgagtagctggaattacaggcatgtgcctccacacccagctaatttttgtatttttagtagagatggggtttcaccatgttggccaggttggtctcgatctcctgacctcgtgctctgcccacctcagcctcccaaagtgctgggattacaggcttgagccaccgcacccagcctatttatttttttctattttatgtaaggaaaaataattgtgtgcatgaatacactcacccacatagatgtataattatgtcaacttatacgtaaacacaaatacttttataaggaagattaagtcacaccatattgtgttagttgtagctgagaatttttgtaaagcttttaagcatgcagactytattttcccttgcatccaactgctatcccaacattttacaacagaaaaaataaaatcgttgctctttctgacccacttttttcgcctcaggatatctttgtctgttcataattggtttactatattcacattgtcaacagaactctgtgcttttcaacatttaacacctgtgaagaactgtgactttactgcaagcaaaaggcatgattggttgcaaaagacctttagctcactagcaggtatgttggagcgacaacaaatatctttcagttcaaagaaatctgaatctgtaatttacagttttctttctctcacaattactggcttactttgtttactttcaaattccttgtaatatctggtgaacttggaagatatatctttagctgtttccagtattctctctaattttattttcatgtttattarcaattttggtatatattttttcttagcaaagatactatatgtttattcagtcttcatctttctttctaaataatatctctcaggcttcttatttatgtgtacaagttctatattatatcagcaaacaaaacaaaaacaataataacaaatgttcatgagtttttagatacatttctcaaatgtaatgctcccaacataaaaaatagcccagtatcatgaaatccttggtggtggaatgaaagcgtaggtcattttgcatgagggcagtggggactccagtaggggccctagtgtggggttaagaacgtgtgggcaacatgaccctttcagaagattaggaggtgagtgcatacaggaaagtcaatgaaatttgttggttagcctacctaggacaaaggattgaatttttttttccttactcttttcttttgtctcttaaccayatggtcttttcctatagaccttcagagttagcaggagatgacttgtagtggtgyaacacctgtcagccttaaataacaagattcagaaaatacaattcagcatagagttttttcaaccccaaagcttgaggatggccacccaggagcatagattcaagttgctatgaatatgcactccaattagcagcagttacaagtgagtttttaagggggaaaaaaagagaggcaatttctaggttgcttaccaagaatttgcatcaaaataatataagctgttaattgattctacattgttctttgtatcgcaaattccaggaacatgaagataatgggtgaggcaactagtcagggaaaaaaatccttgaaaaactattgtccctgggcataggggttggatgggggtggagtgggtgtgactgaagtcctatcttcatactcttgtctctggcatacctcacatagctcacactggtctcagctatttttttcctcacaccatagcactggcctgctatgtatgcagtgggtagactggcaggggaggaggttagattccaaaattgtgtagggcttttattcccgactcaaatattttaccatgatattttatattaaaattatttttagtaccaacatgtcaaatctgaaaataatgttttgagttataaagtacccaaatgacagtgtaagtgttraggtatttgagaccagtcatatccaaccacagtcytcatcactgccatcttctttcaccgtacctctttgtttttttctcttctgtcagcgatgtgagtttaactccaagtgctttctttccctttgcagaaggactgagccttccaaaagaaggtcccccaaagaatagagttttgcttcactcaattcaagtggacagtttggaaggtgttgaaggtttttgttttgttttgtttttatgagttggagtcttgatctgttgcccaggctggagtacaatggtgctatcatagctctctgcagccttaaactcctggggtcaagtgatccttccacctcagcctcccaagtagctggtgcatgacactacacttgtataattttaaaaattgctttaaagttggaatctcactatgtttttctttcttttgcaccatttcatggatgccaaggagcttagctgatgtatccaaatatgtatgtatgtgtatgtgtatgtgtgtgtgtaactgtcccacatatttttgaaggttggtcagcagagtatataaacacttgtgaggatggagaatataaaccaaaaataaaattataagcaccccaacttactgaatgaacccctcctcttagccaagggccttccaaagttaacctgaaaaactagttcaaaccatgatgggaaggggggttgaggaagcctcattatactctcttctctttggaattcaggcacaactgaccagcctgaacattaaaacagagatcttaacactcacaaaacatactctgtagcaataaggtaccaaattcgaacctgactctctagtatagcatcacatgatagataacaaaccctgaaattaaacaaagtacgttacctcaaaatgtatttctttgacatatcttaaaatgaccctgcaaagctgtctattgtggggggaaatttacattttgtagagaatctccttcacttactaggtcttttcaggagagtctatcaccttttaaggtctgataagaagacctaaaccatctactgtctctgaagtaagcttcctggaggcttcatctgcatgggaagaatcttggttttcacagcctaaccttaccttaaccccaagtatttctttctgttgacttgaactctttaggcaaaacttaactctttcagcaaattgccagtcaggaatctttgaatctctctaacacctagaaacctccttacctccctgaaagcccttcttagagatgtcctgcctttccaccctgaaccaatatacaccttacatgtattcattgatgtctgcctgtaacttctgcctccctaaaatgtacaaaataaaattgtgaccaagcygccttgtgcaaatgttctcaggacctcctgaggctgtctcatgggcatgtccttaaccttggcaaaataaacttccaaactgattgagacttgtctcagatacgttttggttaacacagtaaagatttttatgactggccaaatctttatttcctgaaggtgatatgacccacttttttaggaatccatgaaaaattttggagatccgcaaatgcatttactatctgtaaacatagaatattatcttctattgtgcataaacatttctcaaaatgttcacaccctatttctttaaagaaaatatatatcctctacacctgtttgtgttccttaataacatataattgtctccttgtgaaatcatgcacttctagactttccagatattcctcaccttctgaacttttatattgygttttcttgaattaattattaataaagtctacaatattcttaatttttcacaaatttattatttattgtttattcccttaagtgtgacctgtctctgcctgtgttagttacatattgctgcaaattatctcaaatgtagtggtttatgagaacaaacatttattatcatccaatttctgtggtcagaaatttgaagctggcttagctargcaactcaatgtctttcatttggttgcaattaggatgtcagctggggctgctgtcctcagaaggcgtgactagggctggcaccaaagagtctcactcacatggccattggcatagagctcagtcccttgccacccagatctgtccacaggctgcttgaatgatgtattagttcattttcacactgctaataaagacataccagaagctgggtaatttgtaaagaaaaagaagtttaatggaatcacagttctacatagctggggaggcctcacagtctcagcagaaggcgaaagagacatcttacatcatagcaggcaagagagagaatgacagccgagtaaaagagaaaaccccttgtaaaaccattggatctctttagacttattcactaccacatgaacagtgtggaggaagctgccccaatgattcaattatctcccactgggtccctctgacaacatgtragaattatgggaactacaattcaagatgagatttgtgtggggacacagccaaacagtatcaaatggcctctcaacatagcagaaagagcatggcagaaagaacaatgcaatggatcgtggtggaatttgcagtaatgcaatgctaataataatgaagtctctaaagtcgcacacgccatcaattctactttgtcctactcattagtagtgagttactaagtccagcccactttctaggggagggacttaggttctacctcttgaagggagaagcatcagagttttgggggcatattttaaaaccaccacactgcctatagtccagtgtgggatcctcatatttataaatctagggcatctcaaactctgtgatagaaagttgtggggaaggtgatacaagagaagatggactctcctggcttcctatcatgtattccataatgaatttctttcaattacatgaaacccttcttttgggtccatatgattatactcagtacttttctaatctttggatccatattttctagaaatgtcccttccactyacagattttaagtagctccctactacgggcgcattccaacttctacaataatcttaggagagtttaatgtctcagaaaactccttaaaaggaatgacttttcttaattttagtggcctagatttctgttccatttgattcacaaagtacacattctcatgtaaatgattccgcctcagaaattatcaagtgtggtattcctctctcaggacacaacctctctgctgcttcagatatctccttccttcacttcctccacacctgatctttagcctggctcttacatattctccacgatgctgccaagaaaagagagcagaagcatttagaacaggagttacttttaaaaagaaagttacttttgtsaaatgatgctccaacctatagacaaaatgaactctttgtggataactgagatgcttaagttaaagcaaaaccaggaggccctagcaggatggggtggggagggttggggggttgggcagttacactccatgtgtgctcacaaaatgttgcaaaagtatcacaagacttccgttcgtttctgccatcaagttaaaccaaaataggctacagtggggaatctcccaactgacaaaggactgaccacctagagtcagccaataaagagagacttgtggytttaggcttaagggttgtccaatcaaggctctgatcccactcctcagccttgcagtttttgtctttataatctctaactctccaacgtccccttgaagagcttttaactttgtcctgaaagctacatctccccaacctgtagattgctttcmgaaaataaggtccgtgccctctctctctctttttgtctctgcagatttcatggccttttttttaacacttttagagaatgaaaggcaatcaaacaagaaagtctggttcaccaaataaaagaatacaacaacatttaaagaaaaaatatctggaaaaatatgactaaggttatgaaatttatggtatattcatggtagasagtggtaatattttattcgcaaagatcatgctataaattcagatattgtcaaagcaaataaggaaattgaggagaaatgtctttgttaagaarttcaggtttattgttttgtgtgcaaaatttctcccttccacctgcaacttggctatgtaagttgtgcttaatgatgttggaagtagaaaaagctaccagttgttgtttcttcagtgctaaaaccactttctttggagtcctcttgacctacctcatgattcatggtatgaatagttgagtcacgaggtctcttaatcttcttaaaaagaatctatcactccagtgtcagtcaccagcaacctcaaagcaataaacatatgtaatatactgaagtgatcagatacacctgctgctgccctgttccacctgagacctgaacagataaaagtgaaacatcacagagataaaataaaaacagatccacctgggagaatcatgaaagcagccaggtcctgaccttgttcaagaggccttgggaggctctgcctgagagaacactgaggacttctttcaattttggcagctgctgctagaagctctggctgagagaggtagcaatcgcccagctgattgatgtctgaaggacttccagaacctttcaactcttctgttagcatgttgacctcccaaaccatgctgtgtttcgccaccctagtcttattactgcctgtgtactgaatactagttgttcaactggtagtgtgtgaaggtcttgcagcaaacaatgaatttgagcatatataattggctttgagtcactgggaaatcctacaacttagttaggtcagagttagcacacctagaaagtggtgaacctaattaacatatcaattggtgtggctaataacagacatcatcctagatttagatcatcttaaatccaacaagtatctttataagagaagagaagacagacacaaatggaaaaaagccaagtgaagatgaaggcagattagagtgatcctgccacaagcctggagccattaggagatgaaagaagcaagaaagccttctcctctaaagccttcagaaacagtgtggtcctgtcaacacattcattacagactttggcctccagaattgtgaaagggtacacttctgttgttttaacccacaaaatttgtagtaattttttatagcatccccaggatactaatgtagagtgcaaagtrggggtatggcacgtgactataaggtgaaaagtggttgggtggggaggattctagctgaatcctctaaggctaaatcctctaaggttatttaaaagtaaataggcttttctaatgggtggatatttcatgatatttcatctgtggctgactgtttttatttttttttctgaaaatattttccaaacccagaggtgagacagagtttatatgcatgtcagagagaattctaggagcagaccccaggaacattctggaagtgcctgggagcccacaagagccaatgtaaagatatttacatacgcccctattttctgtccattgcctcatttttgtctgcttctgtgccatataccctggagtcaggatcactgtggttcaatattcccagagactaaaattctggtcctcttagaagcctgggagaagaaatgattcagccattcatccagttcttctaacttcagccccaaatttttcacctgacctccacagtccctccaaactcaaaacacctcaaggagtcaagtgaatgcgactagttttatctctatcattacccctcttcatccttaggttccagctttctctgctctgctagagtccatttcctccctttcttttaaaatacatagtgacattgtttcttcaaggtgttttcttttctattttttttctcatggacctgtatgcctcttgccattttagttgatgttctaaaatgcaacaaaaataaacaaacttgttcactctgatggtcataccatcattctcctctttatattttatctaatttactgatactactgtccatcaacttaccacagctacaaagctgaaattcaaatgtatttcttctcccttgtctcccatacaacttaatcacaaagacagacrtatcttgcctcattaaaaaaaaatcagtacactaatctctaatgctaatgatactgctttaaaggcttctcatcatctgtcaatcaactactgggacccattgtccctccttttagaatgcatcctcaaacccatcatccactaatctgcagggtcatctctctcatatgcactgctgatggtgtaccttctcttttcaaatccttcaaaagctgatctcatgggtctagatcaatgtgcagcttagcatggaacacagggccttcctgggaggatctcttgacattatctcatccataaattttcactgctcccaggcttatactcaatgttctasaattatctacaatctccataactttgccatttcctcagattaaaatgactttcttacttcatcttttcagtctctgattttccaaaataaatcaggccctttgttttctccaccatgaaaccttctttgttccctgcctcccctacccagcctatcttgctcaaccttgctgacttagtcattgattattttctttgatcctggaagctacctccattattatctttatcataattatttttaaatttttttcctccctttgagaagtagctgttttacagtaggtactggttctttatttaaagtttaattattgcttttaacatagtgataaatacataattgaatttaaagaaaaattaacagatctctttgttctgaataaggaagcagccagagaggtgagagtacgctctgacattaaagtaggtggtaatgtgtattccaattcatttttgtctttttctagtactaacaaacttcattrctcaatgctattacttattacttcttgaaatgttgtctcctaccttctcctactaaatactccaactcaggtcagatacagtgcattttcaaagctccccatacaaaaaaagtcttatattaatatgatccatcagaaataatgacattcagaacttattccttttctgtgctgcaaggtcaattttcctacctctattgaagcattcatcactctaagcagcaaagcaaaatcctcccagaacttaagaatagaattatggtaatatcaacttgcagtggttgacctagccttgcataaagtagaattattccaagcaataacagacaaatgggtgattaagcattttttttcaaaaaagaggtcaggatcttgctttagaaaaagactacctgtatggacaggcttaagtctgttgtaaaattaatgtctaaaatgaagaatgtttcagtcaggaacaaatgaaagttcagtggagaaaaaagggaaacagtggaattctaatatgcatctagcattgattggggagatgaccgtgctgaagagtacagactttctatcaaatttggaggagacacacacatcatacacacagacatgcacacacacaggtgcattctcagataggttgatgatatcactgatgaattttggttctgtttacatagctctttctttcattatcctgagaagataaakttgttctttccatttatatatccaagcatacatttactgctcaagaacttttattaagtgggtgtgtatatgtacaatattttaaacacaaacatatgttggtatattgattataaatctcagttacaaactatgattacatcagttcaattcttgggttgtgattttataagccttatgaaaaactatgttgatagtgagattgctcgacagtttcttttatactgtttttctttctcactttgattgttattgtgcattccaaggtaacccttttatagaagcagagccaagaataacaacattatcartcttctctactttcaagttgaaatgtgatgtatcagtcactaatattccaaacactatgaaataaattgtctggwgctttgtggctccttctttttcctacctcctttgttttatttgctttgtggtgtataataacccttgacatgttatatttaattattttaaaacatggtgcatcacgtatgtcatgtcccaggaggtcatgatttaacatggaggagaggaatattcttcagaaacaaaagcagatgctagagaattgaagatgtccacacaattacccagtgtaacaaaaataagctatatacatattcttcctgacttttctttcttcattgtgtgaaggacagttttatgtctaattttctctttgggttcatcattttcatgagcatgtaatgtgccaaatgtgaatacatctagtagatgcagtagaagatgctaacattctggatatattccccgaacagccttaagaattcaatcctttattactatatctcactatacttgcaatgttgtaaatagagaaaaaataaaatggacaagatyaaaactgtaaattattgcaactacctccccccaaaataagtgcttaaacatgataagaatatttcctttgtgttttagaaacaaatgttgcactataattcatacaatttgttctaagtctaaaagagtcccaaaatactaatatttagatatttaaaactgaaaatagatatacctatatcactgtaaaaatatagacactggactttgcaaatcatgaatcaacattgggaaacagtcattgtacacatcagtgaacatatgaaattcaaggaggacaaaagaacaaacccaatagtagggatcataattcaaatcaacaagtcaasaaagtctcacatcgccttttaaatttttatttacaaaaattttctcacttactaccttcagtttgctccggcctcttgttttcctttcccgtttatctttattctttttgtataccctttaaactcatatccttcatcattttccacaaaattactttgtctttcatatttagaataaactttaaattgaaagcaataggattattaaaaaaattttaaggtgcacggaaggacacagacacctgatcgttaggaaaacataaacaagaggtcttgaattggaaggagtcatggaagatctgcaaacccaacagtcttctgtgtgtttctctcttgctttctccatttctaatcccccattctttgtcccttctcccccttctctgtctctctctctctctctctttgctttgtggtgtgtaatagcctttgacatgatatatttaattattttaaaacatggtgcattacatatgtcatgttccaggaggtcatgatttaacatggaggagaggaattttcttaggagaggaattttcttctacccctccttctctctttctttctctccccctacctccttccctttctgtttctttcttctttctctttccctcactccagtctctccctgcaagcgtgtctccatctggagtatctgcctttgatttctctgccttgctcaaggtccagtgtgtgatcatgccataaagcacatgsctttccagctttaacgctgtcatcaggtgacttaatttcttagcttttcaagtccattgagtaccatgtgatttgtctagcttctctatttaacagaagccacaaatcaaaggtagttaaccgggttattgaatggttgtcattgagtaggatttatactgctttatcaattgtcaacagctgcggaggacagaaacacaatgaacaaaaaaatgcagctttctcttcaggtggtgataacaagttctagtacacatagaaatcctccactgctttattttctctgtacatttgatttccagtcacaacttgcctttatatcaattcaatcaacacagagactattgactttatacaaagcaattattaatttcctcatcctcacatttatttcacactgttaagctgaatttaactttgatatcaaatgaagtttatgttcttgataatattttcaaaacaaattattcaaacacgtagagtgtgtgtcttcaaaaagtaacattcaaaacaaatggggctgggtgcagtggctcatgcctataatcccagcactttgggaggctgaggtgggtggattgcgtgaggtcaggaaggagttcaagaccagcctgaccaacatggtgaaaccccatccctactaaaaatacaaaagttagcagagtgtggtggcacatgcctgtaatcctagctactcgggaggctgggtcaagagaatcccttgaacccaggaggcagaggttgcagtgagccgagattgcgccactgtactccagcctgggtgacagagcgactccctctccacaacaaaaaaaaattgacattttattttaacccattatacaatcttcaccttcaaaacaattccttgatgtttttcactgtagtcagtaatctggtgttgattgaacatttgacttctgcatcatagaatgcattatactaaggtaagactctgccacactgtctgattactttatccctgcccttccctattgggtaggtatttttgactagttacctcgtgatttcaacagggagccaatagaaattcaacaattagaaagccatgtagaaataattaacagctatgtaagtataataccttgtctaagaagtagaactaaatcaacccctagctactccccaggactttataacttaaatgtagcccaaagtaatcaaacaatagtgtcaactcagctaaacttctttccccctgtgttttgtgaacgtcggaagattttagtctgggcgtggtggctcatgactataatcccagcactttgggagactgaggcaggtggatcacctaagtttgggagttcgagaccagactgaccaacatagagaaaccccgtctctactaaataaataaaaattgtaaaacctcattaaatcccacatctcatttcagtcatctttccctttcacagttaaatctcttaaaagacttaaatcagtgattccaggcctttaccacatattgtttatgctactgcaatctgatttcctgcctccaccactgtattttgctcttgtccaacagaacagtgctaacttttctgtaaagggtaacttttcataccttatctatcctgacttgtcagcattagttgtatttattgaggacccttcttcttaaatgatttttttttccatcctggatgtccacttttgcttactggaaattaaccattcatccacccatagaatttgctgtttcttcagaattctgtcctaggctttcatctcttctcacttgaacacttgtgctaggtgatctycattattcccattatttctgttaccatctctatgaggctgtcttcaaaatacatctccagctcagcccaccttaatgagctccaagtccatgtatccacgaggctcctgcagatcccaaagcaccataaatatcaactaagttctctacatgtttcttctaatttggttttgttcgtggttcctgtatttggcagggcttcctggaaatggacttacagatggaaatttgtagctagaaaatttcaggggaatgctgctggtaggagagtagggagagtgggcttagaagaaagaggagctgaatttcaatgcagttgcaaaataggctttagttaataccacagtaagctctaaagctgaaaccttctgagttgttccaaattgaggcaaaacagttgtgtctttataccaaggcattcaccattttgcctgaccattgaaggatggttaggaaccttgaaagatgtatttcctttcggaaagacagatctttaggaaagcctcagatgagccaacagctggccttagtgagctagttggcatcattcctggtagctggatgaatgaatgcctcatttccaaagagtgatgttggaggctcaagaagtatctattgcagtacacaatatccaaaacatgaatcaaccccagcttggtacagattctctaagattcgtattctctttcatggagaaacttagaagaggaaggttaattggacagaggaaagttttacagtggtgtagcaattctgcaggcaactcttatcatgtctgcctagtttacatgacccacaccctctcttcacatctctgttagcctaagtgcattagaaggtagagtgagtcatacatgcattccagaggtgtctgggcttatccatcttctgcatgcatttctcaggatgtgactactgcacttgtccatttgaaatacaagttggacaggagagtagcaagagataccccaatgtttcacctgaatatgaaattaattcttcccggcctcccctgtataatatcacccctagttcctcccttgctaatggtgacactcttctttgatatagagagatataatcactaggtggcaaccacaaattaaagttcagtggtactcttactatgcttcctggtgaaagcatttcttctcaggaaactagaaacttttgacccatggaacctaaagacttggagacaggaaacatgaatttcccatgttggaagtgacaatgggtgaaacacttctattttcattctttgatatctgcacctgtgtattctacctactggggacacaacaccataaaatgataattactttgaaatgaatgctgcactatggaacatggaaccatggaaccccatcatttaaaagtatcacttccaaaagggtgcatcacctgcagctttaaaacatatttctttgctctatcgggatagtagtttctgggtgttatgacttgcaatgtgaccggcagattccatggtcatgagttccttgtcaaaaaagacagttttaaaaaatcaaatgtgaaattacacatctgcaaatctataaattttatatggctaaagccctgtgggcaggaaagacaaacccttagccggaatagatactgatctcatcaagaagaatcactgacctttcagattaaaagtagtaatacctaataaatgtgccaacaggttttgggggttcaacattgatttattctattagatatttgaacattaggcttgggcagtaaatagctatgatttctgctactatggctactctgttatgaattatttagccaatatgcaatgacagaggtttgctgatgcctgtcaactatgccattctgtttacatggttgcttagtacctgtattagtccattttcatactgctataaacaacttccaaagactgggtaatctgtaaaggaaagaggtttaattgactccctgcagggctggggagacatcagaaaacttacgatcatggtaaaaggggaagcaaacacatcctacttctcatggcggcaggaagggaaagaatgagtgctgagctaagggagagcacctgataaaaccatcagatctcatgagaacacactcactatcatgagaacagcaaggaggaaaaccactcccatgattcagttacctcccacaaggcctctcccatgacatgtggggattatgagaactacaattcaagatgagatttgggtggggacacagccaaagtgtattagtgcccactccaactctgaaaattgtgtatcatcccaattggtgttcttatctgaattgcagaattaaaaaaaaaaacaaaaacaaaaactctacagaaagagtggaattattaggttgagaacccaacatgtcctggaaatattctacacttataattaaattttgtgccttattttaaagtttctgccctttaagtaccaaaaataaatatctttttcaaggcagccttctcactttcacagtcacttaaactttgattaacaatgtcagtttctccttatctttctccaacatatatttgtaggacttaataacagccatctgataccacagtccttatgactgccaattcccaccacagctcacaactcttctgagctattgcacaattcagttcatttcattctgtcagtatcgcatctgaattcctcagtaatcaattgtacaactgtagtgaggggctatcactactccatgtgccctccaattttgaattctctctgtctcggtagtttaatggatccaatgaacatgagtcagctttagaaacagtgctccatgttttattattcaatgcatggtgatgcccatgcatcagtgacaacttcaatagtttttgaaatgtctgagtactctaatttttctactgtatgattgccgtgtaattggcattaggtgcattttggggagaattattgcgacaacatttttttttcaagagggcctctacttcaatcaaaatttccaagtctgagtactggctcagctccagaaactgagcaagtgatgatgaattttattgtatcatctgcacttacctcctgatcattcacctttagtgtatgtacatgtttatcctatacattgagaaatactctcattggctacccatctcccgtcctctcagaacattatgttctaatcattatttccataaccctctgcagttgagaatttctgtctcgacgttgtttattgcttaattgtactcctgctttttcctgtatttaaacatagccagctggtccctattattttgagatccaattattcccattgtttcctgttgtttttaagaagaccaattctataacgaaatcccttattgtcagtcatgtcctagagaggacagccatcattgagctttgcagcaatgctgttgtccctaataatagagtgtcttctgagttcttatgtaaaacatcatcagctggtgagttttctgatcttatgtcacatgtctactctacaatgatcattttctaacaagatatttctgctccccttttgacacagccctgacagaatccagtccctagatactctgctggcttttcctagtatatgctgactaggcccctttcttccattagcaggaccagaactaattttacttaaccctcattaataatctgatgaccaagaaaagaagaatggatagatctctaaaaagtggtgggctctattatcaaggaggaggtatgtaattatgatacataaggggtaagattcagacttatatgaaaagaatgaggcacttcttcaggcccagggagttctggagatctggggttttgttgttgtcaaggacattgactcagaagttccccactccaactctgaaattgtgtatcatcccaatcggtgttcttatctgaattgcagaattaaaaaaaaaaaaaaaaccctacagaaagagcggaattattaggttgagaacccaacatgtcctggaaatattccacacttataattaaattttgtgccttattttaaagtttctgccctttaagtaccaaaaataaatatctttttcaaggcagccttctcactttcacagtcacttaaactttgattaacaatgtcagtttctccttatctttctccaatatatatttgtaggacttaataatagccatctgataccacagtccttatgactgccaattcccaccacagctcacaactcttctgagctattgcacaattcagttcatttcattccgtcggtatcacatctgaattcctcagtagtcaattgtagtacagctgtagtgaggggctatcactactccatgtgcctccaattctctggtcctcatggcccatcagccagcaagtaagtgatccagtttcaaaaattacctctttaaagatcatctcccaatacagtcacagtctgaggtcttaggacttcaacatataaattttgg

SEQ ID NO: 96281 - DNA, 12836 bp, Homo sapiens
ttttgtacacagtgaaggaaagggtccagtttcaatcttctgcatatggctagccagttattccaacaccatttattgaatagggagtcttttcctcattgcttgtttttgtcagctttgttgaagatcagatggatgtaggtgtgtgatgttatttctgggctctctattctgttcctttggtttacatatctgtttttgtaccaataccatgctgctttggttattgtagcctgcagtatagtttgaaattgggtagcgtgatgcctccagctttgttctttttgcttaggattgccttggctattcagactctttttttattctatatgaattttaaaatagtttttttctagttctgtgaaaaatgccgttggtagttagcagcttgtttttgtttgttcatttgtttttgaaacagaatgttggtctgtgccttaagtttgaaaatcctccaaaattttctgtcctttcactgaatatgtggtctcttggtcacaatgcagcactgaattccctgttaatatgcatatcttgggttctttttattcagtacacacagaggttgttcccttgaaaatgagtagtccagtaaaatgccctttgcagagttatatcccatatttctagaaataaattctaccaaatattagcactactgaataacacttttaacaatgtttaaacttgcctttttagttgaaagcaaacataaactcagctgtaatatcttaagttcaaatgcactaattttcaatttcatatcaaatttcaaaatacttttaggtttctattcaacactttggttttcatacacaagccacagagtatactaaaactcatttgggtggcatgtttctcatataagtaaaggtaaagactaaggacaagtaagttctttattttctaccagggtgaatggtaaagtagtaaagatcagtatttcctggaaaaggggaaaattgctttcagcaggagtttacaaatccacttggccattaaacatttttcacagatgacatcaaaagtgttattcacataaatgcatgggaatttttttccaatgtatgtaggtgttattatgttaaataaaacacagacccacttaaacatcatttaatttatggtaggcttttcaacaagctggccagatttggttgatgtttctcaaaaactactaaaatttcaataaagtgaatgtctgtgaagtgctttgaaatttaaaagagctgttgaatgtgtgcaaagatttagctatagggatgttcaatgaatcactgattatcacaaagaaaatgtggaacaacctaaatatgcaataataggagtttgattaaatacattatactatatccataataattttgcccttttggttgcaagaatcacagatacagtcagacaatttcagaataataggtgcttttgcaaagaagcattagcatctctgctgcagggcgtagtcctaactcctacccttctcctctcaaggtggtttattggtataatttttaaagacaccagtgccccctgtttttccctaacttagcagagaagatctgacaaacctattcagtcactatcatgtatgaagcatctctcatattcataaagtgtgggcaagaggctggtatagggtaatagactttcccaactataataggataagagtgattgtagctatcaaaaatatgacagatctttcaaaagtatgtgaaattattaatttaatgatgacccgtaagtcatgattttatactatttggcatagcttcacaaaacacaattttcatatgtattgaaaactaaagcaaaggaaaagtataaaaatttttgtgtaactgaactgacatgatatcagtcataaaatctctgcttgacaatctcatctgtcattctttcaaaaataacttatttattaatgtcaacagtgatgctgctttgcactgtattgaatataaatctgttgttcttttggcatttgggctaaggttggctaaattatcttagtaaataaattagcaaagcacctttttttttttctttttggcaatctctctctataattcctctttacctgtatcagtttttctcttttcctcatatttctcaaatatatatcaccattggttcttctttctcttgattgagaatttctgagaaatgttggtccatagtaaccagtattccaaggttagatgaaataaccaggacttagtgagaaatgattgttcagtaccatggatagcagaacacttatttccccaaatactaacacatactcctccaaattttagctgcaccattgaaaacatttctttcaacatgtctttggctcaggctattattttcaggccaagaagttctagtcagactagccaggctggctatactttttaaactatctgtggcaaaggatcaagatttttcccaccactcgatctaccgtgtaccaatatgttcatcatggaaactgaacaacctgctcctgaatgactactggatacataacgaaatgaaggcagaaataaagatgttctttgaaaccaacaagaacaaagacacaacataccagaatctttgggacacattcaaagcagtgtgtagagggaaatttatagcactacatgcccacaagagaaagcaggaaagatctaaaactgacaccctaacatcacaattaaaagaactagagaagcaagagcaaacacattcaaaagctagcagaaggcaagaaataactaagatcagagcataactgaaggaaatagagacacagaaaaacctccaaaaaataaatttataaaaagttaaagcaaacacacaaaatacaagtagtaatttcttttttattattacataaaaaacaaacataatatagtctgccaaaattgctgtgacagttttaaacagccctgtgatggcatccagttgataaaagtgagtagagccccagtatgtgagagaggcagagagtttccctctgtgacttacctttccactggagatccaagcaacccaggccaagagagagcactttgcttctcctaatccctggagttagcttagggagagtcttggagaaactgtgaaggaaagacaccaggaaaagtggcagaagttttctcagaccctggatgagagtaggatgccattttaaatctgggtgcatacaaagtcagccatgctttggtgccctagcaccatggctacagaggcactttagtcttgtgccagagattgaagcatcttatctggagtggggtgggggcctccacagccagaactgtaaaaaagtgtctcagcagtagtctctggaattgtgctctctcccatcacaggcaggaggagagctgctacagttgcggtttcttctgagcagcaagacttgcagccagggccagcttggcaatctggaactgatctgtgtgtgccattgctgagtgccccatcctcctcccctgagatcgtggtgcaacagagccctccctgctccattcctaggcagaaatctgggtatttggaacacctgcttgcctggaccggtggtctgagccacaccacccttccttgatgtatatggtggtacagagagggtctctgtgctccatgcccaagcagatttctaggcattcagagcgctcattcacctggttcagcagcctgagccacctaccctccttgtgcaaagactggtacagagggaccctctctgctacatgcccaggaagatctccaggcattcagagcgcctgcttgcttagttcagcagccagagtcaccccacccctcatgtgcagagatctttgtgcagcggggctctctctgctccacacccaagaagatctctagacttttggggcattgctcaccaggaccaccaagactgtccaaagatcttggtgcaaggaatccctctctgttcacactcaggcagatcaccagacattctgagcatacagtcatctggttcagcagcctgagctgccccaccatttatggacatagatcatggtatagtaagaccctttctgctccatgctcaggcaaatctccaggcatttagaatacctgcttgcctggtgtggcaacctgggttgcacaaccccttctgttcgtagatattggtgcaggaaggccctctctgctccacacccaggaagatctgcaggcatctgaagcacccactctcctggattaggaacctggaacacagaacttggagcaaaggtggtttcctgactccacatttagacacacttctgggtgcctggtagccacccactggattctcacttgatactggtgcttgtgcctgcatcaggggacctccaggcagacctgcccaactggtcccaccctttatggctcctacccccacagtgctgagcagggacctcagaccaatgtgtattctatgaatcaacccattgcctgggcaacagagaacttccacttctaaatacagataccagccactttgaccacagctggctgttatctacaggcttgtaggacaaacttcacagcccaatataaaacctgttgaaagaagtgcatactgctatagaagaaaaactgaaagaccctcctcagcattcttcacagtcacaccccataaagcacgtaagggaaagagaataatagtaatgacattataaggaaagaaagataaaggaaaagtcctacctgtatgaaaaaaaatacaaaaattagaagtgccagtgtctccaggtgagaagcaaccagcacaagaattctagcaccatgaaaaaacctgaatgtagtgaaaccaccaaaagattgagctacctctccagcaatggtccctagccaaaatggaaactcagaaataataaataaaaattcaaagcgtggattgcaaggaagctcattcagatccaagacaaggttgaaaatcaacaaaaggaaatttctaaagcaacccaggaaatgaacaaaaagataaacatcttaaaaagaaatcaatcagagcttctggaattgaaaaactcacgtaaagaattccaaaatacaaatgaaatctttatcaatagactgaaccaagcagaagaaagaatttcagagattgaagagtggtcttttgaactaacccaatatggcaaaaataaatatgaagaattttaaaaatgagcagtcctcatgaaatatgggattatgtaagaggactaaatgtatgaattattggcattcctgagagagaaggaaaaaaacaaacaacctggaaaatatagttgaaagaataattcaagtaacatgcctaatctagctaggaagatagatgtccagatacaagacattcagagaatacctgtgagatactatgcaaaacaaatatcaagccatgtagactacaaaccatgtagtcaccagattgagcaaggtcaacgctaaagaaaaaatcttaaagactgctagaggttttccttaggcaaagatcttaagatctttccttaggtaaagatcttaaagatctgctagaggacagatcatgtacaaagagaaccccatcaggctaatagaggacttatcaccagaaaccttacaagccaggagagactgggggcctattttcagcattcttaaagaaaagaaattccaaccaagaattctatatctcaacaaaggtttataagtgaaagataaataaaatattttccagacaaacaagtcctaggggaattcattaccactagaccagccttaagagagatccttaagggagttctaaacatggaaatgaaagaacgatacctgtaaccgcaaaaacacacttaagtacatagcctgcagaccatataaagcaactacacaatagaaactacaaagcaaccagctaacaacctcatggtaggatcaaagcctcacttatcaatattaaccttaaattttaatggtctcaatgcacgacctaaaagacacagagctgcaaggttgataaaaatacaagactcacttcttatccaagaaaacaccaaatagcagatgacgctggtggagcgagggggcccggaggactcgggggccctgggatggggaaccacagtggctttcgtggaggttttggcagtggyatctgggctgtggtcacagccatgracagagctggggctgaggccacggagctcactgaggcaaggccgaggatgagtggatgcccrtcaccgagctggacctcctagtcaaggacatgaagatcaagtccctggaggagatctacctcttctccctgcccatcaaagaatcagatatcattgactttttcttgggggcctctctcaagaacaaggatttgaagattatgatggtgcagaagcagacccacgtcggccagcacaccaagttcaaggtgtttgttgccattggggactacaatggccacatyggtctgggtgttaagtgctccaaggaggtggccactgccatctgcggggccatcatcctgrccaagctctccattgtcccygtgtgcagaggctacaggggtaacaagatctgcaagccccacactgtcccttgcaaggtgacagaccgctgcagctctgtgctggtgcacctcatccctgagtccaggaacattggcatcatctcagcccctgtgcccaagaagctgctcatgatggctggtatcaatgactgctacaccttagccaggggctgcactgccaccctgggcaacttttccaaggccacctttgatgccatctctaagacctacagctacctgacccccaacctccggaaggagactgtattcaccatgtctccctatcaggaattcactgagcacttcttcaagacccacaccagagtctccatgcagaggactgaggctccagctgtggctacaacataggatttttatacaagaaaaataaagtgaattaagcctgaaaaaaaaatacaaggctcatcagtctgctgtgttcatgaaacccatcttacgtgtaaagacacccacaggctcaaagtacagggttggagaaagatctaccatgcaaacagagaagaaataaaagcagcggtcacagcccaggtgctgtggctcacacctctaatcccagcactttgggaggccaaggcaggcagatcacttgagcccaagatttcaaaacaagcctggacaacataggaaggccccatcctttaaataataaacaaaaaagcaggggtcactattcttctatctgataaaacatactttaagccaacaacagtaaaaaaaagacaaagaaggccattacgtaatgataaagggttcaattcaacaagaagtcttgactctcataaatatgtatgcatcaactttggagcaaccagatttataagcctgctaaaagacttagacagccacacaataatggtaggggtcttcaacccccaactgacagcagtagacaggtcatgaaggcagcaaactaacaaagaaactctgaacttaaactcaacacttgaccaactagacctaatgaaggtctagaaaacactcaacccacaaaccacagagtatgcattcttcttatctgcacatggaacatactccaagattgaccacatgctctaccataaagtaagtctcaatgaaataaatatcaaatcaaccatactctcaaaccacaatagaataaaaatagaaatcaataccaagaaaatctcttaaaactacacaattacatggaaagtaaataatttgatcctgaatgacttttgggtaaacaatgaaatcaaggcagaaatttaaaaattatttgaaataaatgaaaacagagacacaacataccaaaatctctgggattcagcaaaagcagtattaagaggaaagtttatagtgctaaatgcttacctcaaagagttagaaagatctcaaattaacgatctaatatcacatctagaggaactagaaaaacaagaacaaactaaccccaaagttctcagaagaaaagaaagaactaaaattagggcagatattgagaatcaaattgagacccaaaaattcatacaaagtatcaacaaaactaaaagttggttctttgaaaggataaacaagatcaatacactagattaacaaagaaaagaagagagaagatccaaataagcacaatcagaaatgacaaagaatgacattacaactgatcccaccaaaatacagaaaatccttggagaccattatgaacctctctacacacaaaaactagaaaatctagaggaaatgataaattctgggaaacacacaatttcccatgattaaatcaagaagaaattgaaacattgaacagaccaacatcaagttctgaaattgaatcagtaataaaataaaaactaccaaccaataaaagccccagaccagagggatttacagccaaattctaccagatgtacaaaaagctggtaccaattttactgcacctatttcaaaaaatcaagaagggagtcccttctaacacattctacaaagccagcatcaggccaataccaaaacctggcaaagacacaatgaaaaaaagaaaattgcaggccaacattcctgatgaacatagatgcaaaaatcttcaacaaaatgctagcatactgaattcagaaacacatcaaaaagctaattcaccatgatcaagtagacttcattcctggaatgcaaggctgattcaatgtacacaaatcaataaatgtgactcaccacataaagaattaaaaacaaaaacaatatgattatctcagacacagggaaagcttttgataaaatccaacaattttttgtgataaaaaccctcaagaaactaggcatcaaaggaacatacttcaaaataataaaagcaatctatgacaaacccacagtcagcatcatactgaatgggcaaaaattggaatcattccccttgagaaatggaacaaaacaaggatgcccactctcaccactcctattcaacatagtactggaattggtagccagagcaatcaggcaacagaaagaaataaaaggcaaccaaataggaaaagaagtcaaactatctctcttcatggacaatatgattctatacattgacaaccctaaagactccaccaaaagcctcttggaactgataaatgacttcagcgaagtttcaggatacaaaatcaatgtacaaaaattagtagcagttttatacaccaatagcattcaagctgagggccaaaacaaaaatgcaatccgatttacaatagccacacacacaaaaaaatacctggaagtacatctaaacaaaagaagaactacaaaacactgcaaaaagaaatcagatgacacacacaaatgaaaaaacattccatgctcatagattagaagaatcaatatcattaaattggccatgctgcccaaagcaatctacacttttaatactactcctatcaagctaccaacatcatttttcacagagctagaaaaaaaactattctaaaatttatacagaccaaaaaagagcccaaatagtctaagcaatcctaaaaagaaagaacaaagccagaggcatcacattacacaacttcaaactacactatatgctacagtaccaaaacagcatggtactcttacgaaaagagacacgtagaccaatggaacagaatagagaacccataaataaagcctatgccatctgatgtgtagaacacctaaagccatctgatctttgacaaagttgacaaaaataagcaacagggaaataattgcctattcagcaataaataggactgggatagctttccagccatatgcagaagaatgaaactggatcccatatactacaattaactgtatacaaaaattaactgaaaattgattaaaaatttaaacataagacttcaaactataagaattctagaagaaaacctaggaaacaccaatctggacatcggcctggggaaagtattgatgactaaattctcaaaagcaattttaacaaaaacaaaaaatgacaagtggacctaattaaactaaagagcttctgcacaccgaaagaaactatcaacagagtaaacagacaacctaaagacagggagaaaatgttcacaaactgcacctgacaaaggtctaatatctagaattcacatgaaacttaaacaattgaacaagcaaaaaacaaataatcccattaaaaataggcaaaatacatgaacagacacgcctcaaaagaagacacacaagaaacatgaaaagatgctcatcatcactaatcatcagagaaacgcaaaacaaaaccacaatgagatagcatctcacaccagtcagaacggctgtgactaaaacatcagtaaacaacagatgttggcgaggctgtggagaaaagggaatgttcctacactgttggtgggaatgtaaatcagctctgccaatacagaaagtagttttgagatttctcaaagaagttaaaacagaagtgtcatttgaccatgcagtctcattaatgagtatatatcaaaaaaaaaaaaaattctaccaaaaagacacatgtactcacatgttcatcacagcactatttgtgataacaacatcaaggaatcaacctaggggcctatcagcagtggaatggataaagaaaatatggcacatatagactatggaatactatgcagccatagaagagaacaaaattatgtccttttctgcaacatggatgcagctgaaggccattatcctaagcaaattaacacaggaacagaaaaccaagtcctgaccattctcacttataagtggcagataaacatccagtactcacggacataaagatggcaacaacagacaatggggactactcaaggggagagggagagggtggggcaaggtttgaaaaactaactgttggctactgtgattaatacctaggtaatgggatcatttgtatcccaaacctcagcatcacacaatatatccagataacaaacctgtgtatgtacccccaaatcaaaactaaaaattgaaaaagaaaaaaaaagttttaaaggcaaatcctccattgatatacttactttgttacatataacgccatagacaatttattcccctcccccgcccaaatttgtttgccgaaacgtaatccccaatgtgacaatatttgaaggtaaagccttcaggaggttatttgttcccttataaaggaggccccagagagatcctcctcccctcccaccatgtgatgacacagcaaaatgatgaccatctataaaccatcatgcaccaaatctaatagtgccttgatctttgacttcccagctcccagagctgtgaaagataaatttctgttgtttataagctatctagtccatgttttttttatagctggctgaacaaactataatagatgacttataagtagttttcacactggccttattccacagaccagtctttgaatagtaatgactaaaaaaattaggactttttgtctctcaatgggttctataattagcaaccacaataatgtttcaagtacccaaaaaatgtcatataatgcaatcacttaaaatgaatataagcaaagaatatttactgatgtgctgagtttcttccatacattaatgggaaaaagcatattagaaaacagtatgatcccacttttattaaagaacaagagcaggtttaaagagtcagaaagtataatagtggttacttctgggtaatggacttataaggattttttttcctttgttgtttatgtttcattagctatatatgctaattttgtacagtggtcatatatttcttttatctaaatattaggactcattgaaatggattactattttaaaattgattattcattcaatatttttatatttcaatctagggtctgttactgagtccctaagtgcttttataaatggctggataggcacctctgtaaataaagtacgtagccttagaggctgaaacaatgtaagtgcacaggaaacatttattgtaagaaaatgaaaggagtgaagttctttggttcttatttttaaagcattatgtgtcaaaaatgtatttggttgagtgtcatcaatttcatgtggcctaacctaatgttaagtggagttacagctaagtaaaatgttctgtcccgctttgagttaacaatcaatcatgtgcttacactaaatggtggataatcattacttttatttattttataaaaatgtagtttggtatctccatttagaaaaaaaattacttcattaaaatgaatcaacttaaattgacatgggcttgttactctaaatttctacttgatttccttattgtaaattatcttcaataaattaatccttatctccctaggccaggtctttgacatgtctggaacaaaactcagccaaatattaaaatgggaggacagaaacagttcaactgaaacatattagcaaaatctaagttggatgaatttatgctttttaggatgcagagcactcatgaaattgacatttgtaaagcagcatttgtagcatattgattaaaaatattcaatatatggattttttaaacagtgaaccactcattactctaatgcctcattaatatggtgtcaatctattcagaacaatgcataatagcagtgcactttctcagcatgttattctattgttcaatttgaaaaacaacaacaacaacaaataatctcaagccttttccttaaatgttgggggtttgtttttcaaattatatgggttttgtggtactagaagttcaaattttactaatgtaaactacatttctctaactaaagaatcatggtcaatgtagagaaaattattattatagaagaaattgaatcagaaaaacacctttcaaaacctcctaattccctgcc

SEQ ID NO: 96282 - DNA, 49471 bp, Homo sapiens
atgatgctggcctcataaaatgagttagggaggattccctctttttccattgattggaatagtttcagaaggaatggtaccagctccttcttgtacctctggtagaattcagctgtgaatccatctggtcctagaccttttttggttggtaggctattaattattgcctcaatttcagagcctgttatttgtccattcagggattcagtttctccctggttcagtcttgagagtgtgtatgtgtccaggaatttatccatttcttccagattttctagtttatttgcatagaggtgtttatagtattctctgatggtagtttgcatttctgtgggaacagtggtgatatcccatttatcattttttattgcatccatttgattcttacctcttttcttctttattagtcttgctagtggtctcccaattttgttgatcttttcaaaaaaccagctcctggattcgttgattttttgaaggctttcttgtgtctctatctccttcagttctgctctgatattagttatttcttgccctctgctagcttttgaatgtgtttgctcttccttccctagttcttttaattgtgatatttgggtgtcaattttagatctttcctgctttctcttgtaggcatttagtgctataaatttccctctacacactgctttgaatgtgtcccagagattctgttatgttgtttcatagttctcattggtttcaacaaacatctttatttctgccttcatttcttatttacccagtagtcattcaggagcaggttgttcagtttccatgtagttgagtggttttgagtgagtttcttaattctgagttctagtttgattgccttgtggtctgagagatagcttgttataatttctgttcttttacatttgctgaggagtgctttacttccaactatgtggccaattttggaataactgcaatgtggtgctgagaagaatgtatattctgttgatatggggtggagagttctgtagatgtctattaggtccgcttggtgcagagctaagttcaattcctggatatcctttttaactttctgtcttgttgatctgtctaatgttgacagtggggtgttaaagtctccagttattaatgtgtgggagtctaagtctctttgtaggttactcaggacttgctttatgaatctgggtgctcctgtattgggtgcatatatatttaggatagttagatcttcttgttgaattgatccctttaccattatgtgacagccttctttgtctcttttgatctttgttggtttaaagtctgttttatcagagactaggattgcaacatctgcctttttttgttttccatttgcttagtagatctttctccattcctttattttgagcctatgtgtgtttctgcacatgatatgggtctcctaaatacagcacactgatgggtcttgactatccaactagcaatttggataaaatatcttctaattggagcatttagcccattgacatttaaggttaatattgttatgtgtgaatttgatcctgtggttatgatgttagctggttattttgctcgttagttgatgcagtttctttctggcatcgatggtctttaaaatttgtcatgtttttgcactggctggtaccagttgttcctttccatgtttagtgcttctttcaggagctcttgtaagacaggactggtggccacaaaatctctcagcatttgcttgtctacaaagtgttttacttctccttgacttatgaagcttagtttggctggatatgacattctgggttgaaaattcttttctttaggaatgttgaatattggcccccactctcttccggcttatggagtttctgctgagagatccactgttagtctgatgggcttccctttgtgggtaacccgacctttctctctggctgcccttaatattttttccttcatttcaactttggtgaatctgacaattatgtgtatttgagttactcttcttgaggagtatctttgtggcattctctgtatttcgtgaatttgaatgttggcctgccttgctaggttggggaagttctcctggataatatcctgcagagtggtttccaacttggttccattctccctatcactttcaggtacaccagtcagacatagatttggtattttcacatagtcccatatttcttggaggctttgttcatttcattttactcttttttctctaaacttctcttctcgcttcatttcagtcatttgatcttcaatcactgataccctgtcttccagttgatcgaatcagctactgaagcttatgcatgtgtcacatagttctcctgccatggttttcagctccatcaggtcatttaaggacttctctacactggttattctagttagccctttgtctaatcttttttcaaggtttttagcttctttgtgataggttcaaactttctcctttagcttggagaagattgatcatctgaagccttcttctctcaactcttcaaagtcattctccatccagctttgttccattgctgatgaggagctgtgttcctttggagggggagaggcactgtgatttttataattttcaacttttctgctctgttttttccccatctttgtggttttatctacctttggtctttgtttatggtgacgtacagatgggattttggtgtgaatgtcttttctgtttgttagttttccttctaacgttcaggaccctcagcttcaggtctgttggagtttgctggaggtccactccagaccctgtttgcctgggtatcagcatcagaggctgcagaacggctaatattgctgaacagcaaatgttgctgcctgatcgttcctgtggaagctttgtctcagaggggtacctggccgtgtgaggtgtcagtctgcccctactgggggggtgcctcccagttaggctactcaggggtcagggacccacttgaggaggcagtctgtctgttctcagatctcaaactctttgatggggagaccactactctcttcaaagctgtcagacagggacagttaagtctgcagaggcttctgcttccttttgttcagctatgccctgccccccagaggtggagtctacagaggcaggcagccctcctgagctatggtaggctccaccttgttccaccttcctggccgctttgtttacctactcaagcctcagcaatggcgggcacccctcccccagcctcacagctgccttgcagttcaatctcagaatgctgtgctagcaatgagtgaggctccatgggcatgcgaccctccgaaccaggcatggaatataatctcctggtgttccatttgctaagactgttggaaaagcgcagtgttagtgtgggagtgacctgattttccaggtgccatctgttacagcttcccttggctaggaaagggaattccctgatcccttgtgcttcctgggtgaggagatgcctggmcttgctttggctcacactccatgggttggttgcactcactgtcctgcacccactgtctgacaagccccagtgagatgaacccagtacctcagttggaaatgcagaaatcaaccatcttctgtgccgctcatgctgggagccatagactggagctgttcctattgggccatcttggaactgccccccatattagtccttcttgaacttgcttaattcacttagcataataccctctaggttcatccacattgtcacaaatggtaccttttgtcaaaccttggcaactgaattgacatttctactgcttccatatacagagaaattatactaactgaacttgtgaaaataatttattgatattaaattaaaatgctcatgaatagtttttgaattcttgtaagatcagatatggagaaaaatctcaaatttgtctttattttaatgaatgaaaaatatttatgattttgaaataattagcaatgggaaactaattaggaaaattgagatttttagattgttctactgttttgattattattgacataacataatatatcgtatatttctatatttactttaaaatacatgtttatatatacatatatatatatagacagagccatcgtgagtaaattagtgtgtatgtgtagtgggggtgtttgtgttttctttaatggatactctagcagcagttatctagtgtatgtcatgtactaattaatattgcatcccagaaacaaatcctaaaactgctttaaatttgtatcttttctctctcttctttctaagaaagaaatgtatatatggaacaatactctctgaatttgtttcattttagtataccacatgatagtgtggtgaaggagtgtgaggacaggcagacagagatgggagaaatggagagacagagagagaaagaaagaaagaaagagacagagaacttattatagtgaagccttatttatctttgtatcatgaggggctagctcaggacctggcatgaatggagcttataaagtgtatattaaaataaataggccacttatgacatgggttaagtcattcatattccaaatttaatgtaagaggttcgttctagcataaatatatatcttaggctttacaataaagtaaaatattgttacttttatacatatgatataggtttaattttgagagcacgcacaatatttatttaaaaatgctccttaaataaatttaaaaatatatttctacatgaatataatgtaacattaccaattttattgagtctctgtttttttcttataaaaagaacttacaatgataatacataagtaaaactgtaataattatacctactagacacataaaagctttgaattgaagaaaaattttacaataatctgtgtcaggttatgatttaaatttagaattactgtattctaaattctcaaacagagatcatcaatattttttagttatggtactgaattcaatagaactttaaatgtacatcatgtatgtgagctgacatagaggaatcatgattaagtaaatcaaaatagtattaatgttcaatgacatgtgktagagagaaatatttgatttttaagttagaatttaggcattcaaaacaggaatcacaggaataacaaaaggacataactctgaactatgcacaccagataagcataaaatttattttgcaaatgtttttgcagtttagtcctttgcatcagtttatattgtgggaaagtaagggagcaagaacagctgaaatgatataacacataaaaatatcagataatttttattgtaaacagatataagctgaatttgaaaacaaaattgataagaaattaaagaggaatatatttcccacttgttcctttcatatataatccaaagcctaaaattatgattctttatagaaatatcttcctgcttttctgtcatttgtcaaaagaagaataaaatcaatatttatttttagggctacattactgcatcatgaacctaaacttaattctgactctagaaaccaagtcaaaccatcaagaaatgtaaaccatgagcaaatgagaataaatgcaataaaatcacatccaatataaaaggcacggagatactacaaagagtaagaaacatcagaaagggtttaggtgaaaatataataaatattccttttctaaaatgttgtggtagtaatagtttattacttaatctacaaaaaatattgtcagtatttccatacttaccgaaatgagtatgatacctcagcctcactccttcagtatctttttaaatctattaccgtactacagtatcatttcaacaatgttaaatatttaatcacaatttaaatattaaatattaatgataaggataataatcctttactatgacctatactattcataccgttctggaaatataacatataataccagcagatcgcaagttagatagaccaaaaccctctcaaaaccaagaacaaacaaacaaaaaatacaaagcaaaacatttagcctctgcatttaaggcatgtttttcatcaatcctgatgtgctgccgggaatatacaaagaagaggtaagacatctgggattcccatgggaaaccagaaacgaatatataaatgaaatgttgagaagcccagccatcaattctccatagtaagctaaagggtcagcaaaacaaataaacttggctgcctacagcctgctgagtaactcctyatttttatttgcctgccacaccatgaaagactctgcagttctaaagaagctttgtagagaaaagcaaagatatcttytgtgagggtttcttagtttactgaaagtaggagaaccttcacattaaaaggaatcagcatgatcaagcagaaggcttggtggaggtgctaacatggttatstcatatccatcaagttggagtttttctagaataacttttaaattgagtgactaaaattcatgggccagacaagtactttcccaaactttscagagtcaaagaaacacagattcagcaggaaaaaaaaaacaaaacmaaacacacamacacacacacacagaagacattcacagttttcatgaccaactcttcctttaatttacccttggtttaaaataagtacagcaagctcataagccagattcatcctaaatgtgtttcatgctttaatttctcagtcaattgatggtgaatgagtctggactttggacagcctacttattccaatagtcaaagtggaatatagctgtcctcatggaaaagatcatcaaattaagcaatatagcacaaattacataaaagctttctaaaataattttatataataggaatttatgcacttaaaattaaatacaacggaaaggatttctggttgagtctaagaaagttttccatgagatcttaattgttctaataagaagatttggattctcttctttagatttattggaatgttcatttggacatcttatttattttcactttgtttatcttaatgttgggataatagaaagcatagatattgagaatgcatactctactattggtattttttttgtcaaaatgtataatttattttgaaatgttaaatagtgcttatgggctgartcatggctcattactcagaattcatttgtttgtgttctaaccccaagtacctcagaataggactacatttggagacagggccattatggaaaaaactaatataaaatgagggcatatagagaatatcttatatggacataaggacaaacacagagaaggaagtccatgtaaaaacactgaaggaaggcaaccatctacaaaccaatcataatggctttagaagaaaccaactctgttaatcacactttgattacacacttctagcctcctgaatgtgagaaagcatgttccttggagagaagcacaacacactgatcattagagaaatgcaaatcaaaaccacaatgagataccatctcacgccagtcagaatggtgattattaaaatgtcaagaaacaataaatgctggtgaggctgtagagaaataggaatgcttttacactgttggtgggaatgtaaattagagctaggtctttgagattatgttgattaattgatatccaayacaaaccaagttcaaagtagatgagtagttagagagagggtaaaaaatggagagttaaaaattaataaataataaagcagtctagatggtatacacactacttttaagggagcttttttttgaagtttagtgaaacttatgtaacttttaaaaatttcaattttatttgtaacttctgagtgattggttgtgttaaaaaagttaccatacaatttcccatcttaacaatttttaagtttgcaattcagcaatgttaaagtatatttacatttttgtgccacaggtttctagaaaatgttcatcttcgaaaacacattgaacaacataccattttccctttactccagcccctggtatccactattccactttctctttctatgggttttactacttttgacaccacatgtcagtgaaatcacttatatgtgtatttatctttttttgactggcttattcaacttgttataacatcctcaagcttcatcaatgttgtcacatacgatagaatagaattttccttttttacaagctaaaaaaatcattcatttcatttatataccatgttttctttgtccattcatccatccatggacatttgtgttgctttgctctcttgactattgtgaataatgttgcaaagaacatggatgtgcaaatatgtctttgagatcctacttttaattattttggataaatacctagaagtaacattgttgggtcatatggtaattttattttattttatttttttgaggaacctccataccttaactatacgggtgtcaccatttttcattcctaacaataatgcacaagagctcctatttatatatattatcttcaatactttttgttttctgggckgtgtgtgtgtgtgggggggggggtgtgtgtgtgtgtgaatatatgtattcaaaaatattttgaggtggctaatggttatgatgtgatagttcattgtaatttaggtttacatttctctaataattagtgatgttaagcatcttttcatatgctttttggccatatgtctatattttctgaataaatgtgtattcaagtctttgaattattttaattgaatttttgctattaaattatagggaattgtcatatattttgaatataaaacacttagctgataaattatttaccaatattttctttcttgcaacctatttctatggcatcagttgtaatgtcttctctttcttatttctttttgtttttggcttggtctttgttgtgtctccaggctgcagtgcagcagcagcaccatctcagctcactgaaaccctcacttcctgagttcaagcgattctctcatgtcagcctcctgagtagctgggactacaggtgcatgccaccacacctggctaatttttgtagttttagtagagacagggtttcaccatgttgcccagactggtctcccactcctgggctcaagcagtcagcctgcctcagcattccaaagtgctgggattacaggcataagccaccatgctcagcctgattttaattatacaactattcgctttttttaatcaagaaaacaatttcttgattttgttgatcttttcaaaaaaagaaagcaataactcagttttgctgatttttctctattttctattgtatttakttctgctgtaatctttattacttttttctttctgataattttggtcagttctttgatatgtaaagttagattgctttagatatttcttctttttaacataggcatttattactatmaactattttcatagtattgtttttgctacatttgtaagttcaggttccttttttcacttctttttgtgtatcttctacagcaagcttgtccaacctgcagcctgacaggtgcatgcagcccaggacggctttgaatgtggcccagcacaaacttgtaaactttcttcaaacactgtgatttctcttacgattttttcccagctcatcagctatggctagtgttagtgtattttatgtgtgtccaagggcaattcttcttttcccaatgtggttcagggaaggcaaaagattgggcacccttgttctataggtgtattttgtggttaccaggaggattgcatgaagtattttataataaacattatataataaaacaaatttaaaaataaataaataaaatataaataaaataaaatataaaattaattttatataattataaaataattacaaattataaaaataaaatataaataaatattaaataaaataaacattttaaaataacagttcattttaaacaaaaaaccctttaattatacatgaaaagtctattcctttacatctcccattcctactttatgttagcaatatcactagttgtatattttgtgttgtgtcccaattaatataaatgtaatgttacttttatgcttttctcttttaaattgcatatcagaattaaaagaaacttgtkaagcaacattaaaaacttatgggattttatatttaattacatatttatctctaccagagaaatttatacttttacattcattcattttgctacctagtctccctcatttcaacttgaaagactcctttttgcttttytgtaggacaggtgtggtaataattaccttcttcaaccttttttaaacccgagaaaatattcaattttccattatttctgaatgacaggtttgccaaatgaatgtcttgtgtggtaggttttttttttcttttctgatttttctttcaacactttgaatatgttacatcacttacttttggtttaaaaagatgtctgctggtatcttgttgataataccatgtgagttcccttttatgtcatgattcatttttcttctgcttccgagattctttctttgtgacttttgaaagtttgattatgatatttattgatgcaaaatttttgaattgatctcagtgtacggtagttgtattttaaaacaattctatgtccatattcttcctcaaatttgggaattgtctgcctgccattatttctttaaatagactttttatctcaatcttttcctcttgtcccatgagggctctcataatgcataactggtcaggttaacaatgtcccataagcctccggctttcttcattttattatgagattcttcttgctcctctcccttaatagcttgaaatggccaatatttcaaattcatgaattatttttttctagctgaacaagtcatctattgaatttctctagtaaatttttcaatttagttattgtattatttacctccagaatatctatgtggttgttttctataatttttgtgtctttgttgatacttttatttcatatatgtattattttcctgatttttaaaaacttgtctatgttcttttagttaatcgagcatctttaattatttttgaaatttttgataggtatttaagatattttgaattttttgacaggtaatggatagatctttgttcattcaggattgaaaaaaggtttactttgttcctttaaacaggtcatgctttccaatgtctgcatgttttgcatttctttgtttaaattttgagatttaaagaaacacccacatctcccagtctttatgtactggcttagtgtagggaaataccttcatctatcacccctcctagagattctgggagttttgtgaaccattccaagagctgtagcctctccaggcttttgaatgtaattactaagttaaatccagtttttgtttgtttgtttgtttgttttcaggattttgtaatattttacttcacctgttgtcattctgtagtaataatgcagctcttctggtactgccctaaactgccccactgcctttattcccaggcattcaaatgctggggtttctataggtgatttaagctcagtgacagaaatcagacccttgggaagtctctaaggagccagaacattagaccacatttcaattagagcactagaatattctgaatttgtctatatatttacatttaccagtgactttttatatttttatttgttacatgttagtgtccttttcctttagagtgaaaaataccctttgcatttcttcttaaacaggtttcgtgttggtgaattctcctagttttatttgtcttgaaaagtctttatctcttcctcatatatgaagaagtgctttgatgagtacagtatttttggattaaaggtttttcaaatttttgattacttcagcatttggctatattatcccactctcttcttgcctgcaagtttgctttyttttctttctttctttttttttgttttcactgaaaattcactgaaaaccatttggtaacactattgaatgtgttatgttttgttgttgttgttttgttttgtttttctatctctcctgctgctttcagtattgtttttgttctttgatttttggtaatttgattataatgtgctttgggaattactttctgcgttgaatttgtctggtgttgtccaagctaactgttcccagatattattgtctttctccaaatttggaaaacattgagttattatattgagtttgttttctagtcctttcttttctcatatcctctagaaacttaaattatgtggaggtagttcccttcatagtgtcataaaatttctgtggccgccattctttctttttacttttatccctctgattgggtaattacatgttttctttctttgagcttactgattctttcctgtttgatcaagtctactgttaaagttttctaatgagtttttcagtttaacaattttatcctgcatttcaaggatttcatttttttattattttgatttctttctgaaatgtctaatattgtgtctgcattattttccaagtttcttttagttttttgattatggtttatgtgattcctgaacttttcaaagagatttattttgaatttgtygtcagatatttaagcatcttcgaatctttttgtgcattattgaaacttgattggtttcttttggagatgtcatatttccctgttttttttttttttttttaacaatacttgstgtttacattgatgcctgcatatttaagaagatggccacttgattcagctttttaatgtgttatgcagtggtgttaaaatattactgcttaataccagagctgaatcactaccctgagcattctttctgttctgaggatggcttatatttgatagcagaacctaaatagtgcattagagctaaatctcttccatgctgttgttttcctgtctggggaagacttatcatgaccatgaaaacacaatgctgcaccagaacttaaacccaaagccgtaataatttccgggttggggaaggcttaagaaataactagaacttagttacttacctgatagttgtttctgggtcagagaaaggctctgtatgatcacctgggwtatttgtaaaatctgaccaaagattctagccttcccctggattgtgcctcctgtactactgtagtgctggctagcccccccatcaatgtgaattccctgttgataggaacacaaagcgtctgccaagatctgtttgccatttgctgtgattagtgcttctgctctttgcttccaattcaacccaggtggttcagtccttctgacactcctaatacctcctgtgggatggaaaaaagaagatttctcacaatgattcacaccctgacatggggactgagcgtccacctgcaattattttcttccacctgggtaattgcaggtacagggaagttttctgtgagtggtgctattttggtttggagaatgggttgatgcagcacaaatgacctttcttctttctggtcatggattttttaatttccatgaaccaataagatttttcacctttctcctgagctccggtgcattcagagtggtatttttatatttgaatagttgctagttgtacttttaagatggattgatgctagaggtcttcagttccaccatcttgctgatgtcactactcaaaaatatttttacatgttaggaaattattttgtttttaggattttgtgtctacgtgacacagacatgaaaagagatgtactcttatcactgaaacttttcgtatactgttttggttgtgtgcattttctagtcatgaatgattatttatttaagccatatgttttacacatagactttcttaaaaagagactagatggttctatgtgtcagaatatagagacagaatataactacacactaataatttctcaactctttattttagaagtgtaaataacctttattttaatatttttcatattacacctctgtaatgcagagaaatttttatcttcaggaaatggaaaattttgtccagagttcatgggaagatggtattgtggtgctttctctggggtcactgtttcaaaatgttacagaggaaaaggttaatatcattgcttcagcccttgcccagatcccacagaaggtcagtaaaacctccaatcctgataagtagctattcacataatgagaaagtatagcttttgcctactgatccttgctgttactggaaacaacactcttgattgtggtttgtttataataaaatagaaataataaattaagcccctacatcttattttacaatttgaaatctaaaggcatgtgccaactgttccaaaataagttctgacatttattatttccaaggaccagaaaaaagaaaactgataaaaaaaagataaagaagaatcagtctcaatctcaagaatatccttctcatatttgagtgcataaaaactgtattcatggtacttttgcatagaaataaaagctcagcttaatgtaatctttctcaataattagagtttttaagagttaaatgtcaattgcaattatattatagtaacttaattatttaagtaatgtaattatttataatactcaactgattttaactttgttactactataattccagaatttcacactttagatagtgctatatatraactatccaaaagatattttactttctatttagctaaaatacatcaaactcaataaaggcaagtacactaattaggaatgtgaaatcttgtaattttaattacaaaattatctgttaagtagtttgaaaaatctgtgccatcatttcttttcaaatgtatgacattttttataggtttcccacaattaaaaattattgaaaacaggtacaatcccaaagaaaatttatcattgaacaacggaacataagtaattctctagcttatacttcttcaataaaacagttaaatataagaaagcagaggtcagaaagaaaatagagaagaaaagacaactgattatccaaaacacacacaaaattgaaagcaaattttatctgcggggaatggtaaatttgatggtagaagtagaatagttccatggtttaaaatgacatagggatcatgtacttataaaatttttaattcttattagaaaattgagtagccagtgctgaattactttttaattattcactgatattctcattttcagatatttttgattgataataaaataataattgtatacttaataggcaacaagtacacattatctgaaaagacctttgtaaaatgtcctactatatcttttagtgtttacacagtacgtctacatacccctgtctcaaccatcacctgaagtacaatgagtgtataatttataactatatctacatacttagaatgctaatgtcctgtagttcaatctgtgaagtacatgtgtttcttccataggtgttatggaggtacaaaggaaaaaaaaccatccacattaggaaccagcactaagctgtatgattggataccccagactgaccttcttggtaggcctatgagaaagtaaaaatatgaactagatgaggaaaaatgaataaatgttaaacagtgagcaaattcagcaaatatttaaaattataaaactttattttacttatacttttgaagcagatataattaaaggattgactaaaattgtatagatagactcacactttctattgttaagatgagagtgacaggaaattcaggaggaattaatgcctctttttctgaagatagaaatgatctttactagcaatgctccatgtgctcaccttctaaagaaaatgctgtacgcttcagtgagttatctcataattcccatctttggtgctgaaattattttaaaaattcataataaaatatctcaccatttctcattcaatttgcatacaaggtcaccccaaaccaaagcttttatcactcatggtggaatgaatgggatctatgaagctatttaccatgacgtccctatggtgggagttcccatatttggtgatcagcttgataacatagctcacaggaaggccaaaggagcagctgtagaaattaacttcaaaactatcacaagcgaagatttactcagtgtttgagaacagccattaacaattcctcgtaagtactactgattgtaaagactgatctaacattgattatgttatacattatgccaggaaatgttaaatataatcctggtagacattttaagggattttcctccgcaatattaagtcattaatcaccttggtattggaatagtcctggatattatagttcatagtgtgtcaatcttcatggaaatattaggtttaagttaacaactggcttactaaacttttattcacctctttgttttaccccattttgttaagaatatactctttttcagtctccccactatatctgtttaatgctatgcaaccaataatgttcacgtcacaaccagcatcaatcttttacccaacaaatttttagcttgcataacatatactacagtttatctacctgtcttttatgaaaacaaaactacaactttctaatttctatgtgtgtttttgccttccagttacaaggaggatgctatgagattatcaagaattcaccatgatcaacccataaagaccctggatagagcagtctcctggattgagtttgtcatgtgccacaaaggagccaagcacctgcgatcagctgccaacgacctcacctggttccagcactactctatagacatgattgggttcccacgtgcctgggtggcaactgctatattcttggtctcatgatgttgtttattttcctctcaaaaatttaataaaactagaaagatagaaaagagggaacagatctttccaaatttagggaagacctgatggggtaatcctgttaattccagccacaaagactttagtgaaaacatgttcccttcctattttcatactatctattctgatattttatcttagctaagtagcctagaattccacgatcatgaagttgtgagtatatcttattgttgcattgtattttcctaggtgtccttactctcttctgtcacttattaacacaaggacattaatacatctacattttcctatttctgatatcatggtttccatgatgtcatcacttctataaccttaagtgatagggtgaccttcagtatgctgattcctggtgtttgcacaaacacatggatgtaaagaagtaaaaaatgtaaaattcacgaaattcagtaaaccacacaaatcagttaagcattctatgccttagcttgttatgagaaacataatgatttttatttttcaatttaaataagcccttctacatacccagcattactgatctcagacaatgaattgctaaaaatgacaatagagcattacactcagaatagtttgctatatttccacatacctcatctagatgtcatggcctacatttctgccatcactcaaccaacattttttgtgtgctcttgatgataaatagacagtcctcaaataataaaagaaactaataatttcttacatagagaaaatgtcaataagatattcaaggtaaccagattattttgagataagtaaccattagaaatatgtggttttaattgctgattttataaaattttagttgatggtacacttaataaagaagatttaaatgtctattctttaaaaatgatgaatacttataattcttatmtctataatcaaaagtctaattaatgtagaaaaataaagagatgcttgctctgaaagtaagatcagtatacggtttttcagtctcaatcttcgagaactgcaaattcatcaagtaatggcttacatggcaaaaatttaaggtattagaatacctgcttcacaaataatagtatgtattaaatatttagatatgtaaagctgtatactaaactaaatatagtttaataatctttacacaaattaagcaaatatgttacactttttattttgtttactgttgtataaccttagtgacatgcttatttatattttaatttaaggacttgatttattaaataaataaattggctcaactggatttttgaaaatgttgaaattgttacacatgttgataaggtatatatataaattaattccagttttaaaatgactatataaaaagaaatataagtattgttcttctgtatgtacataattaaatgtaaataaaaatatttactatgtttttaacactttttaagtttttacactgatacgtttgacttttaaaatattattataatctaggaaaagctgattatagctcttttaagtctctgtaattaaatacagtaattgattaacatgctctgacaggtgagaagccatttctggagttgatcctgctgacactctgggactttttagcttggacactcattgtacgtgggactcccttcctctcaagagctgttgctcataagactctccttcatcaatctggcattgccttttaatatcagttgcaatcagaatccaactggccttgtagttgtaatatgttctatcttaaccaccactttcttaccaggagtctgcccaggtttgttctctcattcccgtaagaagctcccagcatagacattctaaatttcagatcattaagttattaacaaagctttggaccatgttcactttaggctgagcatagtgtgaggagatgtaaattaaattataatcctatatgtgcgtgttataaatattaaagtgtataaattaaataacacattctaagtgtccaacaagggtcaaataaatgatacaaagtcaccatatcaatgctatttgatctcatcttatttcagaaattttcttgtaatatcctctttggttttttatatcaattgttgcaaacaaagaaaaatctcaaaggaatttttaataattacctagagcctcacttctagacctaacaactaaaagcaaattgccatatttttatcacatagtctttaaaatttgcacatggcgtggtggcaaaattgatgttttaaaggtggcagagcaggaatgccctgtccctgttccccatgcagaaagagamttaacaacatcatatagaccaatttgccatggtgataatctcagaaaccagtgaaaaggttgcagcacctcagaaaagagcaaagccaaaaagaattttattttaatatctaggaaatgttgtaccatatactctcratagatccttctctagaccgtacagcattacacaatcaggaaaaaaatctttagtcataacttttcccataggagtgaaagaagcgagaaatgtggtctaatgttctggctccttaggggacttcccaaggatctgattcctgtcaccgaacttaaatcacttatagaaaccccagcatttgaatgcctgggaataaaggcagtgtggctgtttagggcagtacaagaacagctgcattattactacagaatgacaacaggtgaagtaaaatattacaaaatcctgaaaacaaacaaacaaacaaaaaacccgatttaacttggcaattacatccaaaagctcagagaggatacaactcttggaatggtttgcaaagctcccaggatctctagctggggtaattgatgaaggttttccactacactaagccagtatataaagactgggagatgtggatgtttctttaaatctcagaatttaaacaaagaaatgcaaaacatgcagacactgagaagcatgacytatttaagggaacaaaataaagctttcattccaccctcaataaacaaagatttattaatcacctgtcaaaatatattaaatacctatcaaaaatttcaaaaataattaaagatgctcgattacctaaaaaaacacagacaagtttttaaaaatcaggaaaataatgcatatataaaataagagtatcaacaaagacataaaaagtatagaaaagaaccaaatagaaattctggaggtaaataatacaataattaaattgaaaaatttacaagagaaattcaatagatgacttgatcagctagaaaaaataattcatgaatttgacaatattggtgacttgaaacttttaagggagaggagcaaaaagaatgtgataataaagtgaagaaagcctgagacttatgggacattgttaacctgaccagttatgcattatgagagtcctcatgggagaagaggaaaagattgagacaaaaagtctatttaaagaaataatggcaggcagaatatttcccaaatttgaggaagaacacggacatagaattgttttgaaacacaactactgtacactgagatcagttcaaaaattttacaccaataaatattataattagtctttcaaaagtcatagacaaagaaagaatcttggaagcagaaaaagaaaaataaatcatgacataaatgggaactcacataatrttatcaacaagataccagcagatatcctttcaaaccaaagctaagcaacataatatattcaaagtgttgaagaaaaacaagaaaaaaacccaaccacataagagattcatttggcaaacctgtcattcagaaattacgcaaaatagaatattttcttgggttaaaaaaaagtttgaagaaggtaaatattaccacacctgtcctacaagcaaagcaaaaaggagtcattcatgttgaaatgagggagggtaggtagcaaaacgaatgaatgttaaaatataaatctatctggtagagataaatatataattaattataaagtcccgtaagttcttaatgttgatgcacaagttacttccaattctgatatgcaatttaaaagagaaaagcataaaagtaacattacatttggattaattgggacacaacataaaatatataactagtgatattactaacataaagtaggaatgggagatgaaaaggaatagatttttcatatataattaaagtttttgttcggtttaaaatggactgttataactagaatatgttttatgccatcctcatggtaaccacaaaatatacctataggacaagagtgtccaatcttttaccttctctggaccacattaggaaaagaagaatcaccttgggccacacacaaaatacactaacactagccatagctgatgagctgggaaaaaatcgcaagagaaatcacaatgtttgaagaaagtttacaagtttgtgctgagctgcattgaaagccatcctgggctgcatgcagctctcaggctgcaggttggacaagcttgctgtaaaagatacaaaaaaagtagtgaaaaaaaggaaactgaacttacaaaagtagcaaaaacagtactatgaggatagtttatagtaataaatgcctatgttaaaaagaagaaatatctaaaagaatctaactttacatatcaaagaactgaccaaaattatcagaaagaaaaatgtaataaagattacaacagacataaatgcaataggaaatagagaaaaatcagcaaaactgaattattgctttcttttttttgaaaagatcaacaaaattgagaaatcattttctcgactaaaaaaaacagtgaatagttgtataattaaaatcagcctgagcttgggggcttaatcctgtaatcccagcagtttggaatgccaaggcaggcagactgcttgagcacaggagtggaagaccagtctgggcaacatagtgaaaacctgtttctactaaaactacagaaattagccaggtgtggtggcatgtacctgtagtcccagctactcaggaggctgacgtgagagaatcgcttgaacttcggaagtgagggtttcagtgaccaagrtgatgctgctgctgcgctccagcctggggacagagcagagacccagtctaaaagaaaaaaaaaataacaaatcagaaatgaaagagaagacattacaattgatgtcatagaaataaataggttgcaagagagaaaatattggtaaatcacttatctgctaagtgttttatatacatatatgacaattctctatagtttaatagcaaaaacccaattaaaataattcaaagacttgaatacacgtttattcagaaaatgtagacatatggccaaaaagcatatgaaaagatgcttaacatcactaaatatttgagaaatgtaaatcaaaactacaatgagctatgacatcataaccattagccacctcaaaacatttttgaatacatatattcacacacacgcagmcacacacacacacacacacacacagagcccagaaaacaaaaagtattgaagataatatatataaataggaactcctgtgcattgttggtaggaatgaaaaatgatgacagccctatagytaagagtatgaagtttcctcaaaaaaattaaaataaaattaccatatgacccaacaatgttacttctaggcatttatccaaaataattaaaagcaagatctcaaagacatatttgcacatccatgtattttgcaacattattcacaatagtcaaaagaggaaagcaacacaaatgtccacggatggatgaatggataaagaaaacatggtatatacatgaaatgaaagattatttagcttttaaaaaaagaaaattttatcatatgtaacaacattgatgaagcttgaggatgttatagtaagttgaataagccagtcaaaaaaagataaatacacatataaataatttcacatacatgtggtatcaaaactagtaaaatccatagaaagaaaaagtggaatagtggataccaggggctggagtaaagggaaaatggggtgttgttcaatgtgttttccaagatgaaaattttctagaaacctgtggcacaaaaatgtaaatatacttaacattgctcagctgcaaacttaaaaattgttaagatgggaaaatgtatggtaacttttttaacacaatcaatcactcagcagttacagagaaaattgaaagttttattttatttatttatttttgaatgttaaataacttaagtttcactaaacttcaaaaaaactcccttgaaattagtgtttttaccaaccagactctttttatttattaattttttaactcagtatgttttgttttctaattactcatctactttgaacttggtttgtgttggaaatcaatcaattaatcaacataatattaaagacctagctctaatttacgttttcaccaacagtgttaaagcattcctgtttctctatagcctcaccagcatttattgtttcttgacattttaataatcatcattctgactgacatgggatggtatctcattttggctttgatttgcatttctctaatgataagtgatgttgagcttttttccgtatgtttgttggctgcataaatgtcatcttttgagaagtggctctttatattcttcgaccagtacttaatggttttgttttttcttgtaaatttatttaagttccttgtaaattaaataaatttaattgtagataatagacctttgtcagctgggtagattgcaaaatttttctcccattctgtaggttgcctgttcactctgatggtagtttcttttgctgtgcagaagctcattagtttaattggatcccatttgtcaactttggctttcgttgcaattgtttcttgtgttttcatgatgaagtctttgcccatatctacgtcctgaatggtattgcctagattttcttctatgacttttatggttttgggttttacatttaagtctttaatcttccttgggttaatttttgtataaggtgtgaggaaggtgtccagtttcagttttctgcatgtggttacccagttttttgatcaccatttattaaatagggaattctttcyccattgcttgtttttgtcagatttgtctaagattagatggttgcagatgtgtggtgttatttttgaggtgtcttttctgttccatcggtctatatacctgctttggtacaagtaccatgctgtttggttgctgttgccttttattacagttcaaagtcaggtagcacgatgtctccaattttgtttttttgcttaggattgtcttggctatacagggtgttctttgattacatatgaaattcaaagtagcttttttctaattctacgaagaatgtcaatggtagtttgatgggaatagcattgaatctataaaatactttgggcagtatggccattttcacaatgttgatttgtcctgtctgtgacgatgaaaagtgttttccatttgttttcatcctctctcatttccttgcacagtgggttgttgttctcattgaagcagttattcacatcccttgttagctatattcctaggtattttattctctttgtagcaattgttaatgggagttgattcttgatttggctctccgcttgtctattgttagggtaaaggtatccttgtgatttttgcacattgattttgtatmctgagactttgctgawtttgcttatcagtttaaggagtttgggggctgagatgacggggttttctaaatgaaaaattatgtcacctacaaacagggacaatttgacttcctatcttcctatttgaataccctttatttctttctcttgcctgactgcactagtcctaacttccaatactatgttgaataagagtgtagagagagggcatccttgtcttgtaccttttttcacagggaatgcttccagcttttgcccattcaatgtgatattggctatgcatttgtcacaaatagctcttattattttgagttatgtcccatcaatgcctagattactgagagtttttaacatgaagggatgttaaattttaccagagacctgttttgtgcatctattgagatgccatactggcagtttctcaaggatctagaaacagaaataccatttgaccctgcagtcttattactgggtatacacctaaaggaatataaatcattttgctgtgaagacacatgcagacatatgtttattgtggcactatttacagtagcaaagtcatggagctaacgtaaatgcccatcaatgacagatgagataaagaaaatgtggtacatagacaccaccaaatactgcacagccaaaaatggaatgagatcaactccttttcagagacatgaataaagctggaaaccatcatcctcagcaaactaacacaggaacagaaaaccaaacactgtgtgctctcactcataagggggagttgaacaatgaggacacatggacacagggagggaaacaacacacaccagggcctattgggaggtggagcatgagggaaggaaacttagaggatggatcaatagatgcagcaaatcaccatggcacacttatacctatgtaacaaacctgcacgttctgcacatgtatcctggaacttgtgcgtaaaaagtaaaggaaaaaaaagaagaaagaaaagaaagaaagaaagaaagaaagaaagaaagaaagaaagaaargaaagaaagaaagaaaacagaaagaaagaaaagaaagcgaaagaaagagacttagctttatattatcaagtgctcaaaatatattttatattattgagcaagataatgtattaataaatttgaagtgaatggttgttactagctcaaatttatgaaaaataaaagctaatctggatacagttattcaatgtgcaaaggaataatcagaaaataaacagtatgttccaggaaccatataaggtttttttttctcaaatgaccaaatttgataagcatatagttatgtatgtatcatcttccaaacagtgcataatccttctttcatactttaatacatacctgatgctctcaaaattcatttcatatataacatcaacattcaaacttcaagtgtatttctatataccactctattagatgtctagggctgccataataaagtaccacaggctagatggcttaaacaagaaacatattttctcaaaattcaggaggctagaagtgtgtaatcaagtgtaatcaaggtacgattaacagtgttgtttccttctaaatcctcartgattggtttgtagatggttgccttccttcagtggttttacgtggactttcttctctgtgtttgtccttatgttcatataagacatcytctatatgtcctcattttatattattgttttccttaatggccctgtctccaaatgtagacctattctgaggaactgggtgttagaacacaaacaaatgaatttggagtaatgagccatgattcagctcataagcactatttaatatttcaaaataatatatacattttgccaaaaaataccaatagcagagtatgcattctcaacatatatgctttctattatcccaacattaagaaaacaaagtgaaatacgatgtccaaatgaacattctaataaatctaaagaagataatgaaaaacatcttattagaaaaattaagatcttatgacaaactttcttacactcaactagaaatcctttccactgtatttaattgtaastgcataaattcctattctataaaattattttagaaagcttttatgtaatttgtgctatgttgcttaatttgatgatcttttccatgaagtcagctatattccactttgactattgagataagtaggctgtccaaagttcagactcagtcaccatcaattgattgagaaatkgaagcatgaaacacacttaggattaatttggcttatgagcttgctgaatttatcttaagcccagcgtaaattaaaggaagagttggtcatgaaaactggaaaactgtgaatagcttctgtttttttatgttttgttttattttgtttttctgctgaatctgtgtttctttgactctggaaagtctggaaaagtacttatccggcccataaattttagtcactcaatttaaaagttattctagaaaaactccagcttgatggacatgagataaccatgttaatacttccaccaagccttctgcttgattataccaagattctatttaatgtgaaggttctcctactttcagtaactaagaaaccctcacagaagatatctatacttttctcctaacagcttctttagaactgcagtctttcatggtgtggcaggcaaataaaactgtcagaaatagaatataaaaataaaactgcatatctgaaagtgtgtatgacagtgctataataaataaaactcctcctgctgaggagttactcagcaggctgtaggcagccaagttttttttgttttgctaaccctttatgttacaatggagagttgatggctgggcttctcaacgtttcatttgtatattcgtttctggtttctcatgggaataccgatgtctcacctcttctttgtatattcctggaagcacatcagtattaatgaaaaacatgccttaaatacagaggctgaatgttttggtttgtattttttgtttgtttgtttgtttttggttttgagagggtattggtctatgtactttgtgatctgctagtattatatgttatatttccagaatggtatgaatagtataggtcatagtaaaggtgtattatcctaatttttaatacttaacatttaaattgtgattaaatctttaacactgttgaaatgatactgtagtatagtaatagtttaaaaaagatactgatttagtgagcctgaggtttcatactcattttggtaagtatggaaatgctgacaatttttttttgtagcctatgtagtaaactattgctaccataacattttagaaaaggaatatttattatattttcacctaagccctttctgatgtatcttactctttgtagtatctctgtgccttttatatcagatgtgattttattgcatttaatctcatttgcacacggtttacatttcttaatggtttgacttggtttctagagtcagcattaagtttaggttcatgatgcagtaatgtagtcctaaaaataaatattgattttattcttcttttgacaaatgacagaaaagcggagagatagttctataaagaatcataattttaggctttggacttacatacaaaaggaagaaatgggaaatatattcccctttaatttcttatcaatggtgttttcaaattcagcttatatctgtttataatraaaattatctgatatttttatgtgttatatcatttcagctgttcttgctcccttactttcccacaatataaactgatgcaaaggactaaactgcaaaaacatttgcaaaataaattttatgcttatctggtgtgcatagttcagagttatgtccttttgttattcctgtgattcttgttttgaatgcctaaattctaacttaaaaattaaatatttctctctaccmcatgtcattgagcattaatactattttgatttatttaatcatgattcctctgtgtcagctcacagaaatgatgcacatttaaaattctaatgaaatcagtaccatcactaagaaatattgctgatatatgtttgagaatttagaataccataattctatatttaaatcataacctaaccaagggtattataatattattcttcaattccaagcttttatgtgtctagtaggcataattattacagttttacttatgtattatcattgtaagttccttttacaagaaaaaaaatggagactcaataataaaatcagtgacattacatttaggtagtagtatatttttaagtttatttaaggagcatttttaataaatattgtgggtgctctcaaatttaaacctatatcataggtataaaagtaacaatattttactatattgtaaagcctaacatatatatttagactagaatgaacctgttacattaaatttagaatatgaatgacctaaaccatgtcataagtgccctatctattttaatatacactttatgagctccattcatgccaggtcgtgagctagcccctcatgatacaaagataagaaaggcttcactataataagttctctctctctctttctttctttctctctctgtgtctctgtttctcccatctctgcctgcctgtcctcacaccccttcaccatactatcatgtggtatcctaaaatgaaacaattcagacagtattgttcaaaacatacatgcatttattagaaagaagacacagaaaatgtacaaatttaaagttttgggagttgtttctgggatgtaatattaattaggaaatgacaaacactggataactgctgctagaacatcmattaaagaaaacatatacccacatagacatatacactaacttactcacaatgtctctctctctctmtatatatatatgtatgtattttaaagtaagtatagaaatataactaagatttattaccattattttaataataatcaaaacacattagaacaatctgaaaatctcaattttcctaattagtttcacattgctaattatttcaagatcctaaatattttttattcattaaaataacgataaatttgtgatttttctccatatctgattttacaaaaattcaaaaactattcatgagcattttaatttgatatcgatataattattttcataagttcagttagaatcatttctgtgtacacggaagcaatggacatgttaattcagttgccaagrtttgacaaaaaataccatttgcgacaacatggatgaacctagaggttattatgctaagtgaattaagcaagttcaagaagaacaaatattttatgattccacttatattagttaaataaaataggcaaattaattgaagcagataataaaatagtgttttccaggggtttgggagagagagaaatggggagctgttgttcagtgggtataaagtttcacttatgcttatgaataagcatagagatttcctctgcaatataatgcctagttaacaacatggtattgtacacttaataatgtgttaagagggtcaatctcatgttaagcattattaccatcaaaaacaaagagtgacaaagaaagttttgtaggtgatggatatgttaattaccttcactgttataatgatagyatcatgggtgcttgtacatgtccaaactcatcaatttatatatatataaatratataaatatatatgtataaaatacttacaggtgttttttgtatatcaattgtacttcagtaaagctattaaaattatatgcatctatttttgaaatttacataatgcattacttttattgatgtacaaattatttctttacaggaaatcaaataattcattgaaatgttgggaaaatggtattgtggtttttatttaaattgatgatcacaaatttcacagagaaaaacacaaatatatcaaaataatctttcctagatccgacagaaatttatttaaattttaaactctatatctgattcttaaaattacttcccacaaaaggagataaaatttcaaaattcaggtttcctttaatactgcaaatcttgactcgtactgttttcaaaccattatatcaatataaacaacagatgacatttttaaattatggacagaaacccagcttctgtctataaaataaaaaaaaaagtgaatgccttactttatccatcaaccaagttctatgataatggattttctaaataaagtgagaaatagctagatatawaatgataattcctatctctgttacaaggccttctttttccaagctaagggcatttcctccattgctccccagataaactttccccttccttggggcctctcaagtacaatctgtggtgcatggggacagctcttagagccactgagttgctatttgaactattcaatagttggaattggaaggaagaaaatatagtcagttgggacacaggatactggcaccgccgtaagagaggggcttactcctttgatggcaagtagggacagaaggctagagtacagcagcggttctctcagccctggcctagaggacatctrccaccccctttaagcttactaagcctcctgttgctaattcagagatttctccttgaaggacagttttatggccaggcccacataaattgagccttagcatgcaggcatcagtggtgccccagacccaggccttgccgccatggaacaggtaggatgcattggcagaagaatgacaataaatccaacagtctttgtgccccatttagtggtcaatgggcgcacagcaggggcaagggaagtttccatcccacgtgtaagcatggttaaatccggtagatggagggctcgggaaaagcggccatgagctttgagcacaattgggcctgacccttgggggacggcctaagggaagatgagtcccaggactaaccaggattgcggacatcccggtgtgtaaaattccagatgggcaccacacyttccaaaccagacactcccttaaaatgtatcctgaataactgggacaaattcgaccctgaaaccttaaaaaagaagtggctgattgtcttctgtgccactgcctggccacagtattccttacaaaatggagaaacttggccccctgagggaagtattaattataacacccttctacaattagatgttttctgtaaacaggaaggtaaatggagtgaattcccttaggtacagagtttctttgcccttcatcacaatattgccgtgtgccaagcctgcaagcttttcccaaatgacagaggcccacaattgcctccatactcagggcctcttccctcagccccactcttctcccacactgactctcctccatccggccccactgaggtgttaaaggcacaccagcaagagaagataaattccatgagtcaggcactgaaactatgtcccttataagcagtaggaggaaaatttgggcccattcacgtgcatgcccccttctcactctcagacttaaaacaaaaaaaggcagatatagggagattctcagatgtcctgataactatatagatgtccttcaaggattgatgcagtcctttgatctaacatggacagataccatgttgcttcttgatcagaccttaagtcctactgaaaaagaagcrgctttagcagtagcctggcaatttggggatctgtggtaccttagccatgtaaatgattgaatgaccctggaggagagggaaaaattctccacagggcaacaggcagtccccagtgtataccctcattgggatactgactcagatcattgagattggagctgcaggcatttgcaaacttgcatttcagaaggcttgaggaagactaggaaaaaggctacgaactactcaatgctatccacaattacacagggaaaggaggaaaacacctcggcttttctagaaagactaaggaaggccctaagaaagcacacatccttaagtccagattccgtagaaggccagcttattttaaaggataaatttatcacccaatcagctgctgacattaggagaaaactgcaaaagtctactttaggcccagaacaaatttagagacattattaaacctggcaacctcggtgctctataacagggaccgagaggaagaggccgaaagtgaaaagcgagataagagaaaggctgcagccttagtcatggacttcagacaggcagactttggtggctcagagggaaccaagagaggagcagaccaattgcctagcagggcttgttatcagtgtggtttgcaaggacactttaagaaagattgtccaacaaaaaacaaactgccccctcacccctgtccaatatgccaaggaaatcactggaaggtgcactgccccaaaggatgaaggtcctctggaccagaagcacccaaccagattattcagcaacaggactgagggtgcctggggcaagtgccagctcatgccatcaccctcacagagccccgggtaagtttaaccattgagggccaggaagtggacttcctcctgggcactggcgcggccttctcaattttaatcccctgacccagatgactgttctcaaagtccgttactatctgaggaatcttaggacagcctgtaaccaggtatttctctcgcctcctcagctgcaattgagagactttgctctttcacatgccttttctgttatgtctgaaagtcccacacctttattagggagagacatatttgccaaagctggggccattatctacatgaatatggggaacaagtgacccatttgttgtcccctacttgaagaagaaatcaactttgagctctgggccttagaaggacaatttggaagggcaaagaatatccatccagtccamatyaagctaaaagacaccaccacttttccttatcaaaggaaatatcacttaaggcctgaagttctcaaaggattacaggatattgttagaaatttaaaagctcaaggtttagtaaaaaaatgtagcagtctttgaaacaccccaatcctaggaatacaaaaaccaaatagtggagactagggcaagacctcaggtttcacctatctaccttcaggaaatttttttcatctgtgataacacagcctatcgatgccaaaatggcactccaaaagaactatgctatgtctcatttctagcacctcccatgtccatatatactgaacaagagttacaaagtctccttataccccaatctcgccacacccgagcccttattgtcccttttacagtaggagcaggaatactaggcaggcttgggactggaattggaggcataacctcctccacccaattctattataaattatcaygagaattaaatgatgacatggaatgagttgccgactccctagtgaccctacaaagccagcttaattgtctagctgtggtagtccttcaaaatcagagagccctagrsttattaacaactgaaagaggaggaacctgcctcttcttaggagaagaatgttgctatttcgttaaccagtcaggaatcattactgaaaaggttaaagaaataagagaacaaatagaaagtagacaraaaggagctttaacactcagggccctggaatatgtttaacaaatgtgtaccttggctcctcccctttctaagccctgtgacagtcatcctactattactcgctttcgggccttgcatttttaacctccttgtcaaatttgtctcctccaggatcaaggccatcaagctgcaaatggacttacaaatggaacctcaaatgarctcaactcacggcttctactgagaacccctggatccacctgctggtccctcactagcctaaaaagttcccctctggaggacaccacaactgcagggccccttcttcacccctaaccatcaggaagtagccagaacgactgctgccagttcccaacagcaattggtgtgtcctgtctagaggggggactgaggaggttccagctgggcttcctgggtcgagtaggggctcagaaagctgtgaaactcactcatttcctgtatcaggacttactctcatactggatgaataatattgaagatatatgcttaaaatattcctaacatcagaatttgtgcatgtgttttcttcccccaagaaagctataaacagcaaaacttytgctgtaagcttccctgtgtcctcactcccactctcccttccccctcccctgaaacaaaaaggaatggtaaaagccagtttctttttgtgaccagcagaccttatctatgctcccagatccaattccttgttaacacaatttgtaaaatcctgtgagattctgtctcctttgccatgyggctgcaaggttataaagtagataaaacttaagttagaattccggttttccttaagacctaaaacatgttaattgcctttgtttctcactctggtaacatcttcccaccacatgtatttcccaccttaaagagtttaaaaggtgacaaaaaaatcgaacactggctacccsctagggaccacttccacgctgtggaagctttgtactgtcactctgctcaataaagcctagggctttytttttttctcttagtcggatacgcgtctctctctcacagggggctgccgccacaccaaatttttggcatggctaaggcaagaactttcggtgttacacaaatatcagtaccatttgtttataccaacaacatccaaggtgagagctaaatcaagaatgtactactatttacaacagccacaaataaaatacccagaaatacagctaaccagggaggtgagaaatctctaccctaaacattacaaaatgctgttgaaaaaattagaaacaacagcaacaaaaagaaatatatttcatgctcaattatagaaagaattaatattgttaaagtgatcatactgcccacagtaatttactggttcagtgctatttctatcaaactaccatgaacattttcaatgcaattagaaaaaaaactctaaaattcctatgaaaccaaaaatagcccaaaagtcaaaacaggtctaagaacaaaaacaaagagaggcatcaaaatacacaacttcacactataatacaaggctacaataactgaaacagcatggtaatggtacaaaaacagacacatagacccatggaaccagttaaagaagcggaaataaagctttacacctacagtcatctgatttaagcaaagtcaataagaacaaacattggggaaacaactcactattcaataaatggtactaaataactggctagccatatgcagaagactgaaactagatatcttctttttaccatatgcaaaaaccaactgaagatgggttaaagatgtaactgtttaactaatatkgtttggctgtgtcctcacccaaatctcatcttgaattgtagctcccataatttccacatgttgtgggaaggatccagcaggaggtaatttaatcataggggtgggtctttcccatgttgtttttgtgacagtraataagtctcatgagatataattgttctataaaggagagtttccctacacaagctattttacctgctgctgtgtaagatgtgactttgctcctcattcaccttctgccataattgtgaggtctcccttgttatgtgaaactgtgagcccattaaacctctttcctttataaattaactagccttgggtatgtctttattaacagcataagaatagactaatacagtaaattggtactaggtagtggcatactgctgtaaagatatcagaaaatgtggaagcaactttggaactaggtaacaggcagaggttggaacagtttagaggactcagaagaaaacagaaagatgtgtgaaagtttgaaaccttctagagacttgttgaatgctttgaacaaaatgctgatagtgatatcracaataaagtcgaggcagaggtggtctcagatggagataaggaacttgttggtaactggagaaaaggtgactctgctctgttttagtgaagactggtggcattttcctcctgccctagagatttgtgaaacttttaacatgagagagctgatttagagcatctggtggaagaaatttctaagcagcaaagcattcaagaggtggcttgggtacagtcaaaagcattccattttatgtatttacaaagatgtggtttggaattggaacttatgttgaaaagggaagcagagcataaaagtttggaaaattcatagcctgacgatatggtataaaggaaaaaaaaaacattttctgaggagaaattcaagctggcggcagaaacttgcataagtaattagaaaccaactgccaagaaaatggggaaaatgtctccagggcatgtcagaggtcttcctggctgaagcccttyccattacagrctgggaggcctagaaggaaaaaatggttttgtgggctaggcccagcatcttgctgctttgtgcagtctcagaactcggtcccctttgtctcagctgtggctaaaaggagccaaggtagagctcaagccatggcttcagtggggcaagccccaagccttggaagattgtcagctttgatgtggtgttgagcctgtgggtacacagaagttaataattgaggcttgggaacctctgcctagatttcagaagatgtaaggaaatggctggatgttcaggcagaagtttgctgcaggggcgagaccctcatggagaaacactgctagcacagtgtgaaaggaaaatgtgtgttgtgagtgcccccaacacacccacacacagactccaccagagcactacctagtggagctgggagaagtgggccaccatcctmcarwctgcagtatgayacatccagaaacagtttagaccatccaactggaaaagccacagacactcaatgccagcccatgaaagcagccaacgggagggctgtaccctgcaaagccacaggggttgagctgcccaagaccatgggagcccacctcttacatcagtgtgacctgtatttgagacaatggagtcaaagaagatccttttggcaatgactgacccmtggattttattgccttacctggatttcagacttgcgtggggcctgtaggccctttttttggccaatttctgccatttagaaggagtgtatttaaccaaagcctgtttcttcattgtatctagaaagtaactaacttgcttttgatttttaggctcatagctaaaaagacttgccttacttcagatgagactttggactatggacttttgacttaatgctgaaattagttaagtctttggggaactgatgggagtgcatgattggttttaaaatgtggggatctgatatttggaaggtgccaagggaagaatgatatgatttggctgtgtcctcccccaaatttcatcttgaattgtagctctcataattcccacatattgtgggaggaacttggtgagaggtaattgaatcatggtagtgcatctttcccatgctattcccgtaatagtgaataagtctcttgagatcttatggttttataaaggagagtttccctacacaagctctcttgcctgcctccatgtaatacatgactttacttctcacttgccttttgtcatgattgtgaggcttcccaaaccatgttttactgtgaatctattaaacctctttcctttataaattgcccagtctcaggtatgtcttttgtaagagcatgagaagaggctagtacagtatcctaaaactataaaatcctagaataaaatcaagagaatagaacataactgaactaaaaagcctttgtccaacaaaagtaactatcaacagaataaacagatgacttacagaatgggagaatataattgtaaactatgcacctgaaaaaggtctaaaatcaaaaatctataaggaacttaaacaaattaacaaaacatacacaaataactccattaaaaaatgggccagggacattaagaaagaattctcaaaagaatatatacacaggaatgtgttcaagatggtcagctagatgcagtcaggaagtgccactgccaccaggggaacaccaggattttaatcataccaacagaatttgaacagatctttggagagaaaatgctgaatatggatggagaaaagaagtagtcactgaggccgaagaggaagaaggctgaggacgctcaatggggtgcctgaatactacagctggttctctgccctgaacagtttctagggaagtgtgagtgaaaggactagtagatagctccctctcactgtagacatctggaatcctggctagatggggctccataccttcaaggacatgtggactggcagaggggtctcccagagattgcccagagatggagctgcagacaaaaagccagggacatttgtgcataggtcatttctggtggagcccaaccataagtgcccacataccacgcaaatctacctctaawaggctctggccttagctaaccaatggggagagaggagaacctactttcaaatggaactgtgacacatattctgcaggaatactggcccaccagacccctcaacccaagggcccctatctggctgctccataggagtttgtacacagtacagcctctgttttccagtttgagtgctttgctccatctgaatgcattctggcaccctggaagcccttcacattttaccccacccaaaatccaaccccaagggaccagacgatggagccacaaacaggatcttagttccccagggctgcaacctgcagctttggagtgcccagctggtggctatgctcagcacttgaacaaggaaggagactacactctctgcagtcttggattgctggggcacacaaatgcttggtcttgtgtaggttcctccacagggttgtttcagtgggggtgtggcctattttcctaccagacttctccccaaaggagccccaatagacctttctatatgctcaaatatattatccaaattttttccttttctctacttctctctcaggaaggccaatgagtcagagatttggtctttttagatmatcgtattttctcagatgttctgttcatttttcttaattttttaatttatttttctgtgactggttgatttgaagaaccagtcttccagacggagcaggtcacctacggagtgaatcccatcaagctagcagcagacatctcagaaggaagtttataagccagaagagacttagggactgttttcagtgtccttaaagaaaagaaatttcaaccaacaattttgtatcctgctgaactaaacttactaagggaaagagaaaaaagaaggcttctctggcaagcaaatgccaacagaagatagttctagtggatcagccacataagaagtccttaagggcgtgctacacatagattcaaaagaattaccccttctactrcaaaagcacacttaaacacatagtccacaggcactataaagcaaccatgcaatcatgtctgtataacaaccagctaaccataccatgacaagatcaaaatcacaaataccaatactaaccttgcagcatatacagggactctctttgaatgtacactggctaaatgtaccactcaaaagacatagagtatctgatacgccagacacaagagtatgttgtatacaatagacccatcttacatgtaattatataataggcttgaaatgaaagggtacagtaatatctatcctgcaaacaagaaatgaaaaagagaaggagttactattattatgtaagacaggctttaagtgaataaaaatttaaaaagaaaataaatgatatgacctaataatagaatatacaatccaacaagcagwttttattatcctaaatatatactcatccaacattggtgcaaacacctttataaaacaagtatttcttggcctatgaaaagatttagacagtcatacaataatagtggcaggggttgacaccacactgacagcattagacagattattgaggcaaaaatgtaacaaagaaactctggacttaagcttgacgcttgaccaattggacctaacactctgcagaacactccaccccacaaccatgaaatttacattccactcatttttacatgaaacatagtctaagatcaacaacaacctttgttatgaagcaagactgaatacatttacaataattgaaatcattccaaatgcaaatcacaggggaggtataaaatgtcctgcaaggaaaaggacactatgtcatcttcaaacaatggaaaaatgctatcccttaacagaaaggagtggacctcttttgcagattcggagttcaggggagtctagaaactgaagattttaactgcaatgaattatttctcaaatgtcttataatttcactctatctaaactgagaccctgaatatggttagtgatcagactaggctgggaattcagctagaactgagctgggcttatttttaaaattcagtcctggacttaagattcagattcatttggtggtggggaccgggtgcttctacatgaagtgagagtctctgtatatgctgcagttagggaagcaggagctgaggagagacagagtaatgtgattttaagttcagctccctataaacacacacacctgcaatgaagagtccagatgtcccaatacccaaaacgatacatgatttcaagataataacagttatgttttgatgtattcacacaagaaagtgtcaaggatagttttcttggcataaatagaataatcagttttgtcctgttgtctgaccacccacaactagacacagcttaattaacctttacagagatgagactcctacataagaaaaacttaaaacaaaggtgttgcattcaactccttgccttctgaggatgccctactctgtaatgtcatagctttcaatgaattgtcttctcattgcactctgtgactgaccttgaattccttactgtgtggaatccaataaccttctcttggtgtctgaatctagacccctttttctggtaacacttccaaggagacttttctggctttcaccgtttgccttaatttgatggttattggtcctcactcttccattattttctcccaagcattaattctgcagaaaaaaacatttgcctctattgtggtcataatttctacttttcccatattgataaatttgtgatatatcctaataagtaaagctttccctttcaaaatactaccagcataatttaccattactgaaagtatgaaaaatttaaattatcacattccaggggctatttgtgttctctgtaccaatagtgataggattctcattacaactggtagtgtatgatccaactctaaaatctcattttgttgtctgttcttttttttctgacctctcttggtacatattatcaaatgttgggtgcttccaagaagtagactctaagctgaatattttttgakggagataattagggagatttcttgaaaataacatctgtgaaaaagtaggaagcaagattggacagtggaacaaaatagtacataattcagtgcaatagtttgaatgtctgagtgcccccaaaattaatatgttaaaattcttataaccaaaatgattgtattagcagacagaaccttttaggaggtgtttatgtcatgaaggcagagtcctstttaatggaattaattcttttgaaaaatatgctcacaataactcattcatctattttccccattaagacatggtgaygggttgccatcttggaggaatgcccaataccagcatcttgatggtgaatctttcagcctcaagaactgtgacaaataaatgtttgttgtctgtaagctagccaatgtatggtatttttctatatagcaccctgagcatgctaagacatgcagtctcagcataggtttcatctcacccactggaaattctgaagctaagttagcccttcagagttggtccaagttgaaatgaggagaatgggcctttagagtcctacatgtgaccaggcattggatattggctgtcttggaaaagtcactacatactagatagctttcagcagagatgtactgagagagagagcttataggtgaggtatgtcagttgttcatcacttcatcagctggaaagtaatttctatattcccaaaagggaaatctgggtgacacataatgcctgcactcaaggacattgaaaatattgaacaatattgccactctscaggcaatatttgctcagaaactgtgttcaaatatctttttaagaaagatttacctcatttcagattaacagattattaatagaataaaaacaaatatctctattttgtgacatgcatcttttccttcctaattctacttgatgtaaatttctatttagactttttaaaagtacaacttgcctgaattacaaggcaatctgtgaaacaagttaagtagtaggcatttagaagataaatattttctaagactgagaaatgtaagcaatgttgcaaatattcagaaaaggawattattgtgatttagacaaaatattttcaaatgaaacaaagtaactgtaattgtacttaaaacatatctgtttggataaaaataaaaggaatttctacagtcagaaaaacaatgtcaaggaacatgaaatgaagctaatataataagtgtgaaactacatagagaaaatgaagatattctatttgagaatgtttagataaataagaatagatcacaccactgcctcattgttgacagaatgatgctttcttatactagaaactctttatatacaattaaattatctcttgttctggagacagccacatttacaataagcaaataacaataaatttattattcacacatamaaacacaaaatcattcatccttttctttattctcttgctttccaaaaactctattgtcaacacttaaatcattgtgacattgattgacattgatatgtaccaagttagagaaagttagaaagaaagatagcattttaacaagttgtctaagaaatgggcttttttgtttcttatgctgacagttgtattctagctctgagtcctgtgagaatgtgctggtgtggccagtgaaatacagtctttatatcaatttaataatgatacttgatgaacttgctcagaaacaccaagaggtaactgtgcttgtcaccttcagcttccatcctcattgattccaacaatttgctgttaaatttgaggtttatcccacatcttttactgagaatgaacttgatttcatttttatgaaattgatcaagatatggacatacaagtttccaaagagtacattttggcatatgattcaaagatacaaaaaacacatattatgaatgttctgatactgttcaaaagctctgtgagtatgctgttttgaacaagaaacttataaggaacaacaagattccagaatttatgtcattcttgcagatgtcatttctcattagtgagctgctatctgaacagcttaatctgttaaacatttgttatacatttggtctactatcatccatttacaactggcagtatgtaccaagaactctgtggaggactttcattacctccttctgatgtagctgttgtcatgtcagaacttagtaccaaaatacatttacagaaagatgaaaaatcttttgcattttcttcattttaactttgcatttgataattttaacaaaaagaagtgtgatcagttttacagtgaagtattaggtaagttagtggttaatttattcccttttccctccaatatgtggaaggaaactttcctttctttgtgtctgttagagtgtgttaatgaattaaaatagaaaataaccttttttgttatttgaaagatgaggtttggcaagttggtggagacactgaaactctcatacattgttggtgagaatagaaaattattcacccactgtgaaaaagtctagcaattcctcaaaagtttacacatatatttaccacataattcaataattgcctttctaggcatatacccaagaaaaataaaaacatgtctacagaaagcatgtacatcaatgttaatcaacgctattcataatggccaaaagtggaagaaaaacaatgtccgtacactgataaatgaataaataaattgtgtttataagtagcatctgatactatttggcaataaaaatgtgaacgctatttataatggccaaaagtggaagaaaatcaatgtctatccactgaaaaatgaataaataatttctgcttataagtagcatctgataaaaagcaataaaaatgaaatccttatatacactattctatggatggtcctttaaaaacattaaactaaataaaagtagccagccacaaaagaccacatattatatagtttcatttatttttaaaaagatcctgaataggcatatttgtagaggcagaaattagattactggttgcccagtacagtgtgggtgcagaaattcaggtggggagatgacagttaatatacaggattttttttttttttagataaaactgattgctatgttggatgcacaagtctgtgaatttactaggaaatatttaattttaaataatcattcatgaatcatatggtatgtgaattatacttcaacaaagttttacaaaatattccttgaaccaagatattcaaaaattctatttgcattgtataattacttcatctctcattctgtgtcaaggggcctgcaggactctctcacttgccactgttcttgacactattataaaatacattatataaaacacgatatttgcaaggtcattaaacttaggtggatgacaccaaatataaacataaaagaaacatcaaacatccttgagtaaatatgaagtaatcgaactttgtctccttgccatccatgtactcaggatgytcatataatgtatttactttgaattgaaggagttatgttttaacttgattgatttwtctctgtatataagtatgagaaagaaacagtgactggaaaagaattatcacattgcacaaggatggctctgaaatggactacagttctgctgatacaactcagtttttactttagctctgggagttgtggaaaggtgctggtatgggccgcagaatacagcctttggatgaatatgaagacaatcctgaaagaacttgttcagagaggtcatgaggtgactgtactggcatcttcagcttccattctttttgatcccaacgactcatccactcttaaacttgaagtttatcctacatctttaactaaaactgaatttgagaatatcatcatgcaattggttaagagattgtcagaaattcaaaaagatacattttggttacctttttcacaagaacaagaaatcctgtgggcaattaatgacataattagaaacttctgtaaagatgtagtttcaaataagaaacttatgaaaaaactacaagagtcaagatttgacatcgtttttgcagatgcttatttaccctgtggtgagctgctggctgagctatttaacataccctttgtgtacagtcacagcttcagtcctggctactcatttgaaaggcacagtggaggatttattttccctccttcctacgtacctgttgttatgtcaaaattaagtgatcaaatgactttcatggagagggtaaaaaatatgctctatgtgctttattttgacttttggttccaaatatttaatatgaagaagtgggatcagttttacagtgaagttttaggtaagatttttttcagttagtaacatgaagctctaacttatttgtgtctttgaagcacaacttgcataaagccataaagtcagggaagtggagtttttgataaatgaatttatgaaatgaaaatacaagatgatctaccaatctcacaaatattatagaaaagcttaaattatggggtcagtgaaaacgctgtgaccatcactcatacagaacaccccaggaaatcataaacctatatattagtacacctaagactttaagcaattatatatctgttttactatagaatgtttcagatcttaaaaacagcaagatccgtcaagtaacatctaaccgaatgcatagatttagaatgagtaattacacatttttctacaactatctatataactgcagaaagttttccttctaaatctcagttgtcttatttagaaattaaaagatgttcccatgttaccaggaggttgtcttcacagtagagagagataatgtctatatctcagatgcaaaaatcaataagggtaatttgaagtttcaaatgtttctatactccttcactaaataattggaaatcttttatttaaagtccaatcatcttgttgaagtgtgaaggttgttatatctatatagtttatttgaaactatgtctctttatttaaaaatacgagactgattatggtcgagtacagatctctatttcaataatttctcaaaaatttctagctataatttacaaatatttttacttaatattattaagatcttagcttggatccaaatgagtagttggtacaatgatttcagccatactcacaaaatagtccacagttaacttgaagaaccaaagataaaaggattagcttaatgagttgtgtaaactagactatttgttagaaaattgtttctatggttactgtagaattaattgattatggagctcaaagatttgtttaaatatctagaggctactattgaagctttaaagagaaaataaattgatgtttaattctctatgacttattttaataattgtgagtatactgacatgacattagagatgtagcttaacctcataattctcccactactttgcctttcttataaataaacaagggcaaaatatagaatacataaaaaataaattattcctatatatgaatatatgtacatatttttcaaagcacacaaactttaccaacatttttgcctgcattattctaacccctttcagaaaattacataaagtaattatcttatgtcatccacttcttcttttctttattcctatcaggaagacccactacattatctgagacaatgaggaaagctgacatatggcttatgcgaaactcctggaattttaaatttcctcatccattcttaccaaatgttgattttgttggaggactccactgcaaacctgccaaacccctacctaaggtaaacatactttcgttggttttattttgttggcttcaaatttcagtagaaatgactctatagtcttcattcagagtgtttgactaacactgaaaaagatgggaagtaggtggggtaaagcagataccaattagaaactcatgtacatgttaataccatcacacgtatgtgagttttatgcatgttacaaatagagaggaatactaaagaaactttgaaaataggtttggttaaattaaagtcttgattatgcaacacctaagaaggtattggtcattcattcaaagaatatttacaaagagattatcacaaaacacaggtaagtgcacaattttcagagaaaaaaaatagacacagtttctgtccctacataccttacattctactttgaaatatagaatataagtaagtaatgaatattatataaaaactattatctcaagaaaaaacccaatgctaagaaagcatcagtggagataatagaaagtatcctggagtcactgatgagtacgatgagagctgaacaatatgcaggaatagggaaaagaatggtggggagagacagacaaaaagggaaagcagataaagtggtcaggacagttctcaagtcctcaggtttagtttgcagggaatgattaagaatcagatgacgctaaaaggtaaattagagccagatatgtattaggagttgaaatatttattaagaacattgaaaacatcctaaaaagagttcagaaataaggatatatgaaatgattctttttataagaaaagcctccaagatattcaatggattaaattgcagaagggccagactgtaaagaccgaaacattcaggaaattttccatggattcaggtagcagatgatgaaaaagtggactacactgttgatagaaataattatgcctacatttacaaaaatagtgccaacttcatattgtgttgtgtggaaaaaaatattaacacagacaaaacacttaaaatgtctctggcatatagtcagtgactcagaaatgttattaattttgcaattatggttattttattactaatactactaactacttaacatgtgcatgtcacttgagatatcattcctcatttaagagaaccagattattcagcacatcaaggttatattgtcttggaaagtcatagatgacagatacccttggacttgattaaaagtagacatatcagttgtgacagcaagataagctagttgaaattttaaaattcttccataagtaataaggatcttcaccagtattccagcttaaaacacttcctcaacaatataaatgtgtgcctcaaatatgtgcagacaaacacagggttcacatgattttaataaagcatttaaatcattctgcattgagatcccagaattttacattttagagcataaacatatcctattagagcagatgatttctgccttatgacaggccactcaataaagcttcctgggggaactcgtcttgacatcataggtgtctgacagagaagcacagagataatgaacaatgcatgtataataaagaccaaataatttctgccacttgtttctgaatagtgcccttagtttcaatacgaaaaaaaattccgtcagcatataagattatattcttttcgaaggaatacaagaacttcatatattttaattaacatcacattttaaggcatatgtaaaaagtaaggcttcttcaatggattattatgcaatctcttaaaagatcatttttgcttgcataaaactgagaatttgttccattgttaaaactcagtatctatgtttaatgcaagttgtataggctttatagagtcagtttcttaagagacaaaagttgaggtaagactaatgaaaaatatataccactctaccctactcttgaaagatttccccactcacactaagggaaactgacagtgccagtagaaggaggaagagagtaagacaatgtagaaggacaagaaaaaaaggttgactggtagtacaatagtggtaata

SEQ ID NO: 96283 - DNA, 350403 bp, Homo sapiens
  misc_feature (1)...(350403): n = A,T,C or G
aaatgaaaaggatgtcgatcttccttaatttgaggcaacatgccaacatttattcttaatagtacttccctactttaattaagatcagataaaaaacaaactgctataatttactcaccaacattttggtaaggcttttttccctctctttggttttggggctccttagtttagatgtatttctttctaatttttcttttctcctttagtcaacgaataaggaagaagattgtgtattttttccttttagcaagtagacaaaagtcttcattctacacctagattatttttggaagtggactagagaagtaactagggaaaagaaatagcagctatgatgtaggcaaatcaaaaggcagtgaaatagatagataagctttatcttcttttctaactctaagacttcatggtacctattgatacggttaggttttgtgtccccacccaagtctcatctgatttatactccctataatccccacatgtcaaaggagagatgaggtggaggtaattggatcatgggggcagtttccccctgctgttcttgtgatagtgagttctcacgagatctgagtttttcaagtgtttggcatttccttctgcattcattctccctcctgctgccttatgaagaacatgccttgcttccgcttgccttctgccacgattataagttccctgaggtcttcccagccttgcagaaatgtgagtcaattaagcctcttccctttataaattatccagtctcagtcagttccctatagcagtgtgaaaatggactaatacacctataataaattatcacctcacttttagattacattacaacttcccctttgattggtaaagaaacatcttcatttgcaaacaagtcatgtttcaaaagtctgtaagccagttattttaaacatggaaggcttttgttccagaaatatgttataaatggcaatcaaagtacataagcatatctcattcataatatatctattgtactaaaatatagggacaccaataagaaatcataaattacatgtaagattaaaacagaggttttgaatgaaaaactctaatattccatcctctagacacttgaagaaaagcaggtttaatcagaggccaagagggtggatgaaaattttgctaaagatgataaagtgggatcctggtactattaataacttggtacttgataacatttgcccttatttataacattatgtcaaaacatataacaggtgtaacactaaatatcctttatgctcattagtcattgttcgtgttgaactttagcttgtaaataaattagagagatgaataaaaattccccctcattggaacggcagtggtgctaactaaaccacttgaatcatgcagttgtagcccttctcacttttgcttttctttgtttgatcatttgattaatgacttctccactggcccaaagatctataagggtagatatctcatcagtttttgctaatcattacatccccgacacttaaaagagagccaagtacacagctgctcaaaaataatttttgaacagatgaatgggtgagtgaatgaacaaatgagtaagaaagagaaaaaggagtggcctaaagaacatagaattatagatgtgttaaaaatgagtctctgacattacgtttattctctgtctagccaaagagaagaaagcagtagccaaaacaggggcatagaaggagtttcccaaaggataaagacagttagtaggacaatttgcttgccgaaaatagagtacctcagtgtgtccaagtttggtttggttgctgttccaaaataagagggattgaaattgatcagccttaggatagttgagtggcaaagaaggccacctgcaagtacaattagtggtataccaagggtgggccagtaggagagatctgcacagcaagcaggcaaacgggtgggtgggagcactatctgtagagaatttaaaaagaaaatcagtctttttttttagtattactttgtagttgcaattctaaaaaatgtcagtgataaaatattcctctgtaacaagatcattttggtctaagttctaaaaaattcctgtagttactgttttgagttttaattacatatatgtaaattcaaaattagcatattttaattacttactttttaataaaccttgcagtctaagttgaaattgattcagaaaacttctagttgtacaacaggtccccaacacaggtgtccttgggtacacgtttgtttaaaagtaaaatcctcatagggcagtttgaaaaatcatttggccgtcccttgacgtaagtatttagcattagtcgtaggtgttttagcctgagattgccagaaaatagagcatgatacaaggacttgctgaaaatattttatttgggaagtgtgatcccaggaagcatgtgaggaacagatggggagaaccagggaaggatggagcgccagtacaaggatgtgttatcaagctggccattgcttcaggagaatggctgctttgtttagcaaagaccaccagagaagctccatggaacacatttctgaatcctttccttgcagatggaaagaggagtatttatccatgggctcccaccataggctctttaatctctcatgcttctaggttttggttcacattgtaacttcaactaaaaagccctgggtgggggtaagatgcaaggggagcccagagcaaagcactttcagattatacctgtgtgaagctggttagagcccacttagaactggctgttcctgtggtggctaaaagcaacaggtaaggcccagatgatctgaagtggtgtatggaggctgtgatacatggcaagtaatatgattttattatagatctgcaattttttataggttcctttcctatgaggacttcaatgtcctacatacaataatcattgggtctgataaaaaaattcccaagttttcaccatttgttaattatttgaatatttattgaatatgtactaatatttattgagtgtgccaggctttatgcagggatagaaatgtaaatatgacagattcttgactttcataaagctcactgttttatcaactctatgccttccactgtagtgacacagtggcacccctcccccgagccacatcacctttttttaaagaaagagtcttaatccatcagccatgctggagtgtaatgcggcaatcatagctcactgtaacctgaaactcctgggctcaagtgattctcctgcttcagcctcccaagtagctgagtctaaagacatgagacactatatgtagacactacactggcctaattttaatttttgaggaggtggagtcttgatatgttgcctaggctggtcttgaactcctgaccccaagtggtcatccagacttggcctcccaaagtgctaggattccaggcatgagccactgtgtctggctggcactttaaaaaaaaaaatacagtccccttatacaatcagaattattagcacaatgaatagtaaatgctatgcaaatctaaaatgaccagaggagtgtcccattagataaaccactctactatttttgcaggaagtctcttacccacaggctataatggcttatgtcagccctgggagtagagactgtttactttattatgtatgtactgcctagggatggggaggctgaaatttagacagatttctctacttatctctaaggcacctctgaggcattaaagaacatttggggaagctgaaatccaggagctacaccagcagcagaagtggccactcctccaatcacctggcagtcttcccaggcagaaggtagaagatgcctggcctccttgccagcactccttccttgagcatcccagtggccaaaccaccaccagccgactctacccaaagtgcctggttgcaggagccaggcactcaggtgggaaataccttgattctttaaaacctttgatgcaaagttagctgcattctgtcacaaggaaaatgccatgccagggacatatttatatgacaataaacttttagtgccttagaaagttgctgaataaaactaaaatcagaataaaattaatcagatgctaacattttggagagcaggtaagttttcctagctctgttagtggtttccttcactccagacctatcttctggccttccgtgacaatgaagcccttggtaacatcatgcttattacccccgaattagctgatgtatgaggagctgtcaccgttccttagtattcacattaaaatctcagggcggaatgaccagagcatgccgggtgctttatgtggcagtcaaggcagcgaggctgctggaggctttcaaggggaactttccacccgtggggcgtggcgaggcctttgtgtaactgtgaacagggcagaggtcccaggctgggagcgcgaaggccagaaaggtaaactcaatcggcattttaaagcgcttgctctagtgattgagcacatagccctctagaagcagccctacttcgccctccaaagagaatttcgtgtttcaaaaaaaagtaacgatttcctctggggaagagatctgcagtcctggggtccctttctcctggtgccaatggtagagttggggagaaagttcccgatagagagcataggaggaaatgcgccagctgtgcttgccttagagacatatgtgagttgagctctctctctcctctctctctctctctctgtgtgtgtgtgtgtgtgtgtgtgtgtaggtggcgagtggagagggttaaggctgcttctttgctggggggaaaagaaaggcaaaagtgtgaggatacacagagcagggaacgagtggagtcccctctccaccggggcagtgtgagaacggagggcgtgcagtcagggggtcctaggacttgggtgggtgctgcagaagtgaccaggagggctgacagggtggagatgcaatcatcaagctccaaatcaatcatccaccccttcagagtccctgtcctccattaagacaaaaaaatgtttaaaacatattgggggcagaggaagagtgaagagattggaccacgttagctgcttagtctagttccctcctccacaaggcaatcggatgaccccaggatctcaatgtttaggaaagtcgtaggagccctcactgggaggcacatttttagtccagaggcacgacatttgatggtttaatcttcacactacaaactagccttgggacgttatataaaccatgttaacctcgatgtgcctcagtttcctctttgtcccaggagagtaacgcgttctctgtcttcacagggatgtggtgcgggtgagactcaatgcactgtgcgaaagctctcccaagccagcaagcaccacgctctccccgcggcaggaaagtacgttggtgtcatcctagagccccagagggctgagggaagactcgagctctaaaattagccgcttccaggcccggcgccgggaatgccctccagttcgccgcgcctcctccgccgccccctcccgcgcgccccctctcccctgcgccacgctcctagatcgctagtcatccccgccgccgaggctcctctccccctcgcccttttcgctcgcggtttgggaggaggagactgcgagagacaagcgcgagggggagacgggagaggggcttggccgtgcgtcggcgtcggctgtgatggggagcccggagcagccaggcggcgagcagtagcggcggcggctgcagctcggagcagacaggagagccggcgctcctccccgcaggctgcgctgtgaactggcctgcggattgggatctcgcgcctcccgtccctctcctcccgctgctgttctcttcatctcggctcccctcctccgcttgcgaacccccggcggcggcggcggcggcgtcccgagcgcagagcgcttctgctcgcggcctcagtcccggctagcgcgcggtgggcgctgcggcggcagcagccgggggaccggctcgcccggagcaagagcgccgagcaccgggtgaagaagaccacgggggaggcgcctcgtagagccgtggatcgccagcggaggcaagggtgcgtggggatttgtagcgtgatgatttggctgcctggtgcaccgactggagcgcgcctgccggagcacagcctcagctgctgggtgcaaatgggctgcgaggtgggctggggaggcgagagccgacgaagcgcgtgggggaaacttttcaccttgtaaagttccaacctccgcgcagccccgagccgccgttgctaccgctgcaaacaggagaagagggtggcttggccccgcggcgggagccgggaggtttacacggagagttggccaagtttggggctgaggatctggggaggggttgcgaggggggttgcggatcagtgcacccatccccggctcccagccgcccctgcaggtggatgagaaggttcaggtggcgagcctgcttggcagccggtgcctctcgggcgcagtgggggatgttcagatgccgatggatgatgcacttaggggaccccgaggtgcaagttgggtcatcgctaggcgaggcgcggcgcagagagggagcccagcctccactttcgctaggaaagggaaagggttaccagtctgcgggtccgttccccacgcctgactcgggcttgcggggcttgtggtcagggtgagatgtagtgaacggcggcggcggctcttcgactggggacgacatcctttacggagtggttggggacagagactgtccctgctatcttgacaaggagagggaaccggaatgctttgcgagagtgcatgatttttggcgggcgtgtgggaaggctgcttgtctttgaaaagaaagcagcgcgggtctgaccatccccaggagtgcggaggagctgtctccggattgggggcgagaacgccaggggcaccagctccgagctcaggccccactcccgggcggttcgggacgaatcccctctacaggccagtgtgtgtgcagggcaagtgtagggggctgaggggcgctggcggggaggcagtagaggtggcctggaccatcttggcgcggcgcgcggtgagcgcgaggattccgccagtgggagtcgctgagctaaagtgcatctggccccccggcttgcatgatggcgagcccggatatttttagctgtgctgtgatctgaattccctcctctcctctctcgttgacttttgtcacatgtgctttccgagatggtttaacattgaacatgattgggctttgcggaaagcaacttttattcactttccaccgttctcctcttgtgggcggggggtggcgggggcgtgcttggggcaaggatgcaggggtggccggagtttggctgcgagctaagagagccgcttgggttgctcgggatgagaggaacaggggcgctcccggggtgtgggtgtgctggcggtgacatcctgaggctgcagctcgctggaataatgggctcaaaccaggcggtggagaggggtccccggaatggacgtcgggggcggggaggctgcggagaccctgcgaggtctccgtgaaggactaggaggggctcccgggagggagtggcgcctgcggcccggagcgtgggcggccggtggctctggcacgcggaatctggtggactcctagcgcctcggccgggagctccagctccatcccgccgccgccgcgcgcccaatgggactcagcttcgggtttgggcgaacctgcagcagccgcggcgggagggagggacgctgggaccgcggtaatgattgaagtctttttcccccctctcccctcctcccgctcctctccgcccccagactctggcgcgtttgttttccaagttggatcccacttccatttacaagtgtcagacaaacccgcgagaacctcccccaacccgccccggccccagccagactagggagggcgcccagggggagggggcgagctgtctgggcagtgcctggggaggtgcgacgcgcccacccggggcttgagcggctggggttcctgtgcgtgggtccttaatgtttaaaagatacacatgaacagcaacaaaacccaaaccactcgtggccacttgttttctgccgcttttctcccacttgcctcggacatattaattttctggccccgacgctagtcttttcaaaggcgagtccggggtagtgggaggaaggggcgggggagcaggcctaccagttcatcacggtggatttgtgctcctggctttgttgctaggattagattctctgattgtgcccaggctaagttaaaataaaagcagagagacagagaagcggccagaaagactgcagacgactttgcctggatccaggcggcaaactcaggtggtggaaaggggaagcccgccatctaggaattgaggaccgaggtgcccacatctcagtatcgatcaaacagagcccagatttcttctccaccagcagacactgaacttctcttcacatttactgaatgcttgaatgatgttctggtgtgacgtggagatttgaatctgagaaggaaaggaagggaggaggggatggaggagagaagagagaagagatttgagagactgagattcttcagaatcctagaaattgcacaaagccaactgcttctgctttttttctttcttcttcttttttttttttttctttattcctaaattggagcaattgaacagtgagagaataaggaacagccaaggaaaccagggctctaagagacaaagacaaaaaaaaagcataataactttagcactttgatgtgcttcttatttaatagggttggagtgggggaagttttttttattttttttttaacattttacaaggagaaaagttgtctcttagaattaaaccgaatgttgatattcaatcatgaatctcagttgttgcctttttggaacttgaacaatgagtgatgctggggccagtttctgtgcacagtgcactgggatgagaaagttcccagaactgtccagttataatgtcttcatatcatctgaatcacacagagaactccacatgaaaggcagctggctcagagatcagaaatcagtcagctgctgggctggctccatctcttgtggctgcaggattttcacagccagggtttgttgaccagcgactggctctcaagccttttagaaatctttctttcaaattttatttattctggtctctggcggagtcattttggggatttttttaataggacccagtctgtctgttaactagcaattacagttgtgctgagctactcaaaaatgaaatgagtagcaataaacagtggatacccactgacctgtatgctatacggttattttgctagcccacagcctttgtaaagctatggctcttcaggctgctcacagaagaacattttgatgtgtcaggttatgttatcatccctgctttcttcttcatacgatcctgaatgaccttagctaatctggctgatgaattatgtcaaatagaaagaagtaggcaattaccaggcaggagagggtatttagtcattaccagcaggtctgaggagtgctcctggtggctgttgcgttgttatgctatattaatagctcacaaagcataaaggactattgtggctttattttaccagttgtggcattggggtatggcattccttcatagcccacatctgtccagttgcctggtgggttggctttttcctctagggcaagaaggagaaagatagtaatgaggatatttgatttttttttccattgtggggtcatccccaggtttttcttttttttccttctgcaggagccttgagtagggaatcatctgatgggagcaggtgggcctgtccatttgaattgatttcctttgattgctgaagaaggactattgatgaaccacttctttgctgattgtggcaaacattagaattggaatggaaatttaaaagaaagggatctgacagacttagagtgaaggatttgtgttctgcccaattccttcctagagttagcagagcctctgatttctacagatatgcatggtcttaaaaatattaaaggaagcacaactcctgtgtatgcagttttacttattggtgaaattttctgcaatgcttttttgatctctaactgttgaatatgtcattttcatcatctttctacccaaattgtgaggagtgggtctttgttttttaatatatcctgacctcttgaggatcaccacagtgtgacaactttctctgggaagactcagagagtaaatatcttttctgtgttttggtcgatttaattctacaggcttctcaaacttactgagttttctgtcaattgcagggtatctactcctttaataagctttattcctttccttgttttctttttttgttttttcgtgtttttttttttttttttttttttttttttttacattgcctccctttctccaaatttctaagaataattttcaggaaaggctgcctttccttgaaaaagaaattcagcttaatgacacagactgcatttattgagaacatatttgacacttgtctagtggcttcaagccagtttctggtctaccaaaataggctatcagttacatgtaatagtgacaaatgacccattctagcagttctgaattggaatggcattttcaggttagtcttaattttagcatattccaggacttagattttttttctttttttttttttttttctgctaagtggaagggatgaaaatttgagaatggattaactggcatgatgatagaaaatagaaaacagatttcagaacttaatcaattaaactcttcacataaacaaaatattacttccttcaccagatagatatatatgaatgtggagagcctagaggaggtgtgaggagggccacagcattgtccttccttgaacaatgcattattgaaggtgttgcctaccgtgggcggaaaagtcatacagaggaccctgagaggagtccttgagcagttgttagtatttcaacgttctgctcttccagggttccaaaactgtgaattatagactctttaataaaggaaagttgtttctttaacttttgcctttgtacatctgaaatatatccctttttaaaattctgtaaagtcacatggaatttaaaataattttttgtctttaaaaaatgtcttgctttctcctctattttccctattttatttttgttatttatttatttagaaacagagtctcgctccattgcccaggctggagtgcagtggcgtgttcttggctcactgcaacctccgcctcctgggttcaagtgattctcatgcctcagtctcccgagtaactgggattacaggcgcacaccaccatgccctcttaatttttatatttttagtagacagggtgtttcaccatgttggccaggctggtctcgaactcctggcctcaagtgatccacccacctcggcctcccaaagtgctcggattagaggcatgagccaccgtcctcagccctgttatttattttttaaaaaaattattttaaagttcttttcagcgatatttactgaatctacctctttcacaagacagtgggcaagattcaaagaatagtaaaatatatccattgcttctgcttcgtgctatttattgagaaaatgagagatgcctgtgtgtgtacactagaagtcacatctaaaaatgtttattaattgacaaaagaatgtctatgaacaggagcctcaaggaggagggagagattaatgtgaggtggagtaaacttttaagaggagtgtaagttattaaagtgaatataattccatttaataattcttactacagccctaatgtatgcaaggcactatgaaataaattaattccttcatttgtcagggggcagtgcagagctcctttttggaagaacgtattcatggggcagcccaaatgggctgtcggaatgttagttaatattttgagaagacttcagaatttattcatgtcctttctccactatccccttgtggtctcccaccccccaatttcaaaggtaacttttaggatttttgaatgtgtctgggagcctgcatgcaggtgcacatggtgtattcttagtcctctgttttcctatgtttgagacttagttatgaatctcaaggttaactttgtcacagaacacctcagagtgttctgtcctttaggtattcatcatttagatctgttgcttggttttttaccttaaaaaaatttgtaaaaaatggcttacaaagtaacattagcttccagaatgtgagtgaaaaggcagacttttaccttggacgttctctatgacttgatcctacttgtacttttcagagcagttgcaaataatatttcagttaattctttctttcttttcttttttgagatgttggagataagcccagctgttgaatgaggcacagttatgaaaggttaagtggaagtttaattgtaacttcaggacttcaactaaattaaattccaaacaatctgaaaaaaattgtagccttttcagtaccatggaaggtcaaaaagtgagcactctggagcagctattgatgttttatattttgagataagccccaaattattaatgctactaaatatcattgaacattatttgataattgtaaacatctaagagtatgccagatgacacagattaaatttagtgacaaatgtgcttaatgacagtataaatatcagggttttttttttttgtcagataaattctatgtaagtctgtgtgtgttttctttcaaagcaaaatgaggctatatcttggtagcaggatcagcttggtcttttttgaaacctagagcatttatcacacatgacattttgttgattttttaagtctatgtgatcaatattttggacctctgaaatctatttttgattgtggtttgaaattctctgttggttctaagtggtggcttaatgatagcagttgctgttgtgattgggtgagcagtgtgttatgtgattcatgtggtaccgtcccatgctagggtggattttgcagctagggttttctcagattggcctggctatggagaacttcactgcaaagaaatgtacacatgaaagtgggccaaatgcagatgactttaacatcgcccatgttatggatagaatggggtgtgaatctttcccacactttccacttaaaaaaaaaacctttgctaataacagtttcaatcaaatgaataagaattcagaagtgtgtggtaatctctcttgagaatttggtacctatctgataggactgtaaaggcatttcagaatgtcaattaaatggaaaaatatgcctggaattgaatataattaagaaatgttgaagtctggtgtctacatattcagacactgtataagatggtttaattagtgaacaaggatttggatttattgacagaaggtctctttctcatggcatgtttcactcattaaaagctcataatgtcttggatctttttagctgttggaacttgaccatttgtcattttgtgcttcttgacttcagtgatgtcgttttttttttttttttttttttttgtttaactgtgcaactgattaggatgatgttgcttctctcattgatgattatttccatggagtggacgcatggtgtcttgtaaacattatgaagcatcaccaaagcactaggcaaaactcagtacctctgaaaaacaacaattgggaggtagaattattattgtggaatttttggcctagcaacttagaagtaattagagtaacttcctctttataactactagctttatattatatttacctgatggcagaatttacatttaaattcacatttctctacatctctctcagtttttcagttaatggtttattagtttaaatcctttttattcctgactgttgggctgaaacagtttctaatcatacagaagactgaaattcttttttaatattcttgttgttggatatatttctttttgaactgcatttgatgattataagtgcctgaaagaactgcagttagtaaagagagaacttgggaatgttgacaagtgaggtagggagaaacatggttcagttagtccttgaggatttttcattacctgtttataacttagattttggctgtctcctatactggtactaatgtgaacagctactttataagattttttaattcctcatcttcataggtatgttctctaagtcagagctatttaaagtaatctagcgttccatctttcctgtagacatagcagatcattcacagtctggttgaactaagtacacattacatcgttggtcgttttggtggcatgtgctgggttcttcaggcccgtgtcattgttggcaaagtatactaagagtgctactattatcttggactaattttttcatggagcatattaaataaatgtggtgtctgacccttcaaaagttagcttcctcacctgagtgatgttcagctaaataggtataagtcgtaatgtatgtgtgatcctaagtcagtaagatggtgaactgaagtgacatcatctgcttggaagtccctggattaacaatgggacttatatttatattcagaagacaactgctacaatgaggaaattgggcaatctaggcaattgaacaattgaatgggaaatgtaagacaaaacatattatattgccagatcaattccctagatcttgttgaattatacgataattagataatcttcttttatttggaagtgtacattttgtaagtgtaataacttgcattaatcactttattcctaagttgtattcagcagtgcacatgttgtgttcagtttacattctgcatatttttgttaaataggtagtattaataacatattttacctcatatccaaagagaaagagggagatgcaggtattttgagatttatcactttcatacagctcatcagtggttactataataatccaagtgaataaacctagattgttctttatacaatagatatgtttttaaacattgagtgtaaatgacatttttcaaaacaaatcacatcttaaatgctttcaactagggaaaatacactctttatttaaacagatgtggcaaattatttttataaagtaaataacaatttgtctctcttacatttatctgttttttaagtttagattttgtatattaaatttctcaaagagatgcaagagtgtatacatattggaaatacgtttttgttcaaatatataataaaatgaaagagtttgaccttctccctcagtactgctttgacgagaagtggcatcagaggggaaaataaagggagaagatggaactagaatgagaaaaaacagaaatgtccacctagtttatggagatgttgaggaaatgttaaagtttaagaatttctgggccaggagtggtggctcacgcctgtaatcccagcactttgggaggctgaggcaggcagatcacctgaggtcagcagttcgagacctgcctggccaacatatagtgaaactccgtctctactaaaaaatacaaaaattgccgggcacggtggctcatgcctgtaatcccagcattttgggaggccgagaccagtggatcacaaggtcaggagttcaagatcagcctgaccaacatggtgaaaccgtatctctactaaaaatataaaaattagccaggtgtggtggtgggtgcctgtaatcccagctactcaggagactgagacaggagaatctcttgaacccaggagatggaggttgcaatgagccgagattgtgccattgaactccagcctgggtgacaacagtgagactccgtctcaaaaaaaaaaaaaaaaaaattagctgggcgtggtggcacatgcctgtagtcccagctacttgggaagctgaggcaggagaatcgcttcaacctaggaggcagaggttgcagtgagctaagattgcgccactgcactccagcctgggtggcagagcaagactccatctctcaaaaaaaaaaaaaaaattctggacagaagggccaggccagtccaacccagaatcatacctctgacaatgtcagtacttttgctgacactcccatttctagcctttggagcatccagagaagttcccctcatctctcagggcctcttgtcttctgcagcccctctgcctttttctctctttggtacttcttggcccctttatctctcccaaccctctctagttcctgtagtcactggttgcagctccatgccgtcctgaaggtattgcttacacctgacctcttatatggtctcttcatatctctgcactcaggtccccctacactttgtggtattattgcagcactgttcacatgccttgtaatgaaattacctgcgcgggtgtctctttctcccataggccatcattccctgggctcagtgggataacatattaacctttggtctcccactcttattgctatatcttgctggtatttaatatttaaaattgaatgactctgtttatgttcaacttggttagtgattatggacttccacaattgaccatctatgaccaaatattgaaaaatatctctttgagctattaagactgcgttatgattctggtactgcaaagatatattacttctgaggtccacatttcacagttggaggaaagatcctctaggcataaatacacatgctctttattggctgatctgctcaagctctggatctttcctgtatgttctaagcaagtgttgggaacacatcaagagggcatgttggatgcatccaggtgtccagccgcctttcagtagcatcactttgtcttcaaggaatgtatgataagggtgttatgtacctaatagtacatttgcatggcgtttgatgttcacagtcgaaggtaaaatagactgggaggtaggagcatatctcagtgctgagttctttgtgtctcaagaaagcatagaacacataagtaagaatgttattattataagaatccttggagcctttctcaattctatttaaaaattaaattattcataaacacctgtgctgtaactattattacactaagttacagtcaacacacctcataagggattgagtctttccagtatattctgaggcccagatgcccactggggtatgggtcactccatagtgaccattgtgggcaagaagatctttctttaaaagttggaggtacagtttctggtacataataaagcttgtctatgtaaagcgaatgtatgaagtaatgtgacagttcataatggaatagataaaaatgcaagtcttgtaaaatttaaatccccctctcctttttttttgttcaattacactgcactatattcattatttgaggggcaggctggtgaaatcaacacgtgagcaggtgcgtgtcttgggaatgtcctactacaaaaaatattcaatgactatttcctgaatgaatagaaattggaaaaggctgtgtctgtcttttagacactttgttattctgtgagtttaacaaacaaaatctcattaacaccaaatccacaggagcatgagaaatgtgtaatgctcttaatttcttattaagtgatctgtgtttattaaaaattggctcggaggtacactgcacataattcataatattggagtctatatccctgaatctttcttgtacttaaaatttgctcacagttcagtgttgggatcttgggtaggaaaagggatatcttatttctggcgagatttactgaaatgggaagatgacgagttagactttggagatccttttttcatgctcccatgccttttagttttgtgtgattgttttaggcctttatttctccaggcatactttgtacatgtctataagcagatgagagggagcaagggcacataggggctgatagaggcaaatgtaaatcccgttttttccctattaactcatgaggcctgctgggtagcagcaggcattaccagacatttaattgtgtgtaaggtaaggctggcacaattccagcatcatggtggagcaagaattatactaatcagctgggatatactgcatatattgattagagttggattttgttatgcaaaagaaaaaatccttataaatagtgggaaagtaattgagagtaattaaaaaggcagagagttaattcacagttctttagatgaaagggtattttgatcctttgcttccatgcagatttccgggcaggctggagcagtctgtgagtgctgagtgtaaatggtatgatcgatgttaccattcaactggatagtaaacaggcaagctgtgtagatgatacactggtgaccaatttcgaacagtttctacttggtgactctcctttgtttgggactagggacttttcccttatttttcttggacttttatataacttttaatcattattaatatccctgatgagaactaaatgtggaccccagtatcctagtgaacactggtgagaatattataccactctggagttacctggaattccagcatgttttaatgttgctgccctccttcttccaaacgagaaggctttatagcctttggtgtcacagaagacctgtcatctgtgaatggtgacctgaaatagtgtattcacacacactttcttgcctcttgagccctttcactcatagacagtccttccaaaaaatactcagtgaatactggtccaatgaatgaatgagatattgtagattttggatggtagaataatttagcatcttgaagagaaattataggtggtatttggtggagttctgagtattactatctgagatcctgaataagatgtaggaaatgggaatgtggtgtggggaaagaagaaaatagctatgatttattgagtatctactttatcatactctttgcatacgcacttttgttctggcatcacccatgtcctatgaagtagatattaatatcatcatttcacaggtgacaaagatagggttaggagcagaaacaaggtcataggccttaattggcagggttgggatttgaatctaaagctcttgttgataataacatcaagagtagcagcccccatactgggaaaggaggagggtttcatattctcagaatctgggtgtgggcccaaagatagaacatgagtatcaggtggatttctttgagggctgagtatttttcttcaaaaattatgctaattttacagtctgttccataatgtgcttgtttaaatgtgaaacatattaacttacttagtcatcaaagcacttaaattttctcccctaaatctttaagtaaaattgaccacccaaaagttgctcccagtatatactcagagacacctctggaatgtccacatagggaatcggagggggcaatctggttggaagaggaactgagggtatcttgaaatttcgtttgtatagcaagcaggttttgtttgtttgttttgttttttgtttttgcttagattgcatgcttacttagggtggcctggggctgttacagatggggaaagggctcatgctccagatttcatctttgtttacctaggaactttaggaatcattattgtaactgctgtcaatccaagtttgagaagcctgcacagaactatactgccctaaattatttaaataataatagtaatgagaacaaatactatgcatgtgtttaattatgaagggctgtttctgttatcttatttttaccatagagatgataaagtttatgtgggaaacttgagaaaaaaagaatgtggataaagaatcctgaaaaaaacagagtacttctaaacttcctgctggtcagttggtattgaattgatagtagactatcaaaaaagagttcttgacaatattaataacagtaacgtgcattcgtttgtaactttgccatttgcaacttttcattcatttttgcgtttgttaataacaactaacattgctgagagctttacatgtattatctcatttatcccccaacaactctatgaggcaaatactattattatctctaccaaaagaaattggtatttctctactaaagaaattgaggcatagagctgctaagtgacttgcccaaggtaacattgttcaggaggtgtcagaataggatcctaactctacaacctgtgctctttacccctctgcctaaaagagccccctgggccaactgctatttattttcttactggattctgggtttctggcctgtcttcagccttactcatagtgatcctatagtgatcctggagaatcatccagcttctccaggttgtagtaccccttcaaacatctgcacgtgcatggcaaatacggtttgagtttctaaaacttgagtgtgcacctaggaagcagaaagcaaatggagcatctcctgagtcaacagtgcagatgctccctcttgaaaatgacttttcctttccaggctctctgactccacaaaaggaagtggaaaagttaaccagtgcccaataaatgtgggttattgccccctgcctgagtaatttatcacttgctggaactaacttcagaattgctttgagtccatgtcatgttactcctgggaatgggctattataagattctgaatgactgttatgcagttccctatggctgtgcttgcacaggagaggttgaattaggaagttggaaatctactgttttctgattttggcttctcagctgaatgtaaataaaaagatggaagataaaatgtagaaaacggcattaacttgattaggggtcttatttgcataaaagagtctttgaatcacaattaccctctggctttggacccagcttttcttgcctttcctattatctggtccaaggtcattactaaaaggcttcctgtttcatggaagaggacttactgaaatattaatttcattgcctgaagtagattcataatgtctggtgaataacctgaggttctatcagaatcactaaggtaagagttattttttatgcctttcgaaagatggttcaggaatttgagtaataggcagctaaaagttcactttcattttgcctgtctttatgacagaaatgagcagatatctttatgtcctttggcaattactgcagtgaaacaactaactggataaggtgcatgttcaaggaggttttttagttttacatttttttcatttaattgtactgtgactgagtttgaatttgatgtataagactctaggaaagaagtgaacttgtgacatttaaagcttggaaacattttccttttcttctccttttttaaaaatacagatagaacttgaatattcaagattttcttgaatgtcttttcagtttgtaactgcttgtaacacaaaagcttgacttacaatgctgttttttcttgttcttttgcagccatggctgtatgtgtaatttaatccagtgtatttaaaagaagttgcattcttccatggtagaggtaaaagcccccactctcccttagtagtaactaatagtaatacttgcaagcacaattacttgaaacaaaatgaaaccccccaaaaaaaaaaaaacccaaaaaaccaaatcccaaactgtaattgaaggtttttgcatcaatgtagacaacagcctatacagcctaaggttgtaacagatacattttgagtgagtttggctcattttattgacatattgttttgtctgttgtgagtagacatgcattattcttggctcaaataatacatatccattgacaaaagccagcaacttacttacctggtctcatttttggaaatgtcctgggaagttattattttattgttcttttcagctggttttgctcagttactcagtagctttttgcagaactgttttccagtctattttataatccacatccttgtagaatcccccccatgccccccttcctgccacattgctggaatcatttctgtttttactttgtaaagcagtttgcttaatgtcacaacaaaataaagcatggattagaaacagcattgcagtttcagacttaatgcctttgtgacatctcattgctatgcaaatgagattcaaggaggtcatccctttagcagttgctctagccctggtatctacttgatattcgttggccaaacttactaagcattcattactgagctatcctgggtgtttaactctttgttagctttggactttctatctgaggctcctgagcttaacagctccttcttgggagctcctccttgtgagtaaggcttttcatttcaggatctccttgcaactctcttttgcttcttagcattgcaggcacctcagcaaatggagtactcatatttaaaagatacacttaattatatgccaagacggtattgcaaaagctcatttgtgatgtgtttctttgctgtttcaagtatttttatgattgcaaaatactctgtttttagatagatattttatttacctgcatctgtgatgagttcttaaagatatttcacagaaaatgggtctgtgctggtaaatgttcatgtaatacttattttaaaattaaattttctgtaattcaaatttgatttcatctgattgagcagatgtattaatagttactgaaggtggaggggtccaattttaattcagtaagaatcaactacctttaacgaatacagaatgttgctggtgtttcatttgcttagttaaagggtattatttatttatcagtcattagtctgatagatgtttttattttaaaatatgcttgtaaaagtaaaattaaaaaaaatcccatttgaatgagccttttgaagtttgagaaacttgccatgttttaaatggttaactaattgagtaattattctctttatattattttggcacagtggagttatttttacacacctgtagatacaaagctgtcaagacactgagtctgcactaagagtttggctaaaatcactgctaactcaaggaaagcacactttacactcttacacttgatataagaaagcttaggaaccagaaagaaggacattcatcttacaccgtgatctcctacacattaagaaatagaatgatgacattgatggcaaaggtgatttgagcaactattgtgtttaacattgagaactctaggatgaggatttgactcttttcaaggattaagaacacaatcctggattaaggtatcgaatcaaacacaaaattctttaaagatgctgctttagacttttataaaacagacctttccaaagtgtcttacctgtctactgatggtaagggactcagacatctgataaagacaggttttcttgaattctgctgagaggcattaatccttcacaatcttaataaaggacaacagaaaactactagtggttaaaataggggaaaaatatttgtatggcaacttaagtgcaatttttaaagtaaaagcttagaaccaccttttttttggtaggatctttcatctcctatgctgttcttcactgactcataaatgttctcaggagcctattatactgaggcagcttgctgggtgctaggaggtcaaggagataaataaatcactgttcttgacctcaaggagtttaagatctgtggatgaaatgagacctataggcaattatcaagaaagaaaaattgatattgctgtagttcatgtgttctgcttgttcatacatgaaagtgtgtttctgaactaccagggaattggtttcgtatctgaatcttatggtcacccctggaaataggacttatattcagtgctggcacatcctgatataggagctgggcatggattattattcagtaactactacttaaggagtcagagttctgagcttgatgctcttgatctatcctggcaattcgtatttatccaaggaacaattagaaggaaatgttattttatttagtggatgtgttccagggaaaaaaatgtgtacttttcggaggactgttttttttttaattgtggtaaaatctttcacttaaactttgcaagttattttttgtaaagaaacaagtataatttatgagttgtacatttgggattatgaaacaatgctagaaatgtaaaattgggtaatagttgtattgaatttgtagattatcctagtgcctggcagctgcctgtttcctattgtcttcttttttccacctaaacaagtgttgagtacaagagctgttgaattgaaatcaaccaatattgaataaaatgaaaaggggagacaaagttaaagagtatgtattagctaaattgagataaagtctgaatttcatttgtctctgctgtcattgtttccattaccacagatgattcaattgaatgtgtgcaggcgtcggtgaattataatagcagttaagttttcttttggggcttttgggaaaagttttaaaaatgaatttcctcagagttagatggaaatgttttttgttgaaagccttgatttaaaaaaaaaagacttgctttatgttttagaaacttgtctttttcctaaatagaaaactttcagaaaactttaaaaaaattaataggttaaatattttgcatcctgccaaatttattgttttagcaatctgctttcttgttacaaagcatactggttaatagaatgcttcacactgactcttgtcatcagtgtttgcaaatgtaatgttagagttctccctggatccttgtcctgataataggataaaatgctaccagatgagccacagtactttggtttgtggtctggagtttgaaccataagccaaggactttagttttagatccagattccaaaccatgaaattttgatttgggtatcatttttaaacaatggaaccaatctttattaaaatattttaaaatagaaagcttcaactatgttattactctttgcatataacaattgataaagatcaaaatttaaggaaaagaacatccaaataaatttaatgtctttcttattattcattatgattcatattctagtccatttcttatatgcacgcctgattagaatgttactctctgccttaccactctttcctcaactccagagtcagaatctcttttttgtgtgggtatttagaagagaactttgaagtagcttaactcacaaagaccgtgcagctgttaaataacatcagaacagggaggtaaatttttgaaaggtgagattttgagattatcatattttcttttactgtgtttatgtcattggttccctggctgaactttgtgcttcttttgggcagaaaccctttcagtcctccttttataacccttttatgggattgctagattgagtacataaaaatccggactcccagttaaatttgaaaaacaacaactaattctttagcacaagtatgtcccaaatgttgcacgagacatattttatctggcaacttggctcttgcacagatcacagcttaccctataaaaggtattgagaaaggttttgctgaatgactaaaagagcttgcaggtagaaatatctggtagttggaaatactaatttacagcaagcacagtagagctttaatcaggagtcaccagtgcatgcatcggtggtacctaaagtcctggggattgtccagggtgattgtatagaccagtaattctcaaactttaatgagcatcagaatcacttgaagcatttgttaaaacatagattcctatacctagtctcataatttctgatttagtaggcttacggtggggcttaaaaattgtatatcacattgtggttttgatttgcatttctctaatgaccagtgatgatgagcatcatctcacaccagttagaatagcgatcattaaaaagtcaggaaacaacagatgttggagaggatgtggagaaataggaacgcttttacactcttggtaggagtgtaaattagttcaaccattgtggaagacagtgtggtgattcctcaaggatctagaactagaaataccatctgacccagtaatcccattactgggtatatacccaaaggattataaatcattctactataaagatacatgcacacatgtgttattgcagcactgttcacaatagcaaagacctggaaccaacccaaatgcccatcaatgatagactgtataaagaaaatgtggcacatatacaccatggaatactatgcagccataaaaaaaggatgagttcatgtccttttcagggaaatggatgatgctggaaaccagcattctcagcaaactaacacaagaatagaaaaccaaacatcgcatgttctcactcataagtgggagttgaataatgagaacacatggacacagggaggggaatatcacataccggggcctgtcggggggtggcgggctaggggaggaacagcattaggagaaatacctaatgtagatggcaggttgatgggtgcagcaaaccaccatggcacatgtatacctatgtaacaaacctgcacattctgcatatgtaccccagaacttaaagtataataaaaaagaatgtatatcacacaaattcctagataatgtcaatgctgctgctctggaaccaccctttgggagccattatgcaagctctctggagagggattgtccaacattttctataaaggatcagacagtaaatattttagcctttgtgggccacactgtgtctattacaactattcaactctgcctttgtagcttgaaagcagccataaacaatatatgaatgaaggggcatggttatgtttgaataaaactttatttgcaaaaactggctactggctggatttggccagtgagctgtagtttgcaacccctgctttagagtaagaaaagatgatagttgaggatagaacttgaacattcaggtttaagaaatgggcagaggaaaaggaatcagagaaagaaccatctgcgcaatgggggaagacccaggggaggggagtgtcatggaagccaaagaatcagattttcaagaatgaaagcatgcgtcactctcatctcctgtcagcagggtgattaaggatgaggaagtggatgaacgctgaaagaggccattggacttggcagttaggatgccatgactgactgtcgactgagcaatttcaatggatgtggggagggacctctgccagatggcagtggatggagtgaagagggaggtggaggcagcaagtactgaatactcttttaagaagtttggcagtaaaggaaaggggaggtggttgaagttgaagcttaaggagaaagttgggcccaggaaggtttttaagaggctacgaggaaaacaaatatgcatgtaggcagagaggagagggctggtagaaacaggagcctgagcttcagatgcattgtctcctgagtggtgccccatgagttgtgcaccatgcactgaaaagggagcagatgaaaatgtaggagaggagggataattaaatgagaaaaattcttcaaagaaacaggacaggaaaaggattaagacagtgtgcagctggtataccttggactggaaaaggggaactatttgctctaagacaaagaggggatatggatcatttcagcagggggaggaggagaagaaggaagaaggtgagagactttccaactgattaagtaggcagctaggctagactgacatgattgtggaaaaggtagagattctaaggaaattgatgaaggtttggagtagacaatgtggcagcaagtatgccaaatgtaagtacaaggcttaccaggcagcaccaggggctgtgttggggttagagctcatatattagaacacatacatcacactgttatatggaacttcctgtagtccacagcaacctgggtactacagaaaacaaaacatagaggttactgagagttgcaggttgtcaagagatgtgagtcagaagaacatgaaatgatgtaatttaagatgctcatgaataggaatattaaggaaaactaggtggagaaagaaatgaaactaagactgatacatttgtcacaggtcaaaggactagaactcttggtgaaagtgaaccagtttagagggagctctaagggaattggagagacagaaggattggaaattactagagaggttgggatgtctcagtgattccagcgacgtggcagttccaaggaatgacaagggtctggggtgtggctgtggaattaggctcctaatgtggagctgaatgagtgtagtccggaatataggtgagtgtgttgggtaggttagcagggtggaccttgagctcacacacagtggcaaaatatagaaggctcttgccttacctgaacctgtatctgccttaactttgggtacatggctgagccttgaaaccatgtcttttttttttttttacttttgtagggctcccgaatccctgctcctttttgtcctcttttgctcttgcttggtgtgacatgcctcttctgcaactgctgaagtaattcaccgcacgttttcactctttcctcattttttccacctggcagaagcgtgaagaaagattacagacacatgggatacctctgtgttggtaacttaaacttctgtgactatcccttccaaatcagaagggagtcatttttcaatttcctctataaaagagagagcaagtctgtcttcctaccaagcattaccagttgttaggcattgacgaacatttgctggcaaactcaactctgtattatggctgacttctttgcggaagtctgcctattgtaagatgtttaggttcacctgttttttttttttttttatattcaagcttctgatttcaagtttcagattacctcctaaaaatgaactagatccctttccattaaaaaatgcaagttcttagggcattgtggcatgagcctgttgttgcagctactcagtaggctgacgctagagaatcccttgagtccaggagtttgaggctgtagtgtgctgtgctcctacctgtgaatggctactgtactctagtctgggtaacacagcaagaccctgtctcaaaaaaagcaagttcatgtagataataactttaaaattaaataagaataacatttaaatgaacatttaagaagtatttaaaagaaatgattaaaatggtttccccatagaggattcatctttcaaaaggagttatcttcctattgccctcatctttcctttttccctcagtcttactatgcaaacattttctttcacccacagaaaagagagctatgttttaaattcatctttgaagactattttttgcaggaatggctgcatttatatctcatactctcatgtatcagttgcaaaaatcagataaaatgaattggaagagtatatcatttttagtatttgaatcaacacatctcacactagatttcatgtctcatacagatggcattaccctctgcatacttttcctccagtttggaattgccaaaagaaagatgtaaatacgaaaggtaatggatgttggagaaagattactagaatagctgtcaggtgttataaataccatatctgtattgctagaatgcatgaaagtttacgctttgactaaatctgtgcagaaaaatttaccctgtacttgccacccatcagcactttgagaatgcaaacattaagaaaacaattttaaatttattttaaagttacccccaattttctttgtttatattgtcattgtagaaaatagtagatattggaaaaagagaaagaagcaattgatgggaacagtacttggaattcaaacataagatttcaaaacttaatatatcaaaatgacacactcacatgtattttagtaaggcatatagtttctgttaaaactacctggcccatacagacaattcccaaggggcagaataaattccaaacacatagctacattaatgatccaaaaaagatataagaatcatggaactttagggctggaagaaactttagaatgaatctggtttaatcttacagatagattgaggttcggagaaagtgaatggattacctacgatcacataactaagtagggctagaatccaatattctaacatctgaattctgtggtccatcacaaattggccatctaaatttcagcattttaatatttataacatttaagggtaaattttaaggttggggtggccattttaaaacacttatttgttatttaaaagtaagttaaagtacctgcgttttgttcatgaaatatggtaacattttgacagctgcatcactctggaaacagacgtcattacctcagatgaacttgcagggagtaattgagatggcaacgatgatcagaaggagaatggaagattgtgataaggcagcctgtgtttgtgtgtacagactcaccacctgtgacttaggagaaggaaaacgcagaggcacgtgcaatctgaaatatgtctctcactcatcaatcagtgtttatcagaattggaggtcttagcaagtgaactgaatgctttcaatccaggcatgtcagtgattgccatcgaccaagcattctgtcacacctgcctgcttttctttctttttctctttacttcattacatattgattgacttgggttttacaagttcataaatcaccctcttttaagaggcttcttggcttttgtgtgcgtagacttgagagtgctgggaaagactgatactcgtatcacagtaacaaagaacttcatattccctccttcagcttcatatgcaaaagtgaagcatcaaaagacagtgtcattatgaagaaatagatttcaatacagtgcaaacaccttataaaaacctgaggtgccagcagcaaaccctcctccatctgatggaagctcttgtgttgcacccatgaagtcattggagagagcttgagagactttacaaccaagaagaggatttaatattaactacataatgagatgccactcttgtaaataattgcagatattattacctgattgcaaatctataattctggtgcaagatagaacagactttcatctgtcataaagtgcttccctgtggtagaaaaatagatgaggtgatacgtatgatttctttcactcttaaaattttctggttgtaataattttatgagttgaagtcttattgttattatttttatttaaaaagattaattgctctctgccccggacattttaaattcttttatagatgaatcctaaaccatttgtttcttattgtttacagatacgaagtggtacataaattctgcaaggatatttttctatttttagcatctaagtttttaattgtaatataaatcagttatatgacattttaaattcttgtttgataggcagatcttaaaacattcatttcttgctgtttacagacacaaactggtatatgaacactgaagggagagtattctaattttaacatctaagcatttttattataatataaaccagtaatagagtttctattttttatggaaaggcctatgcagttgtacaatattaatgcccagcgtcctcttaaataacaagtcagtcaactttgtaggttggtagtccagtattagcaacaaaaaattatattccaagcagtgtttaacagctgatttaattgggaggtatttggttattcctttctgaattaatttctgacagcaaatttaatacatcagaagggaaaaagaaagcaaaactgcattcaagaatgtctgtaattaatagagctgacttctgaagagctgctaaactcttacatgtgagaagtggcttattctggagggacagtgctttgaaagagaaaaacaattgaggcttgggaaggaggtctctcaaccaatttccacttcattgcttcagaaccattttttgtattttctctataagggtaaggcaggaagaggacaagaaatgttctgggaatagctgtcgtttcttagtggagtttgcaaacagaatttgcaggcataagtgtgtcttttgcaccagtttagtaaaatgacatccgctcttacaatgttgctacagaaagtcaaatcaatggagtgatgtgataaagatagtcatatttactgtggatcagtcaaattctatggtacatgtggtgttttcttaggatacttttagtaaatatacagattcagaaaagttccctttaagccagaataaaaacattcaagtcctccagcaataataagcattactattaattaaaaactgactattcaccagacactgtgctaggtactgtctagatagtctgatcagtttcattgcttccgaggtaggttctgtcatccatctttacagatgaagcccttgaacctaagggaggttacctcacttgttggtggactcacacaagtgatagaacctaaatgtgttttagatccttgtcttccttaaaaactatggtgtaagtaatgttatatatagtgcatccaattatttgtcttaatttctttaggaatatttagaatgtgacaggcaaaaaaagcaggtacttaattcttaaaacacttgaaaataattgatgaagttactgaaataaaattgcctcatgatgatctgattgtagatttttctacaaccagttagttttcctattctagttttcttacctttcacttctccaataatatgcttataaacttcaaatttattttagtattaattaaagtagaaatatagtttaaaaatcatcagtttactgggaaaagacccatgagttatattttttaattatgaatgacttttgtattgattgaataaataagaaatttgagtgcctactgtgcctacttctagccaggctttctcaagccccaggggtatatgatgaacaagacagataaggtctcaccctcatgaagcttattgttttttgagaaaagagataataaatgagtaagcaagatcttatttacttttatccattattgtaagttaccgatgatccagaaaggctctatcagcaagctgagtgtatgttgaaaatgctattagtatgcttgggaaaccatatcttttcttctattttgctttaacaggcctgaaaattctacacaagccaacttttggttacttttagagatgtttaggttatctgggcctctgtgttactccattttcaacagttaccacgtcatgacttagcaaggcttggaatgccttgagctgttaagaaatgtgtgaggaatggaagctgcttggcatgatggagcttctgcagaggtcctctggagtcaaaacccacacatcagagaagaatgaagtgtcagaagggaaaatgcagaaaactaatttagcaactttgcctaacactagctttttgcacaacccttggaattgagagctctttctattaagttgtgtgtctgcatgaagcaaggtcaatggaatggaatgaaaagtgaaatcctttgggtttaactacttttgtttgtgtgcatctcgaccacactaacaaaccatactggttagtgtgaccagtatgacatggttatactggcatggttaaacagctgtagagctaggaccattatgaccatttcataggagtcctatgcttacggttctttgagatgacatcaaagagagaacagtctttctctaaatcatgtcaacagagaacctcaaagaatttacttggctgcaagcactgtattggaaccatgtatcctttccttacattttcttttgtttcatttccttttctttctactgttgtgccttggccctgtccagtcacttgctggtgtgaaagctgtttcctaacacatagttctctatgctggctgtgcatcagaatcaggggagctctaaaagacagattcacaaatcccactgacttaggccacttacttggcaaagaataagcaagtaactgcagctaaaccttcctccagtagcaatatgattaattatttctctatgaagccccaccagcaaaactgctgaaaaggcatctcttcatcaggcccccatcctcccctcctgccctctagaactttgggtagggaggaatacattgcagatattccatttggcttttcctaggcagcttgactatcacactgagaccactagtaaagcttgggtacctcctgctcctgttacaattattgccaccccttccttttactgctgccttttgcttgaatcaggcactgttttgcaggctcacttgcctctctcccattgcccagggtgccttgcagtatgccttttctttcctttgggcagtgctgggaggccctaggcaggaccctcacaagtctggccaagtttcttgctgtaatgctgaagctggttctcccttttccctgtttctgagtggagctaagaaatgcatctactcagaggcagcaaaacaagttcatcacaccatgtacccaaccttccactcttccatctctgggatgccttctgctccccttgctcttaccaatgtactttagatttgagccctcttctttttggaggttctcttcagttgatctatcgtcaacttggcataattagtcatgtaaaacactaacttcctagtgatcagcattgccctttgttcttaatatgatttgcatatttcctgggtttctgctctgagctgttcctctgtggaatgggccttggtgctctcacttgccaagaacacctaggacatatttattggctctttggaaaggaaaccaactgggaagcttaagtatgtgggatttatagagagcatttcttcacagtaactcaggtttcttttaatatgaagcaatactatttttagtcaaaattgtgactgtggtttagtcatattttttctccctagtacttttttaagaggtgagttttaagaaagtcagattttgtgaggaatttgtttactgcagaaacatccaaggtaaatggtccgggatgaaagcagattcagagttatagaatattcagttggaaaagatcacattgcaaattcctagatcacttggagatttgattcacttggatgtggatacttactaattcaaatcagttatcagtagttttctaaacttgtaaagaaatggcatcgtttatttgcattgaaatccttcacagaagctccaaattcaaagcagataaaagcagaacttctctggttgcaaggaaaggaatcaccacactctgatgggctctgggttaagagttcttgcatcatcctctcgttctttctccccagtatactgtgctccctagaagacagaggccacatagaagcccagcaacgctgccttctgtcatctattgaaattgtacaccctctttcacaccaggggctgtgttctccacacccaaatatggacaatgagacaagatttaagaaatgttgatatcctgagaaatctcgcagaaggagccaagattctgaattaatcagagataagttttattttattcaccagactgttacaaagataaaaagctgtattaatgcattttagaaagattttaaggggcaatgtgcgtaaagaagtttcaaacagtttaagatcctgctggctggaaatattaaccctctccactgaacatttgagaaaattaggacatttttatatattaaaactttcaaatcattaggtagtggggagacttggataaattccaaactaatttttgatgttaggctaggaagtagaaaactacttatggcatgttaccctatggaaattttactcctaggagtcacacagagccatggtgaggtcaggggagggttggtagccatctttcattgttattattattattattttttgaggtggagtttcactcttgtcacccaggttggagtgcaatggcatgatctcggctcactgcaacctccccctcccaggttgaagagtttctcctgcctcagcctcccgagtagctggggctacaggcacctgccaccatgcccagctaatttttgtatttttagtagagatcggttttcaccgtgttagccaggctgatcttgaactcctgatctcaggtaatctgccttactcggcctcccaaagtgctgggattacaggtgtgagccacctcacccagccactcattgttattttttaacatcagcaattggatcaacatttctactgagcaggaaacatatccaaaatttatagcagcaaatataatagctactttgcctttgcggaagctacagctaaagttaactctgactaatgtccctatgaagagcatgagagatctgtaccctgacccttcagacccaagtggctacctgtgctgtgtcccctcacaggcccctccctgggtttgtagcagtgatcctaactttatttaataattatttgcatacttttaactttagtttaaaaatgttttaattaattagataattttttattttagggttttttttttaaaaaaaaaaaaaggaaaaactctcagtagcttacaaatacctcgtgggcagatacaacatttgtctacctcattggatactcactccctagcacagtccttgccacagagtatggactcactacataaaagcatattaaatatatgaatgactgattgaatcactgaggaaacaagcagatttctacattttcaccagtggagaggagccattatgggcactctgaatattaaggaggcattctaatagagtacttaagaacatattgctctgaactgggtcctcctgtgccagtcttcagctgctgtgatgttggaattttcctaacctttctgtgcctcggtgtcctctgcaaagaggggataagagtaacacctgccctatagaattttatggcaatgaaacagagtctggcgcaagtgctcaacatttgaaggaaagggtctatatgaatgaacctgctctaaaactaagtaaaggaaaaattccatgtcattcatatttcacactgttgcgaataggtaacagggcctttgttatgacaaagatgtcaggagtggctgaaaccagaaacagcattcattgcccaaagagtcgaaatgtggaggtgacatctaccccatgacacagaaaattaagtaaaactagagtgttgcactctgctgtaaatatccttagctttttgtgaaaaactgtcctaaaaagcacaaaaatctatcattcttttcaagatattgaagtctgataatagagaaaacttgttgctgagtctaaataacactgaatatctttggctgtttttttcagctctccttttattgtttctctttgatttaggatctatcttttggcacagtaaataggtcctttatggaataggacatggagttccaggaggcaaatgggtgtccagagaagatcgcccttaaacgagtatacactatttaatctacacacattattaaatgctcctgatttccctcagcaacagagggaatactttaaatatttggaatttaaagtttaggaatttccagtgatcacaattgtttatatatatatatatgaaaaatatatgaaaaaatgtgactcatttatagagttgataaaacactgtgggtcataagataaaattcgagttattaatattatgaacaaataaggagataaataaaaaagagatagggaattagaaaaccaaagtgtgaaaccaaaagaaaatccatgtatcatttggcatgtgtaaaccaagccctttctaaatgcaaggtgctgagattctttgaagcttaatcataatttaaaggtttgtatcacattaatatttattatggatttactctgggccgtaggatgttttgtgaaaagcatcatgcatatgttatgttaagctcatcacaattctatgaggtaggtattgttaggttcatttttaaattgagaaaataagtttagagacctgactgaatttgtctgagattatatagcgaataagttgtgcagccaggatatgaatccagatcttccctaatcccagtgctgtgtactcttgaccacaattaggctgtaaatcgtataatctcagctgttgggaagcttggattccttgtaatagtagcaacatgtcctatgttgatgaacaaactttgctcctcttccttactgaatttttgagggttttagaactctgtaacctgctcttgacctttctggtgtcagcttaaaaaaaaatatccaaataaactcttgtccctacctcagaggttgtcacttcttttaagaatgacagaaccaaaaaataaattcccatgtgctaagacttgtgggagaacaggtatgctgaggctcataaatgcataaaagcctgatgtgatcttttccatttgtacctaggattgtcttgtctccttgcaaaaaacagagatcctggttttaacggctgtttgtaatttcagcttgggtcttgttataaagtttacatttaaagctttgcagtggtaccaggtttagggtaaatttgaaagtagctgtgggggagatgactttaacatttccccagggaagtagactggaaaattgctggagagtgaactatagggaacaatcttgaattggtctcttgggtcggacataattacctaatggattttccatctttcaaaattttaggcaggaaaaaattgcctaaaaaaatatcgacaaaatgtgaagcgtacaacctgttccagttctcttcaagactgtaaactcctggccttctctggaacctttgaaaaatggcagtgtagtggagtaaagacaggcaaggggaagacatgtggaagagaagaaatcagactgatgcatgattggaaactcagaattacataactcgatttgtcccttttaagtcattactgactgctgattcatctccattcatgaatgttttgggtgcagttagaactacattttaatgaacaatataacctaattatgattgagcattttacttttccgtggactgtaaagatatttgttgagtggcttagaggtttgcataccagagtttcctggtcaaaagcgtgcattatgcaatcagtttttacctcaaacattcacatatggattcccctatcttgcttggttactttattggtaccaagaacatgaaacctctttctttcttgcacccccaggtatatcccaatacatgttctgttttaatgtaatttactattattcacattgcttaagggatgacaaagtatctacttgttctcaagttttattactggctgatgtgtgtcagactagacttggctctgtatataaatatactccagtagagagacccagcctctgtgatcccaaatacattcattggaacaataagtgtgagtgcttgctatgtgcctagcatgttacagctgagatggacccacaagtgaaacagacactgctgtgtttctttcttgagtaggagaagtaagtcatggacaggagaaactaaagcactaggtatacaaaggcaagagctccaagggatcaaagtgctgtcatattcaaacaaggggtctgccttgagggatcgtgggagagggcatttgcactagctgcagtcttgattgtgccaagaaggagatgttccaactgggtataggagcatgaaagaagcccacagctggggaacacagagatgcactgggagggagctgtgtatggtttcatttgattggagttttggttgtgtggaggatggtagttggagataaaatgggggccaaattttcaagattcctggatgttaggaagagcactagaactttatttgttaggcagttgtgcatccctaaaaaatgtgagcatcttaacattatgatgagaaccatgattagtggagagttacctggaggcaggccgtgtacacaaggaattggaggcacatgggggttagagaaagagatgcagtagaggctggtgagttaggaagagttgtaataagggatggagcaggtggaatgaagacacagaactagtgaccaaggccttgtggaagagccaacactttaaccactgattcagagtgggatggagaggaagatgaaggattaggggttagatggcaaggagaaagatggtggcattaacagaattggataggaaaggaggaatgtggttgggctgtgtgtggggggcgggggtggaagttgttgggcaggaaagagctatggccaagctagttttctttctaatcctgatctgacacttccttagcactgcaatattaagtggttgtgcccctctgagcatgctcctgcatctgtaaaatacacctttaattcttaggattctttatttcaattatttaagagaattagagaatgaaatggttcaagcagttctcagaaagtaagaaaaggaaagagcaggaaatacaatatggaaatatgaactttctcctgctgcataagatttaaactcttgacatttaaagcggaaaaacacaatttaaagaatgactgaagggtatgttaattatttgtgaagaggcagaagattcttctttgacacttaagatggcaataattttgagcggcacatacattggccatgtttataattatggctaattgtacaatgagtagtaaataggaaatggattgaaatttccaaaaaaaagacatgaatggactttaaatgaatattacaagctaacaaaaaataaataaataaaaataaaaataaataaaaaaaggagagctgtacgaagccacaagaagagttccaccttggattggtggtatggatgtgtttgtgctcagaacttagaacttcaaaagaacagaagtcctgctccacatctaacaacttgtaaataattatatggcttctaagttacttgaaatgttattgaattgaaataaattggaaggaaaccagacctgccattgaaaaccaaaggaccgaactttccccagtgctggagggaacctaaacaaaatctccagcttttaaaggaagagattttcaacctgctttcatctcctcttccttttggtgtttttcctagatgggatggaaagcagaagatgtggctggggtgtttttaagatggaactgagtttgccctcaagtctttcaaagataagacagttttacttaccagggagaggatctattacaccctgaacagctgctatttttgaggcaggaaagtgaagctgaagagctttgtacagctgtcatgtagaattctaagcacccatttgataaaacctgtcagcgtgacccggtttcttgggcagatgcagcccttggctgtagcccctttcctctctacccctttctgttcgtcagttttgtttttgtttcctgttagaaatattccagatttagcagcttaaagtggtgtgtgtgtgtgagtgtacaagcgtgtgtgtgttttaagagcggtcatttgtatgattgaacccaaactcgtatttctctttcaggagttatattaaaaaatatttgacccaaggctctagaaattttgccctatggggaaaaggaagagaagaaatctttatcagctttcttacttggttatagaagtggtaaggcatgaaattggaactgatggcttaataatagctggacttacatcccttagttgaattttgctgacaatttctttaaaatctttataaactcccacttttaatagttctttaaggctgttaaggctctgtgggtaaatgcaccagtgtaacaaggcttcatccaggtatgttacaggaaatgggccatgaactaattcaggactcatgatgtagaccaggaagcctattttatgtatctgtaacaaatagattgtaaagttaatattatcacctggtcccttgtctatcttgaagtttacacagtgtcgttaccatcttaggttgtacctgagggggtatgtatagtagccggcctctctttaataagtcaaagtggactttagaacatcctttaatacaagagtcgagacaattttgagaattgcaagctgactgagtatgccaacatgtaggacatcagacagacagtaaaaaaacttaagtgtgggtatcctgtttgctttttgtccgcagatgttaagcagtttcaatagctggggaaaaattgttgtgtcattatctgtgggtagtgtgctgatagtttattatagggcagagttattgaaagagaaagaattgtatcatttattcatattttaaaatgctgtgacaatgtactacttcagatgagtgttgtccccataaatcatcctagatccctgtgctcaggaaatctgtgaaaagatagtattttcagaggcaaaattatttcagtttcttcacaggaggaattttagaacataaggaggaattcatccaaacaagaaagccatctactgagcttacatcattaaataggaaaggtaaggagggctacacccagtttaaagatatctttaagctattgtctccaacctggggccttagacctctgagtaattagagtatgtgactgacatgcattgtttgtagactgaatgaattaaaactggattccccactatactttgggtactaaaggggcctcttatgcagaaggattggaaactgtgctgtagggtaagatattttaggaacaatgctttagttttctcttgctctttttgtcttttaacttggctattttcttatatatagaatttctgtccaaaaatctaactgtgtgattttttagctcagctcagagtagcacaacaaaattacagccaccggttggacccagttcagtacagcattcaatctaagggccttgtagcttccaaacgtttgtattattccaatccctgggtggcattgtaacatatatttattcttgattgctccagaggtttattttaaaaatcagaataataacacaactaggttaagtgcaatgtactttgaaattccaaaccagtagttctttaacctattcatgctggttggatgacaaggcattttaccattcttttttatttaaaattacccatatttgtggcttttaattaattatctaattaaatgtattttattttattttgcctgcattccaggttttcttatttctatgttgtttctcctttatacatatttactctctcttttttttttaaattctgaggtctctcgaacaataaatggactctagcattgttcccatgtgacctaaagaaactaccatattagaagaggctaccatattagattagctttcacttaacacagagggatctgaaaagatggaatagtggtaagaacctcctaagaagtgacatttcattggaaattggaaattctattgactaaatcaggaaatagaaggagacctcctcaactgcccttgattggtaattacagctcatgggtagttttaatagccttcagaattcctcatctttccttctcatatgttttcctgtaagtagtgtctttttccagaagttgcttcaatggttcttttgaggactgaatagaaagagcaaatgtgtagtcacctttactgagttcaaaggagttatttgacatatcaagctttcccattggctgaagaaaccttagctcagagttggtagacccaatccctgagccattatgagataccagtgatccttggcctggtccctcaggtcagaactcagaaaagagcagcagatacatccagagtctcagggaattaggcaagtttctttccccatccagtggagtttttgctagacctctctgaaacaggatacagcatgatatatttttagtaatttacagaaagaaaatggaaacaagctttattttgataattatttgatattttagtacatatctcttgagaaaactagaatgtcccacatgggactgtgataagaccagagttaggaaacattctcagaatacgggatgggttgacaatgcccatgtgtctgaatttacaacacttgtccaaaatgcaagtggttgcaaatggctctgaaggatgcttgccagtgctgtcatataaataaaagaatacagaatcatagaggcaattactgtcgtcaaggtggctaccgaaatgtaggtatttctctttagccccggttccctcataataatctttcagttttctctctttttttttttattcctcattactttgtagctggatgctataccacattgttgattctaataaatgacatgttgatctcatctacctgggaatccttggtttccagttttcacagctttgtttccagtattcacagctcagtgctggagagttgaccatttgtgtagttcagcatttctctgtgttaatcctgtgagggttgagtgttgtcgacaattctaggcattctgtccatcattttttttttctcgattcacttattctggttttcctcggggtttttatgtcatagcagagtctggaatttggtctggaatatatatacacacacatatacacacacacacaccacacacacacatattatataatgtttgcccttgtgttacattagacagttgtatatagaaaattgatttcttgaaaaagatttcatatcaatgctatgggagcaatatctgtatcattgctttataaagatttttaaggatttgtgaaaaacttttcttccttcctctgaaattttctttctgatgtgaagattacaggagatgtgaatattggatcttctgagtaaaatttcatttattctaaaatgttgagtgataaatgtggtatttgaatataagtgtgtgtgtgtgtgtgtgtatatatatatatagagagagagagatgcatatatatttgcatgcttataattttaactttaattcaaaatgattaaaaatgaacaaattatgaagcatttgcccattgtatcatgtcagcattgatcatgtcctactttgtgttgcttttaattttctccctcccttttttcatcttgatgtcttttgttagccatatttctagaagccccaagagcagggatctgcatttgatattagcccttagtggaaagaaagctgacatatactgaacaactactgggttccaggcattacgctagtgaggcagtgctctgagaagtgctataaagtagataatcattatgcccattttacagattgagaaattaagctgcagagtagttaatttacctatagacatgtagttatacttgagctattgaccaatcactgccaaccccatcgtctcacatcgactctatctgtgtgcctcttctactttgtgcattcaaggtctcattttgttgactttggctaatttaatgatataaatgataaataatagaaatcagagtaatataacattttccttgtctcatgacaaactaagagacatgaacactgatactaacaattacttcagatgtgtatctggaatactttaagactccaattctaaggcttgttttcttgttgtatatgtttcaggagagtaggggctaactgcatcagtttccacatttgaagaagagatacaaaatagttatctataatgtaagtgaaatgtgtattgaaatggttaaattgaagaaaccaatcttgggttggtttaaggacactaagagtcatctctaccctttgccttgtagagcaaactgtgcatttagagggagcttaactagtaattcagaataaccgctattgcataccatgcatttaaactgtgggggaatctaggttgctatgacaatggaaatattttcattttctccatttttagagtataaacacatgaatcctgaatattgctttggtttgcactttatgttttctgacttcgtgagagaagtgacagagacactagccatgcttcttcccagtgatgccatagattctgtctttcactccaggctccttgtggaggtcccagaactcggcttggccgtacctgggcttcactgacatcttttctttagggcggtcacagtgagagataagacacctttcctactgttaatcattcaaagaataacatgtatttatttcaccttggatttgaaatccacatctccttgggtaaagaggattccaagtcagagacaccccatgcccacctttaagatcataaggactgaattctgtgaatattctgttgggggttttttagcactcagtaaaggaaaaaaaaggttgaaaaaaaaaacaaaataattgctaagccgagtctagaaatcaccacaggttccctggagctttttatattagagtatcttcttcaggactcagtatgtgaattaagaggaccactgaagagtcagctgtagccagttcacttattttttagtgacctgggccctgaaactctgtatttgcgtgatagaaaacacattgccttctgcttgactagactaggaacaaaaattgttaaggaaattaaaaacaaatacttttatatatcctctccttctattacgctgccgtatggtttttcttctccctcccttacccttcagtattgactgcgttccaagcatggtgttgggagctgcagataaattggtgaatggggaagacgtctttttctgtcttcacagcatcccagtctctggggaaggcaaatgagtaaacaggaaattatactatggtactaagccttctcttagagggcaaggggaacacttctggtgtggggttgggagaatctgggggattactaaggttgggtgtcttagatcatttgggctgctataaccaaaataccataaactaagtaggctataaataacagaaatttatttctcacagtcctggaggctggtaagtccaaggtcaaggcactggcagattcgttatctagtgagagtccatttcctagctcatggacaatgtcatctccttgtgtttctatatggtagaaggggcaaggcagctctctggtgcctcttttgtaaggcactaaccccactcatgagactctaccctcatgatttaatcacctcctaaaggtcccacctgttagtaccaccttggggttagattcaacacatacatctttggggaagacaaatattcagatcatagcattggggaaagggcaggacgctccagacctctttttcccttccttcctttctaccttggccttttcaagtccatcatttcttgatgttttttgaacttaactttaacatttgtcccagctaaaattatggcttcaataattactttttattattgaacataggatacaatttgtaatattttcctccaagactttgacttgcaaggagatttatcttaggttctaaatgcctcttttaaaggaataccaactagtgtttcattaagggaaaaagacatttctcttcgaaattcattgaagtagctctctgagccattcatatggtttatttcattctctagtttgagaacctggcctcactatgaaaaagtgtctaaataccctcgacaatgtattttctctttagtatgggcaggagctgaggaagtgtcttcaggaccaaaatgctatttattccgtgtttgacacgtacaaatcctctttgataaaatgtcattagggaggcatattgagctgtgtggcctcagttgataggtacttttcagcttttatcactgtctgtgtcagaaaattaagtgtaatctagggtgttttcattccttttattaattctagcgggtatattttatattagggaatttagtagaacattttgcctttgagaaacacacgtccctttccactctaacagcctcagccttctcagtctggagtgtctgtggctgaaaaagcctttttgcccatcctcgagtagcaagctctctgctcagggatggcagaaattgcagagactaattccttgttccattttgtagagagagtgtttcttctgtttgttgggatggtgaatatttgccagaagttttatggaaatgccattagaaaatctaggcttggttcttgggtgccttttcctgatttcacctgatgatcttcattctctgtgattcatgctccataattctcagttaactctggcatatcacccatggagttacattctgtgagcaaatggcccattagcatgtgtctgtgtgctgctctgggctgatataaatcttctgaaagaactttggactttgccactgctccagtctggtgtggaagggcattgagaggctgcctgcctgacactgccttgcctgtcacgcgggtgtagctttctcaattcccatcctgccgacttttgcaccaactcgcttattgaaaatgcttactcaaaaagaagcctatttggcattcatgactttatcatgttctttattattcaagacagaaaaaaatgggggcaaagacaagttcttatttatttgtatgtgcctacatttcttaaagatggaaatggtgttgagattgctaattttgggcacattctttcttgttcttaaagaatttctaagtaaatgctgaaaccttttcccagaaatctaattaggtaattagttctgattagttaactttaagcataagaagagaatgatggatatgtattgactccggacaaggggaaggagaccacagaagctggaggtctccttaggaacctggaaagagcacagagtttggcggagggtccttgggccaagagtggcagcttgggaacagtagcttttagaagggagcagctccagggtttggaagtatgaaaagaaaaaaaaaaaagtggtggtgggaaatgatcccaaagaaaatgatctaccagttagacttctcacctcctatccattttttatatcctctgatttaagttgctgaaacatagttttacctagaagaatattaaaggaaaataaaaagaaatctttaattctgttctcatcggaagttattgcttatcattatttatttgctgatactcttttcctaagctaacaccttaaaattaagtaattcaaatctgtgaaaatcctttatggaactgcgtaaggctgtgtcctttgcaggatgacatgtattaacacttatttattaggctctggggagttggttttcagattgaatgaagtagcgctttgtcttgtaggtgcacaaattactgaaaattgaggtttttcttccttcagtgtacattaccagcattataggcttttagagtattaaaggaatttaagttatctgccctaagtccttcaaaaaaaaaaaaaaaacctaatcagttcagagaaggaaaaggagaaagaaaacaaacactggtcccaactctgtgctaatagctttcagtaccttatctcatttaatcttagccctgacagatagctattatccccatttcacatgtggggtaactgatactcagagaggttgaggaccttgcccagggaaacacagcaagaggcagagataggttttgaatttaagcctttgtactgccaatgcccataccttttccactaccccacattaaagccactcagctccttagtgatgaagagaatggacctagctgccttaacttccctaaacagagatcttttccatagattatatgacgtactttggaaaaatctgaacatgtttgacaattgtaacagaaattggtatagatttccttttttttttttaatttttaaaagataaaaataattttccttgagtctgtaatttcaaaattaacccccaaccttccccattctttgtaaaagtttggttccttgcgtagatagaagctaattgagctttgagacacatcactaacttaattttaatctctggttgctcttctatatttacttcttttccattcagatgataattatgcaactgtggttaccctgattaatgttttacatatttccccaggcattcatggagattgactaaaatataagttaccattggcttcagaaaacttctgattggcatttagaaacatgtacaaaacataccccttggtaagcagtgttccaactaacaattttcctccttttaaggaaaggggaagaaaaaagaaacattttcaagggagatttttgttgcagtaaagggagactatggtttgaagctattatttttttccatttcagccttttactttgtatgggaaaaaatttaaaatggatgtattcaggtgtttttaacatgatgagctggaatggaatgcagaatcagctccttttccctcttcatctcaaaggaaaaatatcacatatctcaaattgccttgggtcacaacactatttattgaattattcaatagtttgaactggtagaattagaagattcattagactgaaggtcaaaagttaagttaaaaacatttcctcatagttatgatatgactcgcaatgttgacagattccagaaatgccatagaagctgagagatgcatagtcttaatgagctagaaacattctttcgcctggccatttagatccctgaccactcagaagtgccctgaattcaaatcatttaggtctgtgttcacaccagcaagcaagtatgtagtgggtcaggtagacactggttcctttcacaaagtatttagatgaaagtgaaaattatcctattgatttagttttattcttctagttttatctacatctcatgaaaaagtgaagctgggacatatactttgaacaagcagaacttttttgcttttcaactgatctttatgctatctgttggaagagccttgtagtttgaagttataatatggaaactgtattaagaggatttctcattagaagttatggcaaaagaaagggtaataataaaaccgtgcatgtctagagtgccaagctttcctgggcaatacaatatttacctaccttctttctaatttatttttatgtcatgagtacttagttttgagtatcaccatattcgaaatgggaggaaataattttcagaataaagtcccaagaactccattatcttgacagcaatgtagccactgtaccccacttccccttcccattcagcagcccatccagaaagttgagctttgagaagttttctattctacatcctctagggccaccccaaaattcattttcttgctgtctgttgaagctcacttctttttaaatgcgttaagttattagtgtggacacttcagaaataattgatggtgaggcatctgaggaatcagatgtctgcttactgttttggctgtggttcctgtcctctccattaaggctctctttccaggtgattgatgacatcttgttgatctgaactttaagatgctaagctgccagagagggtgatgtctctcagcagcgtttggtacatatgactacttccatcttcttaaaatactttatattctggacttcaattatattaccttgccctggttttcctcccacttcactggcctttctttctcagtctcctttattgatcctcctaccaccctctaaatattgagaatgtttcagagcttgaacttgggtctccttcctttttgtcaacattgttctctcccactagtgatatcatctagtctactggttttaaatatcatctactggggccaagtgcagtggctcacacctgtaatcccagcattttgggaggcagaggcgggtgtatcacctgaggtcaggagttcaagatcagtctggccaacatggtgaaacctcgtctctaataaaaatacaaaaaaaaaaaaattgctgggcatggtggcacatgcctgtaatcccagctactcaggaggctgagacaggagaatcacttgaacccaggaggcagaggttgcagtgagccgagatcgtgccattgctctacagcctgggggacaagagcaaaacttcacctcaataaataaataaataaataaatattatatattggctattcttaaatctatatatccaattggactcccacttagatatttgagaaatatcatatacatacatgtctaaacagaactaatgttattccactatacccctaaacccacttttaccccagtctttccaatctccataaatggcaccaccatccatccaatttcttaggacccaaagtgaggggtcatcatcaattcctctctttccctcattttttacatcaaatccattagcaaagcctgtctgtttgacttccaaaatatatcccaaagcaggccacttctcgtcatttttgttattataacccctgttcaagccatcaggatctctcccttgtgttcctgcagcagcctccaagccctgcctctagactcacactctacagtccattctgcatactgagccagagtattcatcaggctgcctcacttccttgtgccataacaccttccaggggcttcccatgaagaccagtgtgacatgtagactccttactttagcctcaagattccatgcctgcaactctggtttcatctctttccactgaatccctagtctctgggccacactggccttccctctggaccttaaccctccccaatatccctatgtgcttccttgtccttcatgtcttccctctgctgctttctgtcttcatttactcactcccctccaagcagccattcctgaccaccttagctaatgctgtccttcctctgccactcccccttaggatgatcatatctcatttatttcgttttcttcacagcatattttagtacttgaaatggactgtttatatgttgtattctctgtcttctactgcacaagcttaaggtccttaagggtaggaaatctgtctgtttcactgttatccctccagtgcccagaacagtgcttgcaacatagttgttgcaataaatactgattgactgagtgacatttaatattcttcatttgtctcttcccttctgtagctattttgatttatgttttaaagagagaggtaacaatttgctttgatatgctgggcttagtaaattgggtttgccccattcatctgaagaagctatgctgccagatcccatcaatcttttaaatgtgacttttctttttctgccttcttctacgtgctggaagtggatttactttatgttgcaaaactgttgtcccattttttaaccagtatgtgacaactcttggaataagtctatactgattcccttcacttctttcttagtttgggggtagtttgtgtgagactgtactcttttcattatatggccctataagaactgagaccaactctgtcaagcagtcgttgtcctccatctcccttctctgggattgcagaaggaaaaatccctagcttatgcatcaagaaactctctattattgatgttgtaaagttctgcacacatcagatggagaggtgatggaaggagcagcaaagctgctgtaaaatcttgaaggggaaattgaggagggggttaccagtgttcattttgccctgctccttgggagtcacacctgcatggaaagctccaagcagagtagaaatcaagcacataaggccgagtgggctatgccaatttctggttaaggattctctgttccagcataaactttgcattctcatgacagaattaaactactgtctgagttcctagtaaatgcatgacatattgtgaattactaagtagtggtcttgataggttagaggacaggatggtcagggagataaatgagacatggatcctattgctcaaggagcttctaatgaataatataatataacccacataaaagggagaatatgagttaggccagtagaaagaaacaagcaaaatgtgatggatatttaaaggggggaaatcacaagtaggttgaagggaggatgggagagaatgaagagggaaagctgcatgggagaggtgccgtttaaggagaacatggggtgtggggtgtgacaacctggggaaaatgtgccccaaatgactgaaatgttacggacagggatcctcaggccatccttacttctgttatgcaagactttgaataggcctgttaagggaagtattgccaaggaagcttgctagaccttttgcaaaattaagaactgttgagcaaaataaagtattcatctgcaaacctgctgtccagctgacagatggagctctggccaggagccttgcccggtgttgtgtctgtcaacagggaaactgggagaagcttactccaaggggcctggaggactatgttttttcataaacagatttttcctaatagcactttcaactaggttggccttgctgggcatcccccataccactacttacctcacatttttctataaatcaatcctctattttacttaaatgaatctcggcctattctaacaatagtatctgtgaaattatgagtctgatccaccagtttttatgttttcccaaattttacaccccctgccattatctcatgtattttataaaagtgatgccaaatctgtttctggggaacttgtatctctgcctttaaaatagcttcaacttttggggaaaagtaaaattacttctttaacatccttgtagcagtcctattaagtccttctgcctcatctccctcctccctcctatccctgcccctttctagattctgtaacattctgagcctgcagggattgtagaggacataataaaaaagatcttgggtattttaggatttgaagtgcaataaaaggaaattactgacacactgaattgccatttaatgggagatggtgatatcgatctggtaatgtttcctgcggtcctagttgtaataactgtataatatcatacactttatcaaaataatttagaagctggcaaatgaagttgttacagagcctctgagtaaaatggaatgaaagtcagagggtccagaagatggtgagggaagaagaatggaaagggctacaggactaaattagaggaagactataaagctctggtcagaatagatttctgaggattaagttaatgtctgcatggggctctaagtctcttggatcctgttattctacgaagatacaaaatgatgtccttatctcctcatttgctttaaccattcttcttctgagctgatgtaagttagcatgtacacttgcttgatttgtagaatatgattatgtttattagaatatttctgatataataaaccaactttatgatgggtttgtttatcagcaggttgcaagtttagtgcggggcttaacacattggtttttatagcgcataatgaaatgtctgctgttaccaaaaatttaatgaaaattatgatagtattcctcagcttccttattaaaaaattaagtcctaatatttctgaaactttcattattactttaatcagtttgtatcctcaatatcctttttgagccctaaggttcttgaattttcaaattttcttctgtgttctttcttcactgttttcttcacatgagtaatttagaacatgacaatagagaattggttgagcataattaagggagatttctctttttttgaacaaataaacccctacttactactgaaataatacatattgtaaaccttcttgatttggtcttcatttaaaaatttctagtaacttggagagtcactgatatttgattttgtatgaatgacaaaagggtgttttctaagaaattaaatagtataaatatgttttaaatggtagctttaaatttaaagacccaggttttttagcacttcagaagtattaattttcttgaccatttcaggtttcttttcaactcttgtcttctgtaaatacaatatgtcaattttaaagaattttcaagtaattaacctatatgggacctcttctagaaaacatcttggccgagagtgtacagatatttttaaacctttgaaaatattttacatttagttaaaagctttatatttttctatttctgtgttttctttactagtttagggacagagctatattatatttatcttaaatatcatcttaatagtctcattttaccttttttaaagtggaaaagaaaatagaacactgaactcttgaccttctctatgagtctgtgggcactttttcttatatgtttattttgctgtgctgtttacttctacagatgtttacataaagagcttttcacagattttggaaacttttaggttcctatgaaagcacggcaactttgtaaatggggatggttaagagacagttctaaaaggtggccctatttgcacacatacacagtagttacttcgatattttagctatgtttgtcaggtatttagtgcaacatgcaaaccatagcagcagtaacagggaacttctgttgtagtgtgtgccatgaacgccaaaccttgattctctagtcttcccaggtaccacactgaaagtaggagcctctccatccatctctttgtcacgggtgccataatcctaggccagaccctcatcttcttgtctcatgctggattagggatgcagccctctccaagacgtttatctctcttttctttctccctagcaatccttccatgttgccagagtaatttcccacttttagccacttacatttaacacctttaccatatgaaatccaaactcctgtgtctggatttctaatgctgcaataaatggcttcaaccttattcaaccttatttttttttctaaatgcgaacaggcctcttggctcatctttggttctactgattggcaaacataagaataagcatgcttattcttatttccatgacttgatttatgacacccctcccccagcttttctggaatctgtttccttactttctttcattttatccaacacctatctgcccttcaaagtccaccttgattgttaggttcatcatgttcaccatctcactactcctcttcacttcagaagaccacacttaagtctctaccagcaatgtaacatgtagctaccaattgattggtttacttttcaggagcacatgagttgtgtaaaataagaaatacctctaaatgttcatttggatgataatgattcttaaatgcaagacttatgtacatttatgcttgcttataaccttttatttttcataattccagttttctagcaactctcctaggttaagaaatgaagaagttggattaggtatctcatctttagaatgttttcaccattaagatttgaataaattttcagagtgcatagttgatcacgtttatgtgtgtgatacatataaaatatgtgtgtgatacatataaagtaacaatattttttaaaaagaatctcatatcttattaaatcaagtactgaatatgaaaaagaggccactttgttgacacatgacagaatactttttctgccaaattgtagttctttgtgcttgaatttgcatgggcaaacagtcccgaaccaaaatattttctttagcacaaactattttacaaaacaatggctaatacattaacccttttttatttgtattaatattgccaatcagcctagcagtataatgcatttttatcaaatgagtcacaaaattgtaaaatcacagaagttagagccaaaagtgacactgaaaattagttttaagcagaattttacatatttaggactgcgagtaagcattttatcttggtacatgaggtggaaagttgaaaatattcacttgcttcccccatcttcatgggaggagtatatttactcacgccaggatcttgaccttggcctgtgactttctttggcatctaagatggtggtgtctactacctgtcccttgacttctggtatggctgtgtgactccctttggccaatggaatgttagcattcgtgacactaggtttaaaaggtgtgttgtgctttgctattgccaggggaagaacttccccaggtagttgctgcatcttcggcctgggtgcctcaacgagtatgtatagagtagacatagcacaatctgtagtggggagtcaagctcagttagacctactgtttgaagcagagccactggcctacttagatcacagctgagttgggaatccaggagcatgagaatagaatgcttattggcatatgccgttgagtttggggtagtttgttatgtggcattactgtggcaatagctaactggtataacctcgtaggacaatcttatttttaataacataatttccatttctagtactaactttcttaactaacccatttacgttcctttctggctccaagacacactgttcccactctaaaacaatctgactgatgcctgtgactcactgattgcttgcagctgtagcttattttttagtgggcccacatacttttgcacctagcagttgctaggtgtttacaagaatcaatttttgttgttttcaaacttgctgataccagttgtacttatatattttaattaaatattatgtaaattaatgaaatgtgcctgtgtaaaggttgcttctgggaaaccaagttaaatgccaggaaaaaactagtttccagaaagtttctgccaagatataacatctagaaggttgttttttaagtattcctaagttattgctttatttttagagaatgcctaaatggaaatcacagacaattaactctatctgctgtttcatgcaagacagagcagatcattactggatatatacccaaggaaaaataaactgatctatcaaaaagaaacaagcactcagatgtttattgcagcacgattcacaacagcaagacatggaatcaacctagatgcacatcagcggtggattgaataaaggaaatgtgcatacacaccttggaaaactacacagttataaaaaagaatgaaatcatgtcctttgcagaaacatagatgcagctggaggccgttgtcctaagtgagataacacaggagtaaaaaaccaaatacggcatgttcccacttgtaagtggtagcattgggcatacatgggcgtaaagatggcaacaatagacactgggaatactagagtggagagagagagaggagggcaagggttgaaaagctacctgttgcttactatgcatagcacctgagtgacggggtcacttgtactccaaactcagaatcacaccatatacatttgtaacaaacctgtacatgtaacccctgattctaaaaagtcaatcttttttttttttaaaaaaaaaggtaaacttgggcaacatggcaaaaccccacctttactaaaaacaacaaaaaaattagctgggcctggtggcacaagcccgtattcccagctcctcaggaggctgactgatgggagaatcacctgagcctgggaagtcaaggtgagctgtaattgcaccactgcactccagcctggcttatagagtcagaccctgtgtcaaaaaatagaacactaaaattctaacccacagaaattcctgaggggaggaggagtggctgggtaagagggcttgacctttctgaagcgattggtgaatgagcttatagttatgtattttatgttaaagttacatgtttaaggtatgcattaatcctttaataaacttttatgagtaattaatcaactattagggagtggctttgttagggatatctcattagggtttgctccctatagaatggtgttgagacaatcataaagaatcttgactttggtgcaaacattttctcatttttatgcttcgccatggtagttatttttataggtaggcctgtgtttggatgttctatacctttgagttttgctgggcctctttgggtttcctaagtgcaatttttggattgtattttttggtggttaaatctagaaatctccctatgtaatatatagtgatggaagttgcattgtgtagacaactatttaaatatgtattctttatgaagtatatatttttatgaagtttatgtgtctacatatatatatacacacacgtaattttcctatataagaaaattataagaacctgtcaaaataaatagaagaataaaaacaagttgtgagtcaattctttagttctttagttttgaatcctatttgcacatagttaatttggaacatgcagcaattcatcttaggtttcctgtcattagtagcgattagtaaaggtatggagctagagggagggatatttctctggagaccagcccatctcaggagacagtgtacctggagtaggatatggtccatgcctgttgatcaagtgtgtgctgttcactctgagtttacagcatgagtggcttctcctcctctggtggtgggtgctgttggattctaaggacaggaatgccaagagaagatgaggaaatgaaaacagtaactcttaaataggaaatggccataccaagtgggtgaaatcccagcatgagtaatgtaaatgtgggtccaaggaaaagaaatattattttaaattacattactaaaccttttatctaagactttataagccctgtgtgctgtgcatactataatgaccttaggatatgcagttttatttaaatatccatcagggctcagctgcttctgtccatggagtgatcaaccccagtgtgtggctcagcctctctcttcactgactgctgctgcagctgttatgccacccctgcctcttatgtgggaagttacaggggttctttactgtctttggaatcaatcaccaaatcttgtagattcaagcagcttaatatcgtttgtatgtatcccttttctgaataattattataattatttaatttattgaacacatgttatgtatcattcatttacttttctaagtgcttcacatgtattaactcaattatcttcacacatgtgtgagtgcatgtgcacacacacacccaccaaaaaaagaggtactttgttcatcgatacataatattttacatatttatgggggcatgggatattttgttgcatgcatacaatgtgtagtgatcaagtcagggtatttgggacattcatcaccttgagtctttatcatttctatgtgttgagaacatctcaagttctttcttccggctactttgaaatatgcaatatgttgctgctaacaagtcaccctactctactacagaacattagaacttacaccttctgactgtatatttgtacccattgaccaacctcacaaaaaggaggtactttttaaaatccccactaaaaggataagataactgaggttcagaatattgctccaagtctcatgctaggttagtagtggaataaggatttgaagccagtcagccttaagccatgatctcagtcaccttgctctattgaatcattattaattgacttaagtttctcaagcaaatgtgttttctagtaaaaataaagtttttcaactaatcttttcctacaaatctagtataaaatcataggtatccatagattacaacaacaacaaaaaagactatattgttgaactagtgctaaagtgtccttccaaggaagagggaacattagtgacttgctcaagaacgatcgaagacatgagctgaggtactttgactctctgactagcttttccattttatcatacagatttaatatgacaaaagcctgttcttatagcagctatgaacattgggtataggaaagaaaatgatttgagaggcctggatgtaggggtttggaaaaagtttttaaaaaatgctcagaagattttggaattaattgaaaaggtgtactttgaaactggaaattgacatttaagaaatacagcagtaagtaattaatgggaatgaaaatgttgaaaacacatatgtattcctttttgtgcattactgctgtcctgcttaaggtaattttttctttgctcctggatcattgcagtagccctcaaaaatatcttttctgccagctgcagctatctgtcattgctgcaagcattacctttctaaatcacaaacaggatcatgaacctcttaaaatatttcagaggtcctcataactaactctgtgatcagttagatctctataattcagctcccaaggctgttcatgctttattgtctgcccatttctccagcttcgtctttattaggccactccctcacccagcacacatataccatttgatctagccttaccaaatgacttgaatttcctgaaacttatcatgctgtttcatgagagaccttcgtacatacaatttcttatgtcaaccctgttcttccatttcctagtatgttatttttatttgttcttcaaaactcaagccaacttcttaaaatctaggttctctttgacttaataattccacctctaagaatctgttttagtgaaatatatatttattgcaaatatgtttattgctactacttataatagcaaaaaatactgtatttgaagcaattaaatatgcagtaagggattgatttaataactactgtgcaatattacatagctattagctttgtattgtcaaaaattttttgataagataaaacctataatattaaatgacaagagtatgaaacacaaacacatgtatatgtctttccatttgtacattactctctgtatgttaagtggggagtggaagagagattgcaaaagctcactggaaggaaatatcttcaaattaatagaagctctttagatgataggattataggtgatttttatatctttatatttataatttattttattttgcaagtttctacaagtatagatgtattttgtaatcaagaaaagaacaatttaattacacacatgcaaatgagttcaaggatctggctacctggaaagccttccgcacactcccttgctgatcaggatgcctctcttctgcatttccgcagggcctgtgcttaactccagttgtgcacctgtggcactgaatgccaatcactgactcattcatctctccctggtcctaaactatgatattcttaagggcaggcatgagtcttaagtgacttttcctcagagcctagcatagtaactgccagatggtgagtgctcaatcaaaggtattgaatcaataaatgagaaacaaaggcttctctggatttagtcagccaccctaatcgctcactggtccactgcatgagaacattagacctggatttcagtggaacctgggagaaatgattgtatgtttggattactccttttcctagtagcttaaactagagttctcatattcaaggatcctactcttcaaatctccatccccaccatctgacttgtgcaaacattatcccttcttttttttttgagacacagtctctctctctcgcccagactagagtgcagtggtgtgatctttgctaactgcagcctccacctcctgggttccagcgattctcctgcctcagtctcctggggagctaggattacaggcacacaccaccatgcccgactaatttttgtatgtttagtagagatggggtttcaccatgtttgccaggctggccttaaactcctgacttcaggtgatctgcctgcctcagcctcccaaagacattgtcccttctttaaggtctgtttcaaatgcctgaagctccttgaggaccttcctgatgtccctagtctgatctgaagattttaaatcactttatcaggacttattgtcacctgccttgtattagccatttttttctgcatcttattcccttatgagactttaaggatttaataatttcacagtgtattcatacatgaaagcatgatgttggccaggcgcagtgtctcatgcctataatctcagcactttgggaggccgaggcggatggatcacctgaggtcaggcgttcgagaccagcctggccaacatggtgaaaactcatctctactaaaaagtacaaaatcagctgggtgtggtggagcatgcctgtaatcccagctactcgggaggctgaggcaggagaatcacttgaacctggaggcagaagttgcagtgagccaagatcacaccattgcataaagagtgaaactctatctcaaaaaatacaaaaaaaaaaaggatgttgtaaatcacacatatatgtaatttatgtcaattaaaattgtttttaaatgctttaaggatcctaagtgtacgaaacatcttgttttgattttagtacttgacaatgcctaatagtattttggtacatagcttatgctctgtaaacgattgtttacttatatcaccaattctgatttatgcatttttttcacttgggccttccctgaccaggcaattgaaaattgaaaattttctttgcccttgaacaaagaaaatctgtgatcctgtttttattttattttgctctatagtaatcatcaccaacagatatactaaattgttcacttatttacttatctataaccttaaacagatagtagagatgattatctcttttgcctgtggctgtatccccaaagcctatgactgtgtccagcacttagtaggtgttctgtgctctgtctacagcccagcccgattgtcttaatccttggaaaaatcttcctccataatcctggtgttatccttccagaaaaggtcatactactaaccattttatttccactaaaacaaaataaaatctgagacttattagtcagtgacaagttttgcccatgagtgaagaggcattcaggttttttacttgacgtgtaggttggaacattataaagttcatcagtcaaagtttttgacaccaaaccaccaccttaagaattaagctttaaatcattttccaacacatcctgggtgctgtgacagttaggtaatcctggttctatcggtacactggctctgtaacacctcctagattctctgctcattagttttcatggtttgggtttcagagacttttgagctagcagctcagtgaatgcccaaagagttgaatccagtttctttggcagcttttacagttaatgatgacctgttcacttgaatggcttctagtttcaccttcaattcaggaacaactaaaagctaagtgatgtacttgtcttaccccttctcagtgagactggaatagcatgtcttcatgttttctggaagcatttgttaaagtggcccgtgcataaagtgagatccacagggtgaatttgatatgtcattcattcaagcatgcattgattattttattttacagtttattgtgttagtgcaccttgagatgccgcaccagacattgacctacccttcaaacaccttaaattttagaaggggtgataagtccctcttcctgacccacccaaggaggtgatattgtatcttttgtgtcttgggacacaaaagaattctgggaactttattaaatctcttatctttttgtattgcatttctatatttatgtgtttctgcaagtttcctgagggcttggagcaaattatattcatttatttctacatcctcagaaccaagcacagcataggataagcctcaataaatgtagggtgaatagaaaagaaagctaggtgcagaataaagtgcacctttattcagatgaaggtggtataggaggagacatttgagctgacttgatggttggacacatagaaaagggagggaaaacattatggcaatggatgcagcatgtcagaggtaggaaagtgtaaaagggtaacgcctccgagaactacagggagtgtttccgtttgggtagagggtggggttcacaatgggagaaaagtaaattatgtcagtaaaaggcttgggatctgatatgagtattgcaaaggaggcagtgaatacctaatgccattactactcactagtttttgttccaactcttaggactccatctattagattttaaggttaaagaaaagataaaggggtcagaaggagaatattatgttataagagtcctggagcacaggactaagcaggattagggtgggaagatagtcagggctcttgaaatgggcccctcccaccctcaggttcttgcatgttgaattcatttgtcaaccttaggacacactgcgtttgaaaaccctgtgttggattttttagatgaactttgcagaggttgagtactaagaagactttgtcgctcttgaccctagctgtttgcacatgcttccaacagagtacctcacatagtgcccggggaatgctggcaggtcagcttctctacaggatggccagactgtcgcatgcttctttgtttcccagagccaagtacagtgctggcatgtggaagatcctctataaatatcttctgggtgaaattgcattgctgaaatatagccaaagatactattacctcagggacatcagaaacaggagttttcgtctagattgaagttagatgctcatagctcatgggtgatagaattttctattaggaaaatgacattataggtattatttttctggttccttccctcagtgggaatgagaggtgagtggaaacacaggagggcagtgaatgtcattaaatcagtgaatatatctagaatatgaattagggagtgttcagagaagttgaggctgcatgctgaagacagaagactgatgtcttccatttttaatagggaggaatgagagtgcagagtgtaagagtgctctgcagactctgcttatgtgttgcatgtgcacagctaagattacaacttctaaaaacggtttatttttctagttagacatacaattgcatgtacatctgatttttggtaaggacaagctattacttattgatgtattattattaatattgttattattttgctaaatggttagtcgttctattgtggaaaaaagcgaatacgctgtgcaagcttttatgtgtaggaatgggaaagaggatactgggagaagtaatgcacatttcagatggttaagtgctgaacatgttctattgaggggagtatcccattcttacaacactattgtagctcatttgaggggcaacacaagtggctattgatcatctgtgtgatattttgggaaagacacttaggtctctgtttctatgaaataatcttaaccaacttctaatgtattccctttatgcttaggaaaaaacagttatcttggcagaagaatcatctgtctggttcccttgcgcatgtcctgttttgtctcataagaagaggcatttgtatattttaaatttggtgccaaaattaagaagaagtatctgtagtccttatgtatctgtctatatgtgttgaattaaggtagcagagggtagaaatggcaatgtggcttatttggaggattgtatattttgttttctagaatgttccaccttgtttcctacttctcctccaggacgtggggtgtggccagaaggatggcaggcagtgggcacacagcttggcaacaatcttgagtgccactgcttgtgcttttccccgagatgagagtgtcggtaaaaactgctgcttaaaacagcgtgactccctctctctccctggagactgactgccttccgttttctgttgacctgaagctttagatcagaagacagttcctaatgcgaaactctccccagttttggcagtggggatacacattgccggtgatgctttgtcattctggcagttgatttattgcagaggttcagtatgcagtgtctgtggattggaaaaattcagggttcaagtcttttctatcgacctctaggcaatcactgccagtgataggatcagtccagggtttttgattattccaaatttcatgttgcagaagcctggataatcgagcagtgcgtaatgggatgtgaatgccgaagtcctggaaatagctttgagaaccttcttatatgcacggagggaatgactccaacttatcccgtttgttcattcagttctctatgtaatctgcacatggtaactgagtggactggatggtgttattcaaatatagtatgtgcttttggtgtagttgttttcctgaaggaccatgcttgagttagcagtagtctctgataactagttcacttagaaaagcttcacatttctcttgttttaataatacataacacatttaagccacagttaagagcattttaccataggatagcatagaagaaaactatagctgttgccagccatcttttggttatacactaagagctcatttgccttttgctattaacgcttgtggcatctgttagagaaaagcgactcctggtagtttagactgcattaggtgtgtagcctgaagtattcaatgcatcaaactgacttcaagttgactcattactccctcttgaacaaaagacagtatgtgtggaattctgattacagcttagatcttcagctttaagaagttgccctttgagcttgctctgtaaatagtgattaggtgcaaaccttggattttggtccttcaccacccagaatggtgcctgggtactgaagaaaagagcttttcccattgcagaagcactttaaacagtagattctttagcagggaaactaaaataggtttcctgttcttcaaatgggtattttaagtgctttgcaggtgtatcttagagaacggaggtatttatttttaatgagaagaactgaagaataaaaacaatcacagccttggagaattgcagatcaaagcttttttttataaaacaaatgaaggcctccatcctacgagctagtaaattcattaatttttaatagaggaataggctataaatggtaatttaattcttttggcagaagatcgtttaagtggtgtttaaaaatctacatacttaggtggtttggagtgaaaacctgctgtgatatctaaggcagtaaatgtgcagtgcagctgaaaaacttgttcagaagcactatgggtcctttataactgctctgtttctacctaatatacagtataatattttgtactacagccatgtttagttactttagagctgggtttcccatcttgctgtttgggtcagaaatgctactgtcaagaagtagagttgcaggcagcaataattagaaaatcccaagcctttcaaatctatttcatgtttctcctaattggtcaggatctcccctcaccattccaaatacttgtgctcccctcttaagttatccctgtggtttctttcttttgctcttcaaatagcagctgtaacatttaccgaagaagccaagttcagctctccaaatgatggctagttccatgagagagccagtctgcttggaagtgccagaggttcccaggtagcagctcttctagaattgtgctgctgtgaaatgatcacattggaatggtcatagaactcagggaagccacatttgttaaagtggcctaagtttggagccgttttgcaggcacagaaaaactgcagagcaaatgagttgtctatgatataggtgtgtgtatggaggcacgtctttgtaaaatggaagttgttgctgggctgagaagtacctttgggaaataagataaattgtgcagttgaaaaaggttaaggcgtgttcatcaataaatgattggataaaaaaacatgatatgtacgtacaatagaatactattcagcctgtaaaacaaaggagattctgcaatatatgacaacatggatgaacctggaggacattatgcaaagtaaaataagaaagtcacaaaaaaacaaatctaaagtagccaaatttatacaatcagtgacatgatggttggcagggtctcaagggcagggagagtttgagagttactaatcaaaggacataaagttttagttgagcaagatgagtaaattctaaagatctgctctacagcattgcaccagtagtcaaccatagcaggtcatctgggtctatcctctgttttagagatgaggaaactggctcaagggatatctcttgagccttaaaccagtcagtacctgagtccccttgttgcatctcctgtcgtttaactctatatgctggcttatttatgcctttcctcatcttaaatcctctcctggaatacggcagtgtgtaaataaatggatgaatgtatgccttctgcattttaactgctaattcttatcaatctgtttatctgtattataaactgacatgtgtttgcctatcttgcttgccttccctcccctactcctaaatttagagttgtatgaagacaaggattttgtttaaactaaaataaacctatggtatctaaaattctgtcatgtgtcagtgagtattcaaaaaacattgctaaaaaggagtatcataaatgaaacatttgcattttttagtcttctaggctggctggaccacacttggttggttctttggtgatggacagttaaacctgatccggaaaaaagaaaggtttcccatttcattgccttcccttctattccttgtgaatgtgctgacaacaccacctcagaactgctggagcctaaacaataatctcccctgagcttcaggccctgcttgcgggactcaccattggctgggggtcagaggactaggttaggccttaatgcacagacttgcagggctgtgaaaagaatcataaatatcccttttttggctcatctatgagcaggtgttctgtaagttatctgtttggtggttttagtcacacatgttggctggcagtttagaaatttagtttttgaagggttaatctcttgggtcggatgattccaattcatgtccacattaaggtgaacagttttccttctctctaacctatattttagtacacttatgctccagagcctaatatattcagtgatttttctcagcatcctgaataggatctttaaagggcatctaaaatgtcacatgtccaagatggatgtccagttctttaccccacacatttgctacttctgccatcttacttgtctcatctcaataaatggtagctccaacctcccagcttggagtctccatgatagatacacacacacacacacacacacacacacacacatatatgtgtgcacattttacatatatatgtgtaatcttttattcaatttgtcagcaaatcctgttggccgtatcttcagaatatttccagaatctgaccacttttcattgttactaccttggtccaagtcaagaagacagggtaaaaatgttatagatcacatctttaatgtttgggatggtatctaatccctaaccctcagctttggggcccattatctgtctgtaggattattgcagtagcctctttactggtctctttgcttctgcccttctttgctgtcatctgtttgcaacacatcagctcagtaatgttgaatattggtcagatcctatcccttctctgctcaaaacactaagggtttcctgtctaactgagagtaaactttgcaaagactctacagaatctgaccctttgtttttctgactttattttttaccattctctactcactgagttttgacacactgtcccctcttgttccttgagtatacaaggcctgctcccacctgatggcctttgctttggccgtatcttcagcctgctgtgctcttccccatcatctgcatggctcactcccttaccttcttgtctttattcaaatgtccctttctcaatggggccttatctgaataccctattgcctgcctatccctctttcctgccttctttctctctatagtcctttgcatcatttgactttatatattacggttattttctttcttttcagtctccctcctctagaatatagccccttgggggcaaagattattgtcagctttttgtctgagcctgtatcactagctccttaatggtgcctgtcccataataagccatcaggatattgaataaatgaatgaatgctttccagcacaatctgctttttcatggccaaaaggttctgttttctgtggcattaacatttaataagagaggccaggcgtagtggctcatgcctgtaatcccaaaactttgggaggctgaggcaggtggatcaccagcggttaggagatcgagaccaccctttccaacatggcgaaaccccatttccacacacacacaaaaatacaaaaattagccggtcttggtggtgggcacctataatctaagctactcaggagattgaggcaggagaatcgcttgaacctgggaggcagaggtttcagtgaggcgagatcatgccactacactccagcctgggcgacagagtgagactccatctcaaaaaaaaaataataaataaataaaaatatattttaaaagaggtattctgagaacactagcagaaggagtagattgagtttatgtggctttctttagctgcacaccagccacttgtagcaccaagttacttctctaactaattggagaatttccacataattagactggtgatattttaaatactaatttgaaaggcttgagtttgcaaatacatatgagaagctagaagccccttagctgtcctcttaaggtgtcaaccatagcaaaaatatctaacactcattaagctcttactctgctaaatgctttttattctacacacacacacacacacacacacacacacacacacacacacatgcacacgcgcagaagtaggtgggtattttctccatttttcaattgaggactctgaggttgaaagagcttatgtaacttgtccagtacaaagatgtgtaggcggcagagtcaaggtgctgacctgaggtatctcaagcactctatcctgttggaggggttgatgctttaaacatgttaacgaaagggatctttctctccttcttccttcggtgggagcttgacacttgtactcatgaaatcaagcccagcaaggagtgtagagagaagacagggtaagaatgttatagatcacatttttaatgtttgggatggtatctaattcataaccctcagctttggagcccagctctgtgcttcaggatgtagaggggaggaacactagctagttagaaactcagttggaaagaggagcccagagtctctgtctttgccttacagatatatagtgtgtgcctccttcctctggacgaagagagttggtctaaatacacattgtattctggtggccaaaagttatttctgctttcctaggcctgagccacagataaaattccaatctactctgatcaccaaaatcagaagatttcagagctagactggattttggagatttgcaaaacttttctcaccattggtgctccagccattcagaaaagcatgcaaattctccaacacatgattttctttattgccctggatctttgtgtgttctgcttcctgtcctgttaaaacttgccttccatgttcctctggccaactccttgtactttgggattcagcctagaagagagaacacagttaaaaatattcaattatttttttcaaggaaaaaatatcacttttagcaatatcatggtttttttagtgcttgcagtttagtcccccaaacaaaatatttatttgtgtaagtaacagtatatgtggatgctagcatatgaaagtttggcctgtccttcaacctcttttatctaaaaaaatggcaaaattgaaccacggatgtgaaatccaaacaagtgtatttattaatggatattggttgcctgtaatcaaggcacagcattttggttaatcctagtcttagattaatgataaacagaataataatttttaaaatatgctaagtgtatatctttagcataagtatgtgactacattaagtatgggcttatcattattagccttagtgaaagaaggcattaagttattttttaatgaatccagatgtccagaactgtatttttcctcaaattttaatgtacctccagagtagtttcaaagctagagttgttgaacatgaccatggggatgggaagtgaggtgagacagctgcttttgtttgtgaggaaacttaatttgtgtgacacttgccttctgtcttccagaaaattagcatgtgtagttttaaaacacagaatgaggatgctacagtgtttattaagcaaatccggtttatgtccctgcatatttttgtgatagtgtataaaaatttgaggttatactgcatatagcaaattctccccacctggaatgacacttctatttaaaagaggcatttaggtgtaaggttcagtaggcagaaagaggattgacatttattgagaatcatctgtgtgtctggcagtgggctagaagcatgcattgtgcaaatgctgcatttcccactggactctgatatcacaggtattttaagaagggtagagtgatgaggatgggacatcccaaacacttctgaataaaataagctctcagttggatttgctggttctcgcttgtagtcactgctattcaggaggtcaagtcagaaggattgcttgagcctaggagttggagggtgtagtggacaatgattgcacttgtgaatagccacagcctggacaacatggcgagactctgcaaaggaaggaaggaaggaaggaaggaaggaaggaaggaaagaaggaaggaaggaaggaaaggaaggaaggctggctctcaatgacctgaagtgatagaggacaacaacaatgtgggaaccttagcacgtaacctccctgagcctttttggtttcctataagagggtgggagctagaaggcagaaatgaaggggaggccatggaggggggatgagctttctttttactccaagtgctactttcttaccttctgctgggggtaggggctttcacttgtgagattaccaggcagatcatcagtcttttcttctttttcaacagttaaatttttcttttccttagtataaaagtaattcaattatttgctgaacatttagagtgtatgtcgatataaagaagaaaattataatcatactcatgatcacgtgaccctgatatataaccagttttcaatttgaagcagaacctcagattatatatatatatatatatatatatatatatatatatatataaaatatattccttccaatttcaatatacagtgcatattcttttatttaatatattagtgatcagttttcctaattgagcaattagacaatgatggtcacatgggtagagatgggtctcaagaaaaggatcaggaggtcttctagccctcatagctacaggagacccatggtcagagcacatagaaaaggactgcaggtatgttgatagtaataatacatcacagctttgctttcataaggatcttttattactcaaaggtactcagacccttacactgccactaggagtagagaaaggaagttttatgttacccagatttgagaagaggaaaggcagtattgggctaaagccacttgcgtgcaagtacacaattggatagagattcagatttccaatggggcagcttttccacattattaaatctgtcagtttcctgccatcttagtcatcttgggctgccataacaaaatatcacagactgggtgaactaaacaatggatatattttctcacagttctggaggctgggaaaatcccaaatcaaggtttgggcctatttggtttctgatgagggctctcttcctggcctgtagacaattgccttcttgctttgccctcaaatggcttttccttggtgcatgcatgcagaaagaaagaaataattctctggtgtgtttcttaaaaggacactaatcctattcaatcaaggccccacccttataaccccatttaaccttaattacttccataaagacctcatctccaaatatagccacgctgaggattagggcttcggcatatgaatttgggggtggaagggacacacacattcagtccataccacttgtccaacaaacactgctaggtgctgacttttgttgtactgctaaggagcctaagctacagagatgagccattgccaagtcatactatagtggagataagtgtggacctatgtaggacaagctagagaaggtatccattgggaagtgatttgtgagccttgagagacaagtataggtgtcatgcagaaaagaggacagccatcaagagttcattctatgttgttgtctattgctaacacaaagaaaaagacagaacctgattttgccttttttttttcttattttgttctattgaatatcatcatgctggattatatgagccttttgtaaaccatggagatccttcactccatccctctttttctttggaaaggtggaaaatgaataaataaaatgaaatgtagaacctggagccaggtatttgtcagaatgttaattccaggcatgcattcctctctgtttctctttcaagtcttgtgtttttaaagacatcattgaaagatttagtagtgcttgtgtaatctctgtcaatccctactgatgtatcctagtgcagtttgcttactttattcactggccattggcatggtttttcctttaaaggtctttctgatcaccctatcatgagcaaacctgaaatcttaatttgactgctaagaaaaggacatcagaaagctggaggttttctgtaaaatgcatttctcctgtcatcatctcatttactcattcagctcacatctactgagcatttactacttgccataaactcttctaggtggaactattgggtacaagacagaataagataattctttaccctggaatgcatgtaggttcatgcagggatgaaaaatgtcgttcaattcagccatagacttggttcacagagcctgccaagagcacttatggaagaggtttctaagactgcatttaaagtgacttggccaggaggccgtgttggattattgggagtcaccatggactttggacagggagttgaggaaaaggaagtagtgacttgcaaattgcatatttgctatcccgagctgtgccgtgtctgaatacaattctttcactgaattatggatgcagggtcaaaaatgcattatcttcagtgggataaaaaatcagcctcccacaatgatcagttatcttgtatttaaattttgttagaaatacattttagtcttctagaaatttttttctccgtggcttttcctctcttttctcccaagactttaagttacagttgggaaattgttctcttcttaagggaatgattcatcgtcggcaggcatttattaatgtttttcagcaaaagcctgggatgaagccagctgctttgctgactatggaaagaaggggcctcaaacccttgactttttcttttacacaacaatgttcattcttggatgcacaatagaatcaccttagatgctttttaaaagcccaggactcaccctaaactatagaacttccaggatgggacccagacatcagatttcaatgtataaccttggagaaccagtgtctgaccagggcacatgcagccgccaccaggttttggtcacttggatggctggtctggcagctgttctggtaattgtggagatagaagctaagactagaggaaggaggccaccttacaggtttcccctggctcaatggtgtttactctgggcaaactcaaggtatacagttatggttgagatattctggtccaactctggacccacagtctttatgcttcccccgggggttaaaaatctcagaattccacttctaattcctacatggtctttgggaagcagtacacagttgtagctaagagtgtgtggttaagaccacaggctttggagttggaaaatactgaagtcaaatcctgatcaaatgtgtggccttaagcaagtaacataacagtatcatgactcagcttccatctctgggaagtggtggaataatacatgcatttaaggattgtttaagggctaaatgagacaatgtacacaaagaggaaacacttcattatactaggtataaagggagggctccagaaacgttggctgccatggtagctgccagtgtgagaatcaaccataggtatggggccactgctggtcatccatctgctgacctaggagtaggaagcaagttcaggaagctgctggtggccacgtgcatgtcaagttcaacttgttatggcctgtctgtttcatgggtttttgacaatcagtggaataaatggatgaaatatttaatagatgtctcaaagcactgtgaaaaggctcagcgcgaaatggagctgatctcagtggttagcctgccttttctatctcatccatgacctccctgtttgcggatggtgcctgaagtgatagccattgcgcatgctgccttaaatcatggcagtccctttgctctagcattccccaggctcagaacctagacaagagtactgactttcttcctggacttgaatgtaccttctgtgccatttaaacaacatagtgatccagaacagtgagtattaagtgatctctagatttcattttattaattaaagcctctgtatgcatccaattacctttcaaataagcagcaaaattagagcttgacttttagttatcttgcttctaccttacactctagtaacaagcaaagcaatatgtaagagaaggggaaggaacaactgaagaattagatggttcacagccctggaatattgtagttgactgtcaggtttagttcatcattggtagtccttctctttcatgaagccctccttaaattcctgttctcctccagtcagcttcaagatcttgtttcctctgaattttcatagtgtttcattgactttttggtgccaatttttcttttattaaaattgtttatgcaaatattttacaagctccttatggggaaggccttgtattagttagttttatatcacccctagtatctaacactgagccttgtacctagtaagtaaacatttgtcaactaaatggttacatactttgtaacagtcacaagaaagaaatccatacaataaagactcattattattctgaccatcaaatgacaactgtcatttatttttcaggtatttattggtaacacggatattatgatctttcagactccttttaagaatattttgatgccttaatccattctccagacaaaactcatgaccaagagcagtaaagagcttccaccattaattttcccctccaaatctatgacaattttctaagcctgcatttgcaaacatattgtttctgtgttgcacggtttccaagtgagcgtagttatcatttagaattctcccacctgcttccagatgtcaaaggagtgggggattgctcctgagagctcatcaattctgcttcagtggactctgtgaggatgcagaatggataagtttgcctgtaaattctcttttgaaatcttaaattgtccacaatctgtggcaactcttgttttatttgaatattttgggaaagtgggatggcagtaatttgaaagagaaattctgtccagcattagctggacataataaaccagcattggcctgtctggtggtaagctctttttggaagaataagcttgtttctgtgagcacaacaaggaaatgcgggtggtgaggacatccaggataagacaagtggtgattgacagcccagctgctggagatgggtaattggaaattcatggcacataaatctcccagtacttatcttgaagcacaggaagagaggagatctgagcaggggaacatttagctctttcaaagggatctaataaggtagcaaatctttaagttcttcattttaactttaattaaattatggttttctgtcttggagagataaatgcatgctgcttaaggaatgactctgtgcatagaaaatggaaatgtgcaggactattggaggagttctttgtttacacagaatatgcaatcctttcccatgggtcccattcctttggagagcaattgtttctttctcttgatgggtttctggtttccctatgtacagtcacatctcctttatgtgtcttagctttctagtttccaaactaatatttaaaaaaagaagtgttattagatcattatgaagtaacaataatagcagcataaaggaagagatgttcttcctatttgttgaagtctcatgctttctgtgctggtttgggtctttggttcagcatctctgagtggaacgtcacctttcattgtcttcttcatgataacccatcatattagtaaagatggtcgttaatcaacttccaattttttttcctccaggccaggcaacctgttcagcctaaataactaagagttttcaatctcaacaaagttgagtattttgaacttgtcagcatatgagtgagattaggactctcactaaacctgacagatggagctccctggctcctttctgtaagttggatggatctgctgaaggaatggttcttttttttcagcccagcttccactgcctctgcctcattgctgttgaagttcagaacacttatctaatctgagtgccctgtgtgtgtgcaaagatctctttttctggttggcaaaacatttcatctgttgcaatgccagagttcctgctggtgagtggagctacacagaagaggggtagctttctgtggctttggagcttccataagcatcatgcctaacatctggctgaggtctggaaaggaagaagagattgtaggggtacaccaaagtccagagacagaaggaaaagtacttataatggtggggtacaagatggattaatcaaactgagcaaatgcattgagctttggaagtgctgagcacttgtattaggcatcctggaagtacccaagaaagacaagatttgcttcctgatgacctggagtcaggaaattcacattatcatctgagctcttccaagagccaatctagttacctgggttggactagatcttaaaggtaagatgaaagagttagtctagataataggtgcagtaaagacaaagatgacatagactttcttgccctttccaaaggccattaaggctgctttatgcttctaatgtgtgcagtatgtgttttctcactccatgctccttgctgtgcacagaggaggaagacaataaatacatatgaattgactgatccgatgtcgagcaaggtaacaacagaggggtgggtcacagagaatgggtgaagacttatatttgacaatcacagcaggaaacctttagtagaagtgattatcaagcttttacaactatgtctcatatcttaaaaagcactgtaattaatatatgtctcttcagtgaaggaaacaaaaagccatatcttcatttaaacaacatcagtagcagctgtcagtactaccaatataggttttgcaaaagaagcttccgggttcactagtaggttaagttcacttttgtcatcctgaagatttgttatgaattgtaaagccttccatggcccccatagctccagaaagaaatctatctcttcagcagggcacattctgactttcacaaactgacattaacctttctttttcctcctcatctcatacattcaacagacattattaactaaatctctgtgccaggtattgatgctagatgctcatgattcaaaatgagtaagtctcctgttgtcaaagagtgtgcatcctaacaattgggggaatcatgaaaccaattaacacaattaagtgcatatgtgttacaagaggaatttcaacagggtacaaatgtaggccatagacatgtcatgcacttacatgtcattattcgttggctcattatatttcctgtgctcaagattttgtttttgccaggtcttacagcaaagcacagcccttcaatcaaattcatgctctgaggtcactttcatgggctgtttccatttatgttcctgtgagagtttgggtgtgcatttatcatgttactgtgtctgtgttttctgctagaccatgagaacttcaaaggctggggctttgtcttacacacttttgtaacaagtaggtgctcactgaaactttacaggaaggcagataggctgttatgtcagactgcaattactgtttcctctgtctggaatactttttcagcagatcttttaattaatgacttgctttcagagaggccttccttaacaatcttatctaaaatagacccttctctttgtctaagtctctcttgatcagtttgtcaaggtatgctgtcttcatggcatatgtcgctatgtgaaatttcatatttgtttttgtctgttgccactaaatgcaagccccctgagtagagatattgtctgtctcattcactgctgtattagctgcagctagaatagcacatggctcatagtaaaaaaccttcagtatatatttgtcaaatacatgcatgacatttagtttctggtatttccggtctaacacacctttatattattttaaaaaatgagctcttcaaagtttttcatagtgttttcttctctctctgggattgtttcgttgttctggtaccttgaagataatggcagcagggtggcatttaacttcttccacatttggcttggtgccactgacctttcatggagtttttctcagcagatgctgcacagaaaatgagctctttctcaattatgggggcctgaggcctctcctcatgtgcttttggtgacgggcagcatggggtcagactttggcttctgatctcctctttctcagctgtttgtcttcatctagatagtcagctgggctacactcacataggggttacatttgaaagggaagagagcccagttggtttttctcttcttcatgattgctgacatttccaaatgtagtaaggacatacagttgaaggaagaggatagataggtggcgaaaaagaaagggcactacagtggataagcttgtgattgggaagccctagagcttccaccacttgagtgcagagggccctgctcactgggatggaggtggctggggcagcatttctctcccttcctctgtaggatctgctgccccttccgttaggagggagggggatggaacagaatgccttatttctgggcccatagctctctgtcaacaagtcacctttacactttgattatccttttctatgttgtctggggaatggcaaatgggggcagagccagctttgctagatgacaagtgcagcaccactctttattggggacacttatacccattagtctcaactttggggatcacaacagccagttacattattattattgttcctttattctgagtgagcttgcaatttgtttcacagttattccaggggaatagagggtctcaattattgaaggatcaaatgtccaaactagatcatcttgtgtgcctcatagtgggtctagagtgttgttgctgttgtttgttgtttgtttaggtgcaactgtaagcacaagaatccatacgattcctcacctctttccaaagggctttgaggggccctgaatcattcggtatacaacctaactcttcagaatgtcccagaattctactgacatcatactaatgaaagggcaaggaaggggttaactgctgaaactctgcttcagggatgaaaatgtgtatgcatacatgcatgcagatacacacacacacactcacacacacatatacattcacatggtaaatatgtatatacatactcatggttatggtatatgacctactccaccataaggagcacatggttgccttgttttgattggagattattagtgtaggtgctagaaatggcctaagaaaagatgtaaagtatttctttgtaatgttttaaaatactgctaggtaataatattcaaacctcccggtggttttacattacagaaaccgaagttctaaggaaaaaataggctttttttttctgtaacatggctacataatgagctagactagcatttagtcagctgaaaaactggcagtttattgtgtcgatataaattgtaattatctacctttcctttttttctcatgttaagcttgccattcaaaaggttgttttatttcctaattttttttttctttcagccttggcaccatttatttgtatattaagtttaatttagggaaaagaagaaaaaattgctaaaacccattggtagaaatcacccatttgtggaatattatctaacctctatagtggcatagaaggcgatgcatttacaaacagtctctgcatttataaacatttttttttcatactggcagaaaaatccaaacagaactcatagtcctactttgaatgagaagtactctcaatttggaattattataatcactgtttttattaatcatttaacaattgtatggtgttgattaattttctggtagtgttatgttaataagatttcaaggaagggaaataagtcatttcatgtatgtgggtttagtttaattttattcaccaaaatggtatttacttaataacaactgtggaaataagcacagattcaggctttgtcatcttctattttagtgcatagctaatgaacagagcgggtgcctgtggaaaaataggttggtagcactattcagggtatgagtcacaggggcctgctccgacctcattagagttttttgcggtgtgaatcaaagatgtttagcatctaccgaagtaggcactaaatagtgatgtatccatggatgtttggttgatacaattaatgaggagggttgaaagcctctgtacaattttacagttttaaatctgtgctcattcataaactcaaggaaaacttttaatttttccaaaatttccttgggaaaccattttcccaaggaatttatttttaaatttggaggtaccatttaggatcgctttattggcactagtttttaaattttgttgcattgcttctcttccatttcccctctattgcacatgataagcgttattttctcatttgtcaggaaggaaattcccatcacaatatctagcagctcttgaggctgtgaatgtcttataattttagaaggttcagatcagaaaacatacagtttctgactcttaaaagtacaacctagatatgtaacacattgaaagactgactaatccagtcttgatcacttaaggatttgaggagtcgagtcctgcactttcaaccaagtggcaggcattgcttcagtatttagctcttcttgagtctagaaggtctttgagattctggccataaaaatgaacttaagagcaataaatgtattgttgtagcttaaagttccaggagcacagcttaggtgctgaactatcttttaaattttttcctttgtgaaatgtttgtagcttgggatggctagtcagaggaacaatggtgttataaaagaggtgggttagattcgcctcaccacctgatcatttcattttggatgaaaatttagcagctgacattgcaaaccttgagaaagtgttgactgcctattcaaatgtagtttagagggttttagattctgatagtaataagtgcagaacctttttttcgcaattgtgtggttacaaaaagatttcagttgatggcccatgagatttgacaacatattctgtttgatattttaacggtttgaaaaaggagttttagaatatgtatctggaaactgtgtaatgcagttttcaatctactgtgtaacctttccattacaagactttttccctcttaatcctgtccagtggatttctggtcctctgaggagtgtgcctcagtacacctctccatgagtgcttaggaagggctttaggtggctcctttgtggcctccagctttcattctgcataatgcatcagggttcctcctgggtctgcatcttacttcctggagtggtttctctgggaagtaattgactcaatgtattgcttcttagtcttccccttgctctttatggcagggtctgattgatacaggtataaacatcagggctagcagctgctttacagtttcagggagggataactgatgaagacttgtccattagttgggagttgggaaagcccctgttttggtagcagtgtggtcatctcctctggaatgaatactcatccttcctctcacagaatctcctcttgcttgagtttattggcattcatgtgatttgcatgacaaatttcggtctaatagcttatactcaaaccacctctgcagttgtctgtcagttgtttgtagatgtgaagaggcaaaaatgactggtctctgggtcctgttctaactggaagggcattctttgatgtgtgaaagttaagaggacaacttacacctggaattcacgaaactagatcctgcattgacctggaggaggtgaggtgagacagggcacaaatgaagcacaggcatggggtccaagaataaatggggagctggtggtaagcaggtgtgaggtctggattgtggaccatcctatgggtccttttgggagggacagttgcatcatgctgggtgaggatgatcctttaaatgggtcagaccaacccaggcatgaaaactaaatgctaaattctttctgaattcaattctggaccagaacaaggacataaatgagacctgctggatatgtctccttaatagacatttgtaacaaaagtcacccatttgcttcaaagttctctcattataagccatagttgctgttgggaagctgatgccatttctcagtcctctctttgcttctgccctcccctttgttgcagtagatctgctgaagaatcttgaaatgccagcagaaggttgaaagggaagaccttggagttttcacattctcaaaaaataggtggcactgagaggtcttattttatagataaaccagctatgttggtttcagagtaattcaattttcatagttgtttttcttttaaaagtccctattctagaaggtacacaccctccttaccgtagaattctagttaataaatgtagaagaaaagatgggaaatggaaaagcaccatttggtaaacaccacggcaataattgttgcaagcaagaatcatcaatggatgctgaaaatagtaggtgaaaagtatgatgaaacaggatatttacttagtcccaaagtatctccccacaagaaatttataagctaaaaggagaaaatagtggttttaaggtggaaaacctagcaaacaccagcttaaacaagtgatcaaagttagtatcatcagcactaatacatatcaatattgtatacctcttgatatgatacaggtgaaagaacatcacttctatggtattcgtcccaaaatgcacaccacaaactaatagtgaggtgatatcagataaacccaaatagaaagtcagtctgcaaaattgccagctaatactcttcaaatgtcaaggtcacggaagacaaagacagactaaggaaatgtcccggattggaggggacttagtagaaatggcatctaaattcagtgtgagttcctgaattgaattctagaccagcagaaggacataaatggaacaattggtaaaattgagtagtctgttaactagttaagattatagtatcaatgttaatttcctatcattgttatgtagttacgtaaaatgttaatatctggaaaagctgagtaaagggtatgtggaaactctttgaacaaatttttcaactttcagttttttttgtaaatttgaaattatttttaaaaagcaaatgtctttttaggagatattatgctttattgaattaatggattcattaactccttcatgccctgtctatgtatagctagttacccttctaagaaaatgaaagcctgtgatagatttccctttgctggtatcattttacttcaatatttagactaaatgtttttagcttctctaggtgactatctcctcccattactaccaatgagaaaatatattcacaaatctactgtggaatactgggggtgctcttagtagagtccatagtggtgctcttagtagagtcctagtgaaagtagaggcctatttactgtaaagtttttgtagcttcagttttagtacccttccccccatgagctttttccaaggctctccactttatatatatataaacttatatatatatttatattatatatgttatatatatttatattatatatgttatatatatttatattatatatgttatatatatttatattatatattatatatatttatattatatatattatatatttatattatatatttatattatatttatattatatatattatatatattatatatatataaagtggagagccttggaagagccttggaagaggctcataaatatatatatttatatattatatatatatttatatataaatatatataaatatatatataagtaaattatatatatataaattatatatatataaatttgagatgagtcttgctctattgcccttgcactgctggaaggcagtggtgtgatcatagctcactgcattttcagattcctgggcttaagtgattctgcctccttagcctcctgagtagctgggactacagacctgtgccaccatgtccggctattttttttttaattttatttgtagtagagacagtttctctatgttgcccaggctgatctccaactcttggggtcaagttatcctccaacctcagcctcccaaagtgctgagattacagacatgagccactgtgcctggctttccacttaagtatgaattcataaagttatatacttaaagggagtcctccacatggaatcagcttcaggcccccacccccaccccatacctggatctgttcctgcttaatgggaatactttgcctgaggcagttccatacaagataacacagcccgtttacatcctggctcattttcaaaacagcacagaagaaaacaacatcatgttgaagctggaatagaatatttcaaaagttttcctttgtttaatttggctcactacctggctaggcagacatgcaatcaaatgaaacaaaagtaaatgcaaatggaaagcattcttgtatgcagactgaaattgagcacatttagtcagaagatcagatttgcctcatccacaagatcactgtccagaggaataccctttggttacttggaagtgtcattgcttagactttgccttgaagctgcagctgtaaacagcatctaatacttggaaccattgctcccagcccctgccaccagttcatcccgcttcattgtatctctcagataagctcacagcccaaggttcttcaaccttgtacaagacctcacaagaagaggcaaattttgcatatgtagaaatctgtgttaaataaaatacaggatcaagccaaggagcatgaaatttggagttggtgctgacagcccctcattcctgtcacttattaattttatttccctcctcagcttgtgtcattgcctaaaaattatttaaacacaggttttcatatgctgtgatttaactctttataacctttagtaccacatgggaattagtaatctctttctttatgaacatttttattgagcttattcttatggaaatttgatctttagtaattttatcagagggattttttttttcttttaaccagatgtaaacctagctctagtagccctgaacttaacagcaacattttttcctggtcacacaattctgaaatcagaggattagtagtacaatataagaaacatggcactcactttgaagttgtcttccaggttttcacaggagtgtgtgtgtatgtgagtgtgtgtgcatgtgccacatgaatgcgtgtgctttttggaaagttttattgccatctctttctttcacaggttgtttgattatctgtgttttcagagtaagcagagaacagaatgtagaagttgtttgaaattacaaattaaactagttgcactaggaataaaatattagtgaatgaagagtttgttgggaaagcctcacatgagaatggtttctttttttaattaatgaaatgctgaaatataccaatactgctttggatgttgttttatctctgggctatgaagaaaaccagttgtttgattgtgaaatgaaatcaaaaccagagaaaaaaatactatttttaaggaagacttactatgaaagttattgtgcaaactaagtcctgtttaccacaggttagctaacatgtatatgagtcaatcatttgccaaaacactagaattgtgttatgaagaacctagcaatcattagagccccttgtgagttaagcccagaaaacctcatgtgtggaacagccctctggtcatcaaatacctgaggatacagaagagattatttaattgacttcaaaactttattagacctaatgttcttaaatatgttcagccaagtcatgccctctgtatcctttcttaatgtcttaaatgtgtgtggcttctctgccccaccctcccaatttggctgtcagtctacaaaggaaataaaaaaaaaatagcagacccagtttccaggctgttttgttttatggagatgctaaaaggcagcttatttcatattgatcataccagggaactagccaagtatggtgttaattgggtcctctggaattctacgcccccgggaccaaaagctttctagtaaggaggggaataaacccacaggctgcataaaaatgaaatccaggagcccaccatgtcccgattgctgattactggtgatttggccagctcgttttgtatccagttgcttatttcaattagcttgttttgtgttatgtttccccacacccccctttcctgcaaagctgtgaagccttgttttgaaaactgctgccccagagtgcaccggcttggcggtcctgtcctcattgttctaatgctcattccatatgtgggtcacatcctagagctctccccccagccctccccctcacttctccagccatctctccttcccttccctgtccatacattggtgcttgcactctcgcactcttttacacacacgcatgcacacacacacacacacacacacacacacttttctcctaagaggcagaggtagggcagattcttcaggagcttgcaagtaggatcgttcaaacttaaaacgctggttgctgtgcatttagtttatggcaaacacttcaccttcgggaaagtaattattctgctcctctccctgtttctttcccaccccttcccttttctcctctcttcttcaggacaaaggtttttaagaaactgagattgccacttcgtgaggcccttcttgttaccctggtagctggtatctcagacagtgaatgaaggatggatcagacaggctggagttttgatgcacagttctttgggtactgcaggaggagcccactgagaaatgtgcatggcgggcatgcctgctgagtttattatgctggttatctgtcacttactctgactaaaaggtaagggcttctgtaatttgttgctgcaaagaattggtacattgttctctttctaaggcttccaactaattggctcttgagggaagattggaatgagagttagtgctcgacttctgtagcttctcctgttagatctctgtttttttttttttaatatgtgaaggaaaaataaccttggcaattttttgactattggtggaatgtctattcacttgttttcaaagaaaaacaacaaaaaacaccctttgattcatgatgtttattttaatttaaaacttttcctggactagtaaagaaatgtagtgtatgtgtagtcaatcttttcaatgatttctgtaaactgtgggaataggagttgtgatcttatcccaagataagaatattttactttaacagattgcatttttaccgattgaaaattacagtgcattttatttagtaatcagagtgaggaaagttagagactatttaaatgaagtacaatagtaacatttacattaattggtcagttactgtagtgtgggaatacacatgttgataaatatacattactaattatgcttcttgttttctgtatacttagaggaaagttttgtgtctgtgcagaattgaaatatgtactgaaccacaggcaaaagaatcttagtaataagaattttagcaaaagaatcttagtagtaagtacttagaaaactatataaattttttatttgtataaatttaagagatgcaagtgtagttttgttacatggatataatgtgtattggtgaactgtcagcttttagtgtattcattacctgaaaagtatgtgtgtatatacgtgtgtgtgtatatatatatgtgtatgtttgtatatgtatatacatgtatatacacatataagtttctgtagttgacgggtaacacatgacctgaaaataacctttttaaagtttccacgacaatatttatttgacatgctaagcattttttctgtatcatgacgagtagtttcatggataaatttaggtaatagctattggaaatcatctgatgccaccaagcaactgtcttgcaagaccagagatgttttgagcgtagggtacaaccagatttttttccattctttttacttttatttttaaatttttatttaaaaaactttttttgagatggaatctcagtcttatatgtgtatgtatatatatacacatatatgtatatatatacatacacatatatatacacacacatatatgtgtacatatacacacacacatatatgtatatatcttaaggttatgcttttaatctgtcctacttaaagtaattaaaactagactatcagttgattgttatctctcggaaaaatgtacctttggttaagaatcatttcaaaaacagattgcccatcactatggaatttatgcagttggaaaccaactgagctttattgaaaaaaatgattacgtcttattttcttaagcactagtgatttacaaggaccgtttggtagtagcataggatgtattttattggggacggagatccctttaatgatattttctttatggctgctgtacaacacttgtgatgtgtgttacagtctatctctatttatcactctgtctcatgagccataaatgaaggaaaggtatatgttgggatacccaatttaagtcaccttattttatttattacgttatagaatttgctccaaagagcatgtgggaagtgttttcttcaaaaggaaatattgatgcatccacttaaacaacctagggatatcagcaaaacaaactgggtttctttcatgttagactttgagaagagacaagaagcaatctgggtgaaaggaggacactatcagtaaaagagaagactgtaattttcttgaccttggctcaaaggtttctgtcaagactgctggaggttgaataggtagagtagggcccagatttaaagctggtgtctctcccacacctaaccctcatcccagtccctcactgtccagtgtctttgtcattcagtctcccctggtttaatgtgtcagcaggagggctttatcttcttttcaaaatcaaaaggagatggcccagtgtggctcctacatacccatgaaaaccttaaacatttccccttccacattttatcccaatcatctacattgagtaaaaataaacaaggaaaaaaaaaacagatacttcgccttcataatcaatttttcttctcttccaagttttcgaactttgttacttaaaatgtcaactgtatatatcccttacataaagcataacagtcttaggataccttttcaggtacaaaatcagtgactctcaacctgggcgtattcaaaggactcccttgtggagtgtttgaataatgcaggctccagctactgcctacaggaattcgtgattctgtagtcttcattagtgcttggtatatgggagttgtttagtaatagtcacagaatgttacacagtgaaatgttttcgcagtagtctgacaggacagtggataagtgcattgcaaaatcttttctgcttcctctttagttgaatttggagaagggaaattccctccctctattcttcctacatgtatattaaggaaaatggggcttcttttgcagaggtttccaagcctctgaaagtagatgaatcacccttaaaaggctaataggtcccgctaatcattttgcaccacacaaaacaaatagtgacttctgtatcagtaatactagtaaacagctgtcctagaaatgactgtgaacattagtcctagggctctcacaaacctcaaagtgatatatggagagaacccagcaaattgaaaacattctctttttgtgagtatattttaggtgtatcttgtcacttgagccagtaggagcgtgcttcttggataataatatgggtttcccaaacaactcttgaagcacctagatccatacatgtcggatgcaaaaccatatccatggacctggaactgggctgtgacctaagtgcttgtttttcccatcaaagcgtctttcctttggtaccttcgctagtttagactgggtcttgaaaatttgttagtttccctgaagctatacgggcaaattctggggaaaacaaaacaaaacaaaactcaaacaacatgctgatatcttaatattatctgtaatatgaggacttgaattatgatagctgttctttaagtacttcccagctttctaatctctaaattttaatctttatgactataatcaattcttagtaaagtcagttctgctatcacacttgttttgaaaaggcaaatttgttccaaagcaattgatatattcaagacaagcataaaacaaatgctgtatttgcttatgtgtgatttcctcccagagaaacactaggtaaatgcagaaactgtagccagctgaatgccacataggaaaaccaaaaatgcacccatgttttaggagccccacccatccacatctgggactaccaactttctgtctgatttcagaatgcccttcttccaccacttcacaataacccacaagcctcattccttaaccacattcacttccacagtaaatcccagttttttaatgtgataatatgccatgtttattgttgtatttgtatatttctcaacaatttaacacatataaaactgtgctaccatttttattatgtttctgcttctttttaatgtgttactgacaatgtttttgattgttgtacctcaaacccattttttgttttgttttgttttgtttcgttttgagacagactctcaccctgtcgcccaggctagagtgcagtggtgcaatcttggctcactgcaacctccgcctcctgggttcaagcagttctcctgcctcagcctcctgagtagcttggattacaggcatgcgccaacatgcctggctaatttttgtatttttagtagagacggggtttcaccatgttggtcaggccggtcttgaactcctgacctagtgatctgccgacctcggcctcccaaagtgctgggatgacaggcatgggccaccgcacccggcctcaaacctaatttttccagtaagccacttggtttttactgtgcgattttgcagagcacaaagaatttcagcaacacatacattctactggagcagaactgactgtatggattttggtatgataaaattctcagaggctaagtgccaaggatattttgcatgctgtagcattgtttgttatgaatgtggtcaacttagcctgttttctcctactgtatattttttcaatgactctatagaactgcctcagaaaaaccatttatcaaaccttcaaacttcagggaaagttgtgtgacattctcaaaagtgaagactacaaaagatgattagatacttggtccaatcctaggaatgaagttttgtggttttggctaattaataattaaggtcattggatcatttgatttttaacagattctaaggttcagatgagaacatggagatgtatttcttcaggtatgcaacttaaacaaatacaaatttgataatttttacatttgtaaaaaaacatatgaagcccctcattgcatgaaacaaggaaaatgctggactggtttggtagaagggaaagagaattttaatctcccgaagcagtagaggggtaagtatatactgtaggcttttttgtttgcttttattgtctgcttattgtgggtctggaaattggagtttgggtttttgtttctgattctcctcagggttctgacttttggccacaagcagttacaggctgccagtactctgagtatcctcttgccacttcctgctgggctaatgtttatttcaccactgaacttgccttccagaactttgcagaaattctctagggaactgaatgtcccaagacctgagtttgaagccagaattgggaccctggagttgtcctaaggctcgtttttagctgtgttatcttgcaaactacagggccaagcttttttaccctcagttgccaagtggagctctcctcccactccttcactagaacttttccttttaaagtagaaccatttgaaacctttctgggcacagcagtgatagtgagggaaggtcacatgatcatgctttgaacttggctgcttgggtgtgtagcatggtgccttgggtatgtggcatggtacctgggtatgtcagctcaagacttttttactcctaaatatacatacagcagtttaattacaaccttcacgggcttctggttgaagagaggaaacataagaaacattgatactgaaatacacaaacaagttggcaaggagaataaaaatgataatcctgtgaataaccttgagattttcctaagcagatcttcaagctgacatgatcagggtccttctatagcacatcaggtgttaaaaatgtaaaaaacagtgcctactagatccaatttggctctttatttactgagattaaaaattattcatactcactctatggttatttgttgagagacacttgcaaatcaaagcctgaaaccatgaaaattacaaaacaaaagttaagttttttgaggacatgatgcaaacattccactataaggtcacaaagtttactgttaacacaatattggttagtcaaacctcagtgtgtgtgtgtatatatatgtgtgtgtgtgtgtgtgtgtgtgtatatatatatatatatatatatatatatatatagagagagagagagagagagagagagagagagagagagagagactgtgttgcccaggctggagtgcagtggcacgatatcagctcattgcaaccactgccttttaggctcaagtgatcctcccgcctcagcctcccgagtagcggggactacagacatgcatcaccacacctggataatttttgtttttcatagagacagggtttctccatgttgcccaggctggtgtcaaacttccggtctcaagtgatccacccaccttggcctcccaaagtgccaggattatagacgtgagccaccatgcctgatccaatcataatttttaaataaaataaatttaaagtaaattgaacagcatatattacttattcaaaggggaaaggttgaaatttgtcttcatacataatgaatattattaaaattgtattaaatgaactttctgataaaatctttaataatgcattgatctcaagtgaaatgctttattttaaatctcttatataccatgcaaaaatgatgaaatcattaaaagatttcctaagggatttccagtgattatatgttttggtgaaaaaaaggattcaaaagtaaaaaatgaatagaaaatactaggctcaaatatcacccaggtcctctgtggagtctacagctctgacatgccttgagccaagcagaactagggataaaaagagaaatagggggaccagcttactttggaagtgtaaaaaagacactccacttgaagcgcagtaaatacagaaggtttcctttcactgaaaaggagtgagatttcagtactcagacgcaatctgtgccctaagataacatgcttgttggcaggagtataactgttggttgttgaagaaatatatacaaaatgcatatttaacagttgctttgattaaaaaaaactaatctacgagtctgtttttgtattgacaatggttctcctaatggcatgccaaaaatatacccccagctatccatgcttaacaagttgaattggagatggattacctcttgagtactctacaattgactgcttccgttagtcttggcaaattatacagccaaattgtctatctattttctaatatgtcagcaaaattaagctgaaaaatgcatacaagaataaattgctgctggaattgcatgatgcccaccttttctttgtgttgaggaaaaaaaaatgattaaatcacactttggaatcattctatttcaatcaactctatttagatcctaggtctggtttagggaaggtctgtgagacctttagctgctgggtattgagctcagtaaactatttaatagccacattgtagctttcagtcaatgattttccacattccaatctttctccactttggagccagcctttttgggaaaacggagacccatggtttcatttcaacaaagaaggaataaccaatcatggaacatattggctgtgccaccaaggaggtggcagatgaggatttggggacttcaggactgatgattctgaatcttgacatgttattagactcattgcaatatggccaaaattttgagtatcctggttactcaaggctacaggcaagaattattttgagtgcagctgtcagaattaaaaataaaggaaagactgaatgaatgaatgaatgaagaaaaccaggacatggatgattaaaatatttctcttctctccctgcaaacatgtggacagggagattccatgtaaactctttctctcttttaatcatattcttttgttctaaggaatatttagattattttttctccagtggaagttctttcagttttacttactacagctcagtgattgcagattgctaattttgcttgaaaaccaaaggatttggttgttttcacttcattagcatcagaaagggggattggctaaagtgctggccaaggtagccttgcagaaggaggcagggttggtttggtagggagaaaagattgttctttggaaatgtatagaactggctgtgcaaaaaataaataaagccattctctaaggtattgctgaatatcaagttctctttgctgggttggagtgaagtctattgcaggtatctatggctttttcatggttgtcagtaagtgtatgccggagactaaatagtgatgcctggtgcttttttagcactaataacttttacaaaggtgttttctacctccaaactcctagaattacataatgtgtaggagacataggggaaggaagagttctggccaggatcaaagtgggggcactggtgtaatcattattctgaacctgctggtcttgagcagttttccccaaagtggcctcagccctatcaagctttgaaatatagtgccttgatgctaatagtcgttatttttttgtttgcatttattcagtacaaaagtctccagctgtgatggaactttgcccacagtgacaggagggagttattctcaatcttctgccacttctaggttgctttttctttagcagaaatcatatgtcttcactctgaaattatatgtctttactctgaaaatattttgtaaagtacttcgtaaagtattttgtaaagtactttgcagactccaactccatggtgtagaggagacaccatatcatagtgtggatttctagaaaggagtagactgagatatagacaggtgatgtagcagccttgatatcctatcccatagagacctagtggtgaagcaggaagcaatcagcttcacactatttggagaagaggaaaagttgtgattttcctcttctgtgggaaaagacccccacaaaagaagataggaccatttgtgcctccaatttcttttttcacgtagtcatttcaaagcattctctcatttttgtagctcatacagttctgggggttagcaatggcagtatgttttgaaaataaatgatactcagaagggagaggtaatagggagagttctaattccgtgagatttgtactgtaaagtatgtatggttctagcaccagaatcctcctccttttcagattatttagccctaattacttatttcccctttgcttcctaaaatcctaggagataaactccttgaagaaaaactccagcttatggaaataaatatttttgctcagagaacacaggaatcataattttttggaattgaaatacccataagagtaaaagcattgtttttcttaaatatattcaatactactggccaatccagaggtctttcctgaattaacacaaacattaaaaagttgaagtttaatgcttggggaagataccaggagaactggtaggcacaaatcttgctttgagacactggccaaggagggtgttttggtagatggtacaggcagaccctatgacacgaatgctggattctgcaactgcatgtgctgagtgcagcaaagagtccatgtgctgaatgtggaattcactcattcatttgttctcaactatttatggagcatattctatgtgcaataaacacaacaaacatcctcttctcatggaaccttctcgtgggagagctttgatcagttgcttatatgcatgcactcatacacaatctaaacaacaacaacaacaataacaaaaagcccaggtgattattggacatctctatgaaaggcactgggcaataaaatggcaagcaagaatcttttcccctagagtaatcagcgtgtttcacaattaagaggtaaaatatcataaaagtcttcccctacgtttgtgtatggttttctttcgttgttcaagttgatcgggatataattggttgatactcttgaataagtcaaggttgcaagcagtggacaatatgtgttcaacactgaatgatgggaaaaatacaaagtggtagaattcaaacattttttggtagcccaagatttaaggcaacaataaaccattgtttcttcaactcatgttttaaaaagtcattataaactactttaatctctctgtgtgttcagtaagtataatagtgtgaatattccttccatcagctccaacaacattgatgcatcttatgtcctgtgcaaagtgttgctgatagaaaaatgggtgagacatagttcctacccttaaggagaatataatattgaggatttgaaatattacgagaatctgcttctaaaagtaattttttcttatacagttttgtagatgcatgtttaggagataaggaaaactgagctatgaatataaagtacccagtataaacacaggcaatcctcttgccatttctaatcaagtatatataaaaatgacattctgagaatgcttgtactagtgtttttcaaactgtattcagtgaaaacatgttaatagttatgggagaggagtagggatgaggaagacagagggagtttttatggtcaaatcagtttgtcaaacacgggtaaaggaagtaagcaagtttttcttatgcatgcttctcccaaaactttaatttgctagtgtgcattgtgacactccaggatgggttattgcagtagttcccaaatttagcatcataatcacaaagtcctgggctccagagattcactgaaacaaaactctggcaggtgagaactggggattttcatttattaggttggtgcaaaagtaattgcgatttttgcaatgagtaatggcaaaagctgcagttacttttgcatcagcctaataaaacacatttgggagattacttttaggtagtcttagttacttttaggcagagtcagtttatttcagcactggtcccatgtaccattgacatgcaggaaggagccctccctgatttgcataacagcagaacatcgtttatccaagaaatgcatattgacatttatggaactaacagtttggaaatgctggcccatgcattcttttaccaaaggcctaaagaaaaaaaaaaattataggtaacaagttcactagtttgggacttagagttaatgtatattttgtgtgtggtggttaagatagcactaaggatcaaattcatttttttgaacccacattgatggtaatttattatttttaaagtggtgcttatggctgggtgcagtggctcacgcctgtaatcccagcactttgggaggccaaggcaggtaggtcacctgaggtcaggagtttgagaccagcctgaccaacatggtgaaaccccatctctactaaatacaaaaaaaaattagctggtcatggtggcacatacctgcaatcccaggtacttgagaggctgaggcaggagaatcacttgaacccaggaggcagaggttgcagtgagctgagattgcgccattgcactccagcctgggcaatggagcgaaactccatctcaaaaaaaaaaaggggggggtacttatttataatgtccttagaccattttcccccttttttcagctaatattctcacacagtttgaatttaatttatagtaaactttgctttgttctgtcactttcctagagaacaatgcttaaagttgttggatatataaaactcaaattcctagagataggaaattgtataattagggtaaatttgataaggtgttggcatgaaataagataactctttaaagagagaagagaatgaaggatcttatttatataactaattcttggccgggcacggtggctcactcctgtaatcccagcactttgggaggccaaggcaggcggatcatgaggtcaggagatcgagaccatcctggctaacacggtgaaaccccatctctactaaaaatacaaaaaaaatagccaggcgtggtggcgggtgcctgtagtcccagctccttgggaggctgaggcaggagaatggcgtgaacccgagaggcggagcttgcagtgagccgagatcgcgccactgcactccagcctgagcaacagggcgagactccgtctcaaaaaaaaaaaaaaattcttggttgtttttaggtctgtactctagattattaatttattattctgagaggggttacagtggcataattaagatgatctaattagacaaaaaaatttactggtcctgaaaacagatcactttcctgagaaaaaaagaaaaaaaaattggaaaaaccttcaaagaggtttgcctttctcttcataaacactattatgcagcatttcagagcaagctacggagctgggcttgggcagttaaatcctgactttgtggttttgtgtagacttgggggtgcagctgtatcttgagtggagataataaccactaatggtaaccccagacacagctattagtgtcagattaaatctaaatgcaaccttcttttccttttgaatattctctttggtaaaatgtttttcgtaaactcctatttgagtctctgctcacttactttgtttcaagagagtataaaccagatcagggtgattgttcaagtaaaagtgactgaggctcaatgccatgaacattgagattataggtgtatgaaagggctttgaaaatttgtgtatagtcatcattgaaaaccttgattgctgaaaatcagactctggttagatgtaggccttgtcctaaggtccaagaagaaaacatgaatgtaagataatgaaataccacaccaatacagccctaccttggagatagtgtgggttcaggtccagactaccacaataaagtgaaaatagaaataaagcaaatcatgcaaaatttttggtttcccagtgcatatgaaagtaaggtttacactgtaacctattaagaatacaataacattatgccttaaaaaatatacataccttaatttaaaaatactttattgctaaaaaaaaatgctaagggtcatctgagccttcagtgagtcacaatgtttttgctggtggaaggtcttgcctcgatgttgatggctgctgctgactaatcagagtgatgttttctgaagtttgtggtggcagaggcagtttcctaaaataggacaacaatgaaattgtcctcattgactcttcctttcacgaaagattcctctgtagcatgcgatgctgtttgatagcatttaacctacagcagaactttcaaaattggagtcagtcctctcaaactctgctgctgctttattaaccaagtttatggaatactcctaagtcatttgttctcatttcaacaaagttcacagcatcttcaccaggaatagattatatcggaagaaatcactttctttggtcatacttgagaaataacttctcatctgttcaagttttatcatagattgcagcaactcagttacatcttcaggttccacttgtgattctagttctctcgctgttcccaccacatctgccgtgacttcctcctctgaagtcttgagccccttaaaatcatccatgagggttacaattaactttttccaaactcctgttaatgttgatattttgacctccccccaagaatcacaaatcatcttaatgacctctagaatgatgatttttttctccaaaatgtttcaatttactttaccagattcatcagaggaatcattatatatggcaactatagccatttgaaatgaatttcttaaatagtaagacttgaagttgatccatgggctgcatagtggatgttgtgttagcaggcatgaaaacagcattaatctccttgtatatctccatcagagctcttgagtgaccaggtacattgttaatgagcagtaatatatatatacatatacatacatatatatatgtgtgtgtgtgtgtatgtgtgtgtatatatatatttgaaacagggtcttgctctgtcacccagtttggagtgcaatggcgtgatcatggctcactgcagcctccgcctcctaggttcaagcagtcctcccaccacagactcccaagtaactgggacagaagtgcatgtcaccatgcctggataattttttaatttttatttttgtagaaacaggatctttctatgttgcccaggctggtctcaaactcctaagttcaagtgatccccccatgttgacctccaaaagtactgggattataggcataagccactgcacctggcacagttaatacttttaagggaatctttttttttcttttttttttttttttctgagcagtaggtctcaacaatgagcttaaaatattcagtaaactatgctataaacagatgtgctgtcacccagcctttgttctatcgacagtgaacaagcagagtagatttagcataattcttaagggccctagattttcagaatggtaaatgatcagtggcttcagcttaaagtcaccagctgcatcagcccctaacaagagagttagcttgtcttttgaagctttgaagtctggcgttgactgttttctagctatgaaagcttcttctttcaatagaagtctgttttgcctacagatgaaactgattttcaaatcagttgcttcagcgcttgctgcctcatcttgcactgttatgttatagagatggcttcttttcctaaacctcatgaatcaacttctgctagcttcggacttttcttatgcagcttcctcaactctgtcagccttcatagaattgaagaaagttagggccttgctctggattagactttggcttaagggaatgttgtggctggtttggtctgctgttcagaccactaaaaccttttccatatcagcaataaggctgttttgctttcttatcattcttgtgttcaccaaagtagcacttataatttcctgcaagaattttttcttttcagtcacaacttggctaattgatgcaagaggcctagctttcagcacatcttggctttcaacatgccttccttactaagcttaatcatttctagcttttgatttaaaatgagagatgtgtgactcttcctttcacttgaacacttagaggacattgtagggttattaattggctgaatttcaatattgccatgtgtcagggaatagggaggcccgaggagagggagagagatggggaatggcttattggtagagcagttagaccacagtatttatcaattaagttcaccttcttatatgggtgtggttcgtgggaccccaagacaattacaatagtaacatcagagatcactgatcacagaccaccctaacagatataatatgaaaaagtttgaaatatcatattctgaaatgtgacatagagacatgatgtgagaacatgctgttggaaaaatggcgccgatagacttgctcaaagcagggttgctgcagatcttcaatttataaaaacataatctgcagtgtgcaatacagtgaagtgcaataacatgaggtatgcctgtccatgaatagtggcatctaatctatttcatgactattatcattaatctaaagatacactgatgaaaagaccaattactgctgacatttctgcaagttggaactctgtatattcaccagaggacttaactgaagactgacaccaggaatttgaggatggattctagcagagatattctaggaaccaggacctttaatctgatcacatttaaaacccgtttcaaacatgctagttaaattatgtcaagtctctggggagatatctctggaatctgaacattctctggggattgttgtttgacaggtggagcaggtgagactcatacagcatgtgaagtcattaaggtacaattatgacaagcttgacttgatcctttctgatttgcctgccagccttgacagctccaaacagttggtggggacctgaagacaccacttctctggttccttacagcacaaacagggaatatattctgcttcctttggctagagctacatgaaagaaatttttgctgagaaagtgtagaaagcccttaggttgatggttaagttagaaactttggccctattatcagtgactccctaggtgtacacaatgagtataacagttttttgttgttgttgtttgttttttgtttttaccttagtcttcttcctcttcatttttttaactcctttttaaacctgtgctttaattgcaggtagacattttctcattctgacaggcaactccttactttagccctcatttgacgtgtggctaaaattgtgtctgtgctttggaatgcaggactttggcatgtctgcagcagcttgagtgacatagattaagggacattcttctttttttgagatgagtctcgctctgtcaccaggctggagtgcagtggtatgatcttggctcatttcaaccttcacctcctgagttcaattgattctcctgcctcagtctgctgagtagctgggactacaggcatgcatcaccacgcccagctaatttttgtatttttagtagataccgggtttcaccgtgttggcgagcatggtctcgatctcttgacctcgtgatctgcccgcctgggcctcccaaagtgctgggattacaggcatgagccaccatacctggccgggccattctttatttgtggggatgtgtatatttcttttatgcattactaagccctttcagcttatggtctagctctcaagccatatccatgttggtgagaaagtttaaaacacacagtaattcttgggtaggcaacataatattgcagacaaccagtactgaacaccagagtcatggaggctccatcatatactagctatgtgattctgagcaagtagtttttctttgaagcttcagtttacctatctgctgaaatgtgaaaagtggctaattaaacctacctcatagagttgtcgtaagtgaaatgacatggggttggacatatttgctttctaaagaaacgtgatgttatttcagcaataccagggtaatgaatattgtgtaggcaaaaacaatcctgtacaatattgcagacttcagcctagtttttgtgcaagctgctttctgaattaaaggaattaaaaaccagggaaagagttgatcctaatccttctaaccgccttccatgtgaattgaacacacttaatgtctgtattacttattggatgcggtagacaaagaaggaaacatttcaaccagccatctacctgtccgaaagcccagcctttcctttaggacaacatctcttcctttcattgcctccatcaggatggttgtagttgatggtggatataatagatgtgaccttatttgaccatggctggctctccaccaaagggcatccaaataaataagcatgaagcctgttgctcctaacccactctgctgggaccaggcgcagcccgctagtgtattttccttgtacagtctggaggaacccagcctctatccctgcttcatcagaaactggagtcttattttctattggctatttactctcaagacttagaaatagggacctatattgactcacttcttatttagattactgagtaaaagtataataattctttaataattctgggaactgaagctttctggagtcagcattcactggcccagtgcaaagtaactgcttttttatcctactattgcacttgagaggcaacttgaagtttcctttcctttactcagtcacttttcaaggggaaataggaataatcagaattttaagatattctgtatgcagtataggtgcattttaaataatatttattaaaagacatggagttacttttgcttatcatgcaacttattactgaatttttcttttttgtctgtgttgaaaagaaaaaggtggaagaaaaagacttatgtaggcttcctattaaaaggcacctagactgaatagaagattcccttttatttttttttctacttgcaaagccaagagtcagagccatggaatcagagaattcaagttctttatagttcaagcagaatgaagcagggaatggacagaaataggtcatattgtgattgcaaaactaggacaatgaggagtttcttggaggattcaagctctgatggattcttactttggggcagagcatttcagaaaattcagaagccaagagatatagtatatggcagcctctaaaatattttaaaaacgcttactagtctgcatattcttttcttgtaaaaagaagttaaaagatgcgttttctttaatcacttgtcaagacagtggctttctccaggattataagacagtggattaaatgtatctttcccattgcttgtggcccttgaatgattttcagacatcattgactccacacatgtttaaaacggagtcagcagcagcaaccctttcagtagctgaaagctccgggtcccatccactgggtctgcaagtaagtagccatttggcagtgactctgaggaagtcacttaacccaagagagttctcaccaataaaacaagggggatagtttgcctctttaacttctaaaacgagtatggtattctcactttggagtgcagtttcaaggtaatcttggaattcttgaactgttgctcttgatctaaacagttacaaaaagatggagagagaagaggcagaaatttccatgagtccctgtgtctacctttctttttctctttccaacaagaggatagggtggtgcccatgaaggctatgattttcagccttgcagacagctctgggagttgtttgggccccagttcctgtcttgttcctgctgctcatccatttaggatttgagtatctctctcattcctttttcttctcagttctgcctggacattaagtgcttttgactcccataccttacccactcttgccctcctgcttccaaatgcaactccctacctcctgtcaactcctgcactctgaacacgaaatcatacttagctagttgccagattatttgattaaagcagtagaagctagggtgacaaacgatgctatacttcagggatatttgcatttttaacatctggtcctcctgaaagggatctccagttggtgaaatatacacaggagataagaataactgaaatgcttttgttctatataaaaggcttcatattgatcattgagttttctgtaatcatcgtacaaggtaaatgaactaagtagtgatatcctctgggtattttattttattttacagctgaacctcagggattaatcagaaattgttcagggttatctgcctagaaagtaacagagaaagaacttgcactcaagtcttcccatccaatgctctggcttctgtaagagccactacttcccaagtgccaccttacgaggcacgtgacagccgtgtgtataggggacataatgactttagaagttgaccgctaagttagatgtaattcaaatccatgtgccctcaggtttgcagccataaaacatcgattaccacctttttggctttccacatattttaaaaagtggattcattgaagacagaggtgatgaattgtgtggcatagagaagtggggatattttttaactgtgacttcagctgttgtccacctggggagggaggtggggtgatgtgacagtggggtaaagcactaggccaccatcgactttgaggctttaaaagactgtttaaattaccagattataaataattacttaaaaaccttcaaacaataaagaagaatatgaaataaaatatactatctttctctttcactattctaatccctcttcttttatttttgagtgtgtaatcatccagacttttttttttttcaataccatacaaaaattggtgctatagtttcagcatgcctcttttgctaggtattacatgtgggggtgctatggtccactccaaacctcatgttgaaatttgatcctaatgttggaggtgaggcttaataggaaacctttgggtcatgggggtgggtccttcttgaaaagattaatgccctccctccgagatgagtgagtgtttgctctgtttgtttctaggagagctggctgttaaaaagagcctggcatctccccttttgctctcttgcttcctctcctgccacgtgatctctgcacatgctgacttcccttccccttccatagtaagtagaagcagcctgaggccctcacctgatacagatgccaacaccatgcttcttgtacagcctgcagaacactgagccaaataaacttctttcctttataaattacccagcctcaggtaggctgttaattaagtttatattctgctagtcacgtggaatatgtacatctttttatagaattttttttttctctttgtgaagacacactactgtgaaggtgtagttcctatccttgtcccaaatttttaaaaactatttgtgttccacttagtttttatttaataagagctctttatttttagggactttagctctttgttatagatgttgaaaaggctttttcctagtttgtcttttaattttgtttgcagtatgtttttctgctcagagctttttattttatatgtagtcaaatctgttagtttttttctttatggcttctataaggaagacttctcctctgccaggattatagaaatattatcaaatatttttctttcagaaaggttttttgcttttgttttagtgtattcttgatttttgtgtgactccaggtagacttctaattttgctgtgaagttccaatagttaacaattagtttaggagaaaaataagatataaaatttagtgggaaaaccaagtgaactcctagtgatgttttttccgatctggagacccattcagggaggaattggtgacccaaactatctatctggcacaggaatcccctgcagcaattttcccaagctcttagaagctgtaaactagagcatgctcctgttttaaattcaccaaggtgtgtttcaggcccagttcaccagagtgtgatggttcatgagagagtgagtcagtcatttgaactggttcctcagtagatggtgcaagagaacaaccctgatgaacaagaagatccttacaaggagaaacatcctgagatgaagagggtttgtcagagtgcagcaatgccccacatgcaggctggattttggaatttatatttaatttaactcaccagtaagcagattcacatgtttccaatgcagaatgggaagccagcagaaagaatggtaaatgtattcaaataatatgagtgtcaaactgacttagggaacacacatacatactcagcttggaggattgcttgtagaagcaatgaggtcaggaaaagatgcatgtagaagaaattcatcctaagaaagtctttcttagaaaacaaacagatcttagattcttaggttaggaggatggttgtctgcaaggcagctgaaaagaatcacttgtgatctttttcatctattttgagatggctgaaaataactttatatccatgaaagggaacagaaaaggatatcaggatatgaaggatgtggtcctcctgtgtctggaattggtgggttcttgatctcactgacttcaagaatgaagctgcggaccctcgcggtgagtgttacagttcttaaaggcagtgtgtccggagttccttctgatgtttggatgtgttctgagtttcttccttctggtgggttcgtggtcttgctggcttcaggagcgaagctgcagaccttcgcggtgagtgttaagctcttaaggcggtgcgtctggagttgttccttcctcctagtgggttcgtggtctcgctggcctcaggagagaagctgcagaccttcgcagtgagtgttacagctcatacaggcagtgtggacccaaagagtgtgcagcagcaagatttattgcaaagcgcgagagaacaaagcttccacagtgtggaacagagcttccacagtgtggaacaggacctgagctagttgccactgctggctgggtcagcctgcttttattcccttatctggccccacccacatcctgctgattggtccattttacagagagctgattggtctgttttacagagagctgatgggtccgttttgatagggtgctgattgtgcatttacaaaccttgagctagacacagggtgctgattggtgcattcacaaaccttgagctagacacagagtnnnnnnnnnnnnnnnnnnnnnnnnnnnnnnnnnnnnnnnnnnnnnnnnnnnnnnnnnnnnnnnnnnnnnnnnnnnnnnnnnnnnnnnnnnnnnnnnnnnnnnnnnnnnnnnnnnnnnnnnnnnnnnnnnnnnnnnnnnnnnnnnnnnnnnnnnnnnnnnnnnnnnnnnnnnnnnnnnnnnnnnnnnnnnnnnnnnnnnnnnnnnnnnnnnnnnnnnnnnnnnnnnnnnnnnnnnnnnnnnnnnnnnnnnnnnnnnnnnnnnnnnnnnnnnnnnnnnnnnnnnnnnnnnnnnnnnnnnnnnnnnnnnnnnnnnnnnnnnnnnnnnnnnnnnnnnnnnnnnnnnnnnnnnnnnnnnnnnnnnnnnnnnnnnnnnnnnnnnnnnnnnnnnnnnnnnnnnnnnnnnnnnnnnnnnnnnnnnnnnnnnnnnnnnnnnnnnnnnnnnnnnnnnnnnnnnnnnnnnnnnnnnnnnnnnnnnnnnnnnnnnnnnnnnnnnnnnnnnnnnnnnnnnnnnnnnnnnnnnnnnnnnnnnnnnnnnnnnnnnnnnnnnnnnnnnnnnnnnnnnnnnnnnnnnnnnnnnnnnnnnnnnnnnnnnnnnnnnnnnnnnnnnnnnnnnnnnnnnnnnnnnnnnnnnnnnnnnnnnnnnnnnnnnnnnnnnnnnnnnnnnnnnnnnnnnnnnngctcgggcatggcgggctgcaggtcccgagccctgccccgcggggaggcagctgaggccccgcgagaattccagcgcagcgcgggcgggctggcattgctgggggacctggcgcaccatcctcagctgctggcccgggtgctaagcccctcactgccccgggccggctgtgctggccagccgctcctagtgtggggcccgcggagcccacacccacccggaactccggctggtccgcgagcacagcgcgcagacccggttcccgcccgcgcctctccctccacacctccccgcaagcagagggagctggctccgggcctctgccagcccagagaggggccaccacagcgcagtggcgggctgaagggctcctccagcatggccagagcagacgcggaggtcgaggctgaggaggcactgagatcaagcgagggctgcaagggctgccagcatgctgtcacctctcactcccaaaggtcagaggggagattattgagggaaccttgggcttagcctagtccctgagccaggctaggcctctgtcggggggaacagccacacataaatgcctgacatgtcacaaaggggtgttcaaaaattttctcaaaagaaatttcccaagattaaattttcactaaaccaattataacttaaaatctactgaagaggaacaaacctcttcagtattaatgcttgccttctctgtcttgaagtatagctgaagtaattttgtttggtgtctatagtaatgcaggccactgtgaaccagaaacctgtgctgtgagtccttgctctgggaccataagagctgattgatttgcccaagtcttaacctcgttgagcttcagcttccccatctgtaaaaatgaggaataatgcccactttaaggagttgcagtgaagaaaaagctaggtagtacattttaaaattacctgaataacttggaaaaccttgtacagatggcaaagattttaaaacatattagtgctgtaagtgattgggaaccttttttttggatttctttctgatataggtcaagtttttctgagaggagtaaaatttttaacttgactcattgtgccctgaagcatctggcattgtaaatacattttaaagaaatatgacattggaagagaaatttgaattgcatttttcatatggtaaaaggtggtgtggtgagttttctaagacaaacatcacattgtcactgtttatcccgtgtccagctaacaaggtgctgtgcacagagaaaacactaagcagagacttgctgatcacagagaactgaactgttctccaaatttaactgcaatacgtagagttggggtataaatgtctctgttagaatctcatagtgcttctgtgtttcttcggcacctgctcaaattaaaatactggaattccagattggatatcaaaaaatctccccactcctcattttgggtagaggaagggcaggatagagacaggcatttgtgcttttagacttgtgccttaagtccacattgtcaccacaaaggcctgtgacttctgaattttttccagaactcacatttccaaaagctgagccttggagagctcaatggtaaggagatctcggcaggcagttcctgaggagacgctagtcgttctcctttctgcattcatacatccataaaagttgttaaaacctcaagcctgctgagtcctgagggttcaaggagttgctgaaagaaaactgcctctgttagctaacttgttttaacctcagcttctgaaagttgggggccaacctaaattcttcctgctacacttctgttgctgggcgcctatctttctttgtttcttgtctgagacagtaaacagagggtaatggttgcacaagcaccagctcttttgtgatagcctgggagcttcatgcaaggagttctgaacaggttgcaaaagagaagctgttgctgaatgccaaaaaaaaccccaaaaccgaaaacaaacaaaaaaaccctctctccagttctagcttgttagctttttccaaacctttgggagcttgccttaccaatcaatgagtcagaaaccttgacagtttctgcagtaagaaactgtcggggaggaatgaagtttgcacactgggtgataccagaggaagatttgacctgtgcttagtacacttcagctttatttgaatgtttttcacagtcattagaaatcaggcaagtttttaaagtcaaacattaaaatgactacatttttaaagtgaaggttgcaacacttagcatgagaagaaagctaacagacaaacccaaaaacagttgaaatgtagtggaaagagaactgaagcaaaaacattctcttcctagagattgtttaagaccttcagatgcactaaacattgaaagatgataatgtgcccatctatgtaagtcaaaacaaaatgagacctttttgaaatattacaaaactccatgtatgttgaaactaaaatagtgtgtttctagattttatgattgcagaatttggcattaatccatggaagctgccctatccccctctctgctttattcatgtcctaacagtttgtctgcctgttggagaatctagcagagctatctgtgtgccctctgccttttaactctgagcaagacattttcattgtcttgtccttggcttcctcagcggtacaatgaaagatagtttatacgttaaatttcaggatgctttcaggaacatgattttataaatagctctgtgaggttggggagaaggagcaaagtcagagagtttaagtgttttgcccagggtcccaagacaaacagaagtacaactcaggtcttcatgttctgagtgtagttccttcagctgtattgcgtgggttttgagtttttaataaactctaagggcattgtgttgggtgatggacaaaaatatgcaaataaatggagtactttattgcttcattattatttatttgggtaaatattcatttgaatgttgctattatgcctacaaaatgtgtaattgttttattttttagaatattagcactttggaaggaaaggctttaaatatctgataaacacaacaaatattgaataatgtgaagtattttaatgagttcacattgactttagtttgcaaattatggtaatggagtaaaggaagggatttcttgttagggaaattgacaggagtaaagggtgtgtgtgtgtgtgtgtgtgtgtgtgtgtgtgtgtgtgtgagagagagagagagagaaacatttacagcttttcagatgttatttaatgctatacacagttgtttaaatgttaagaaaataaaacctgtaatgaaatactttatcatgtcagataaaatatataattaggagggctgtttgagataaatttcagcctatctttaagatgtggtagatcaagagtaatttaacatgatttagcgctgctattgcacagttaagtattgtctgtggttgaatagataatgaaatgcagtgcatataaggtatgttttatttcttcttttttttttttcaaaatgagagtttcatgaaaacctctctgaggtattaaaagtccttttctgatctgaataaatattttctcttcaggcaggtcatatattatagtttgtttaacaaaataaaggcttgtggcagaagcacatgaaatgcagataatggtaaaatgacactaaacatagcccctcagggcaggtgtggagtgttattttagcagtaaaccccttcttattaaagtgtctgtcatgggtgttttggaagcagctgaccttctttcttacaaagtggctataaaaccacatcctgacttcttttcctttatcatggacttagatactccagaactgaggtactaaccttcttgtctttggctttgtgaatgtcctaacacaatgtagtctaaagtaaatgaaaaactgaattggaactcagattttcttgttttttaaacggaattttctggcctatgttcttgatacccactcatttagaaaagttgttgactaaaaatagttttggcatataatcatggggatttgtaagtggaaaaataatacattaaacagtaatacatatataaagtactaaagctgggataaattaacttgactaaagggccatgatgttttcttaagatagcctttttcagtttagggttccttatcaaatccttctgcttcttatctatctactcccctcaattatatctcacacatgttagctacaagagccatcattttcctgaagcagctcttccatcatggtgctaacctgatcattaaaggaaaaagcaggtagggagggggctcctgaagtgcccaagtttaaagttcatggtcttcattttgacatttagggcttgtgctttgttcaccctgtgtatgagcttcctccagttgaactatactgggtcactgattctttctcagacagttcttgcactttcccacatctgtgtttttacttcctctgctccatctggatttcgggccaaaaagattccagttaatcattagaattgtttctgtcttctgtgatccacctcagatgagagcataataacatggtgggtaagagcctaggcattggaattaaatacacttaagttggaattatagctctaccacatatgaataagaacataagccaaataccttaattaaccaagcttgtctaacctgccttattttgttgttgttgttctgttttgttttgttttaggcttttagcagcttgaagacatggtttttgggttctgtctctagtgataagcagaagagagggttgaggaaggggctttactggcccaaccagaaacagaaactaaaaacccatgactgtattctctcccttgggtacccttaaaactcagttttaccatccataaaatggagataatgatacccaccgaatttattgtgagaataaaataaaataatgtatttaaggcatacatgatcacaatatctggcaattggtaggcacttagtaagatactatttattgccttctattccatagagttcctccattttctttctcctacacagcaattagtccctgctctgtgtcctcatagccctttgtttccttgctttatagtatttgctatgttatgttagtattttccctcccttaagttccttgaagttgatctctgctaggtatttcataaatgttggctgaattaaattgagttgcagaaccagtgtacttaacaacagtggggtttaagtgatctcagcgttaaaaaactagaaattttagataattgatggctccaaggtcaagccaagaacccaagcaccatatttttatgtataaaaactggacagcaagctgaaaatcagcagaatagaaggccagatacttataagtcctacccaaatgactggggaggaatgaagaggtcaaatagctgccttaggtcattcaactgctttgcaattccacatgtggaatcatgttaatggtatttgggcttcagcaccattggtctgatcctttgtaaagttacaaatatttattataatagtgattcctgtgtgtttcagattctccttaagtcatattagtaatttaattctctgacttaccctggaatcattgaaattctagtataagagagtcaaggattcaagtaaagcagcagctggccccgggacctgggaccaagagggaggtttagtaagtcatcagtgtctgtccagctgtctctctgcaccttgccttcttctcttctctatacaagtgtgttttctctcagaatccccttatttggtggagaatttgaagctgcaagtcctgtaacataatcagaattctccagattctagccttgatcaaaaactagaaaaaccatggaagtttttttataagctctaattatgttcaaattatcattctctctacttctgcctcataaatatacatcttaccttaaaagtatttttttttttctccatgaaaacagtagcaaggcatttttgaaggaagggtgggatgtttggtactctcctcagttatatctcatacacaggagctacaaagcatttatactcttcctaaaacatctctttaatcaaggcccttctttgattccccctcccccccaacaaaagctaaaagggagaaaaacttttgcattttctcctcagtttaaatagattacagttagtgagaaaattgagggtgaaaattgaattggtaagcaatgtagttaaccagtattcaaatatttacattttgccatgtcttctcatttaaagtgagatcatgaagaagggagactaatgacttaaagggggaggttgggtgtggtggctcaccctgtaatcccagcactttgagaggccgaggcaggtggattgcttgagcccaggagtttgagatcagcctgggcaacatggcaaaaccctgtgtctactaaaaatacgaaaattagccaggtgtggtggcatgcacctgtggtcccagctactcaggaggtggaggtgggaggaccccttgagcctgggagtcaaggctgcagccatccatgattgcaccactgcactccagcctggatgaaagactgagaccctgtctcaataaaaagggagaataacatcattccatttggtagatctttaaaagtaagagtaatgcatttttaattttaacaaaattaaaatttaatgaattatgccttatgacttgacaggttccacttctatcaggatccattttataccttctacaaaagagactgatctattgcctagggttttttttttctttctttctttttaattttaatcatctatagtgggattccagaaaatactgtcaacaaagaagtgattctgcccatgagttaggagggcacaccccacttgcaaataatgccattcattcattcatgtctagcttatcattctttccctggtagaatgtggaaacactacctggaggagaaaagatagctgcctcaattatggaagatgccagttgaaacagccccaggccagcatatgtgaaacctgttcagagtttctctcttctatgggtgaagagctgactcagataagaattggccccaattaaattacgcttacgtgagggaatgtcaggctggagggactgccctgcgtgttcaccattgattatacctgtggaaattcttatccagaagggactggtgtcaccaggatcttgatgagctctgcatatattacaaaggagaaatgcttactacattaaaagtctgatgatgtcgccacaatgtttgatgatgccgcagcaggaacattagacatgaaaccatctctgtcctctgctgactttgagtatctttgggagttacctgtagtccatttgtccccatcttatgtgttagatctatcttctgttggtctacatgagaaacctaaacacttgtttttgttaaaaaaaaaaaaaaggaaaaataatccccacctatctttccctcctgacttagacactgaatgtattcaaaattcctaaatgatttcaaattgaaggtttcactctttgacttgttatttaggttaagtggctttcttgacaggcaagagttttgcaatcgattagatgatggacagaaggtgatgtattgtaattattatgcatgtccttgggtttaagtgaggtaattgtatgaaattatgtagtcaatagctactccctcccacttccattccaaaaatattgtggctgtgctgtaaagctcaggtgttctgcaccttatataaaaaaccttaaaagtaccatccctaaagaaggcttatttagaaacatatatatattttttattttgaattgtgtaaaaaaagaaacatgtaaaattgaccatcttagccatttttaagtgtacagttcagtaatgttaagtatatgcacttttttttgcagttgtaggttagtggttttgaggtggccctagtctaggatcaaggggacactgtgtgtcacatcaattatgaacatgttataaaaggaaattgaaaatgaaattaaaatggaatcagtggagaaggaagaaggagatatattaggacaatcattccaaaatcaatcccaaaatcaaacagacacaacaaagtccaaagtttcaaaaacatcagattggtatgcattgactcctatggatttttttttcagactttcagcccctttaattaggtcagaatggcaggcaaggggtggggaaggtggtgcttcttgagctccactcagcaactggtcagttctcatcctctggcaactggatcgtgctggggttgaagcagttggattccatgatgggaaggtctttggcctctcggtatttcacaagcatctcagctctgcagtgggcccactctcgcatcctgtaatcaggcagataggccacaaaggtgctgccaaggaccgggacaatggagacgccaaagaagaagacaactcacatgttccagatgtccaaaatggggtccttgtcatagcaatgggagtctgggttcttctcatagaagtttttgtcctcaggatctgggtcctcctgccaatgtacggtcagttccgggggctgttttcccaccacagcagacagggcgaccacagtcctggagaagctggattcccagcggaggtgggtggccaagagcctttgcatcaccactgccgccaaaagactgggagcgctcaaacttaacagcccaactgccatgacagatagtcctacagggtctccaactcctatagactctatgtggattttataatacagatgataaagatttgatgcctttccatgaactgtaaaggacaaaattatacaaataatttatctgcttcatgtttacttagtggagagatcaatattatgatggcctagaacagaactgaattttttggccatttttaataaaaccaaataaccagaaggtatttgattaacaaaatcaaataatctgaaactatcagataatttttcttgatggtctggtagtgaaatgttgaatccaagtaaactcgagtaggagaagtagagtcctaggctatatgactttcatctaagattctgtgagaggatggcaaataagcatgttctttggtcttccattaaaacccttttaaaatataatagtattataaccacttacttttggtctggggcttggaccctcattttatcgttgccatccgccagcctgtgtgacatatactcagccctcagaagcattgttttacttccctggtgaggctggtgctgtaaacatccgctgaagttcctgcctcttaacatccctgactctagaaacacaaacctttaagttagcttagataacatagcaatgatgtgtaagatcttgcaacctggtaagaacttattctgtgttagctatttgctacactgtttcccaattcaacaaatatttctttaatgcctggtacttgatcttgcagaaatatgtgtgaggcaaagggtagttgatgcccgaatttctggttcaggacatttagtctaagtaattttttgccaattttatcatttgttctttctcccaaaaacataaaagtaatggaaggatggtattgttaagccacataaggctgggagctaacatttttctttttgatctggaaaacagtttttttgtttgtttgttttttgttttgagatggaatttccctctcattgcccaggctggagtgcaatggtgagatctcagctcactgcaacctctgcctcctgggttcaagccatcctcctgcctcagcctcctgagtagctgagattacagctgcctgccaccacgcccagctaatttttgtatttttagtagagacagggtttcgccatgttggccaggctggtctcgaactcctgacctcaggtgatccatatgcctcggcctcccaaagtgctggattacaggcgtaagccaccgcacttgacggaaagtagttcttgaaaacaatagtatagtctattggattattcaagttcaaacctcgaagtacttgttgtacaagcttctctgttgctaaattccttattaatatcatttactcttgtaacatttgttgccaaatcatgggcattgaaaagcacgtttctgggcttacatttgtaatggctgaatgacatttgttcatagtggtcaaatcactagagcctcttctttagatttttttttaaaaaacgaggaaataggaaaggcatgttaaacacaacaatagaaatctattctaaaagaaaattcagatctgaactccttgggtggaatagtttggtaaaggttaaacaaattttccctgactcttgtgggacattaaaataaatttcatctaaattcttgtcagcttccctgtacagctgccctaaacatctgctgtggatgctcaaaattgctgctttccccatttcacagtttacatatgctgtgtaaactatttatttgtattacataattagtggcaacatgtacacttggtttttaacaacatatactcaggggtggcctagaagaaaactatctacttacctacatggaatgaggcttcttagtttaaggcttatcaaagcaatgatcctatttcctttgcagaagctgttgatattaaggagaggcatttaaaatctgtttaggttattgtagcttggggtagaattatggggattgtgcttgatttcacaatgcggggcaggatttgacagccgctgcctcgtaaaccatgctgcagagtaaaatgatttcctcaaagccatggaaaagtgaggccactcgaaggcctgggaggctgtggtcttggtagtcaagcagagaaaattatgcgagcctctggagaggtggccctatgttgacttgagaagattagtcttctggggtcttgattttgttggcagaataaatgcgtctgtaaagagtgagatacgagtcaggttggccaaaaactagagaacattagtccttgggaacaaacggggattctagctgtcaaggtgactgatggccttgctacatgcgaacagttcctggagaaatcttggttctaccaccaagaggtgatggatccttaattatctgttgtgggtggggacctcagaacccagtcaggtttacattgtagggatggaagtcatcccagctccagtggaagggaacccagtttctaacctcagccatgcagagctgaccttgcatggaacatgatccccagaacctctcaatggcagcagaagagctctatgcagtgcctcagctatgtaaaaattccttttgggagttgtttttttctattaatatatcattggctctatccttcccaatatagttgaattagttccgctaatctagggtttctcaacttcaacagtattgacatattaggcatgtaagttctgtgttttgggggctgtcctgggtaggacatttagtagcatctctggcctatacccactagatgcctgcagcatcattctcattgtgataacaaaaaatgtctgtagagattgccaaatgtcccatgggggtcaaaattgccccttactctatgggaaaacactgatctaatcctatgttttcttggagtttcataagacatttgtagttcattaaacaacaaatatttattgagcacctactatgtgcccagtagtatgtacgttttgtgtggggtaactgatgtccaaagagaaagtgcctttcttcgttcggtttatagtcaagttggagtaacagatattagtcaaatagtcttactaaaatatatttagaataatagtaagtattgcaaatgaaatgttctgtgtgctctgaggacacatgacaggggccagacctaattgtggagatgacataaatctgtcctgaggaatatggaagctgcagtgactctgtgcatgtttttataatgggaaatcagggcaggggaagccagttgaacttgggaaatgtgcagactcctgaggtgggacctgctctactaggatcaaaaaaaggccagtgtcgctggaaagcagagagtggtttgagataagccaaacaggaagccaggggccaggcgcggtggctcaagcctgtaattccagcactttgggaggccaagatgggcgatcacgaggtcaggagatcgagaccatcctggctaacacagtgaaaccccgtctctactaaaaatacaaaaaattagccaggcgtggtggcgggcccctgtagtcccagctactcgggaggctgaggcaggagaatggcgtgaacctgggaggcagagcttgcagtgagtggagatgttgccactgcactccagcctgggcaacagagcaagactccatctcaaaaaaaaaaaaaaaaaaaaaaagccaggctcaaatttggcggaaccttttcagccacagccttgtcagttttggtctttattatcctgaaagcatgggaaaggcattgaagtgtttctgcagggctaggatttgtgtaggtttcagctaagtggctggttggttgtagcaggagtcctatggaggggatgagagtggagatgtcagactggtaagcggcttaaggctgtagggttgctgtcatcttttgcacagtcaactgatacctggccccttagttgttctctcattcacctcattggctgtgaagtgtaatctgctgtgtctccacggccttaactgtatttgagctcactgagttcatatgcattcatgttctgtttgaaccgtctgcattggattgctttctcactctggctttcagtttcaaaaatgataccaggatcccaaagaggggattggaggagcaaaacaagctgattgtccttggtaacttcatttcaaggatacaacatgtcctaggaagtcacttcattggccataccttacccaccccgagttctaattcttccaaagatccacgttgacctgttgttaggaatattctgtgggtagtcccatgtggtgattgaaggggtgaccttggtctcattagcactgagtactaactaatccaggcaatgtgggcttatatgcaccagtcaataataaataactttaatggggactatgggagagctgaaggagccagatttgcattttgccttcttagctaagacgcagttgtcaaaatttgggatgtgcagcaggatttgcggagatccggaagactagttttctcttaggatgagctccatcacctggctttgtcttagtctctgtggcagcacctctagggggcagcattctactcaggccaactctgaagggctgggcgatgtcacatctggtctatttgtggttgccttgggatagtaaccctgtcctggacctagaatgttaggctgaggttgcttatgctgaaataactagctggaggttcttggacactttctttaaggcgtgtctacaaaaatgtctacagatgtcccgtccctgtaagaaaatatgttttcttaagtgagcatacaggaagaggatcccactgactcaggattctgcagcctcgggctctttagtggagatggagggtagttgagaggtgtccatgttgacctgttcttaggaagaaagactctgtgggtagtcccctgtggtcattgaaggggtgaccttggtctcattagcactgagtactaatccaggcaatgtgggcttatatgcaccagtcaataataaataaccttaatggggaatacgggagagccgaaggaacaagatttgcattttgccttgtttgctaagacacagttttcagtgatggtaatatcaggagacaagactgacaagatttctggattgtcagcaaacttttggattgtattccttgacccacatgcaagctcttttaaatccttggaatgcttattgctgcctatttccagataagcttctttttctcttcccatgctataatttctacctctctgcagtatgttcatccttctattaatatatgttaagctgtttggtttcttcttttcctttttgagttcattcagattgctgcctgaaatactattttagagtctcagccatttcgtgatatattgtttctttatttcttgcataattattttctcccttctcctctcctgatactcatctgctcatatcccaaccttcatgaagccagatatagctaatattatcccattttagagagctgagtgtgtatcactcttctcattcaattcattttagcaagttttcattgtctacctaccatggatgaactcagtgttgctgccttacattcttgggggacgtttagccaaatagacaagcacttacaaaaccacctgcttgagcctgtgtctgctttgtctagggcaagaactggtcccatgtgtaaacgtggtaagatttggaactgaattattattctctcataagtcctccacaaacttcaggatgtcttatcatttgttacatcttttcttggcgtttccattctttggaaaatggtcacgtgatgccccttcacctcaatgatgtatggcagctctacgtatgcccaagcctcccctccccaccatccactggctttccccttgccctgcgttaccatctctttctcaacaggaaaggggtgcaacaagggaaggtcctctatcttctgctttcgtatcttccgattttactttgtagattctcttttccttgaaagagactcacttttaaagaggaatggcaattgggatggctaaaaagatgttaacttttggaaatataacagatggcaggaacttggcagagcagtaaaaatccattgtgtcagactgtagcaatcagaggctctccaagcacttttttttctgaactacattttgccccccgactattggaattaacactatttatttgtcccatttgaaatgatttggccccttttctcttccaagctgtttttccagagtaagtgctattactagaaaaggttttcttttttttctttcttttttaaaaatcgtaagcatgagagaatactaatatatttaccctttggtttctgtcagcgaggcctacaagagaaaaaatgaaatcatgcatttttctggcacattttttcagacagccaagcataggagcaaattatatcctctccttactttttttttctcttataccatgatgaatttctttctccagagagagaagtgatttttaaaaggcttgaacaacatgctaatctttccttctgatagcccctggttgaattactcctgaatttgaagcatttactgatgaaatgatacttgacattaaccagtgttgtatggaaatatttctagtacctagggagaaaataaaggagggtattcgtaacactgccgctgtgtggctgaatcttccatttttctcagaatcaacttgaattactcttgctgcatgctgactgacttctttcctaagagaccactcttagacaggaagatttgcaccactggaaaaagctagaatttacagtattattatgatgaaaaaggttgggttttggtcgtagtctacttggctatttggcagaaccagctgaaggctttggttagggatttttttttcccttgtgcagaatgacaaaggtgatatcatatccctgtaaataaaatactcttcttgttataaagccatacttagacttagagctcagggtagacaagcagagttttccacagagaggtgaaatatgaccttggcttttggttttgtatttcaggatatttttgacttggctgactacttttggccattgactaagtaaaactagataagaaaaattatgaaaatatatggatgattattcaaccttgagaagattcttctcttcgtgttagaccttgtagctcacagaactgtgcaaattctctatttgctttttttctagtgggaaaaaagtttagcacagcaaattatggagcagttgtctcattcttcagtcgaaatgtggggatgtgtttatatgacaagtattggaacagtttcttcagggatgacactcagcttagttaacatgagaatttgtaccctatgatatggtgtaggaggaaggagaataatgaaagtcttcagaatcttgggattgattatacctcacttccaaagctttccaggcagctagagccacagtgtctagcttagactcaatgttgacccaattttatttcacaaaacactctttctttaagactttgcagtataggtgtggggtatagggggaaagaaaggaattcatgatcaaatagatttttgaaattgtacatattatatcccttgggatcccaaattacatagcatgattgtgcatgtaacaagtatttactgaattctgactatgcaccatggaacttcatttctaatagtaaaagtagacaataggtgctgtagtcctcacttatccatggtttcacttcccaatgtctcacttatccactgccaaccactgtcccaacatatcaaatggaaaattccaaaaataaaccattcataagttttcaatttcattccattttgagttacctgatgaactctcagttcatccctcactgttcctccaacgtcctgctgggatgagaatcctccctttgtccagcgtgtccatgctgtgcatgttttccgccccttagtcacttagtagccattttgttatcagatcaccaatcctggtattgcagtatttgtgttcaagtcacccttactgtacttaataatggccccaaagctcaagagtagtgattctggcaattttaatatgctggaaagaaactgtacactgcttcctttaagtgaaaaggtgtaagttcctgactttgataagaaaagaaaaaaatgctgagattgctaagacctagagtaagagtgaatcttctatccatgaagttgtgaagaaggaagaagaaatctgtgctggttttgctgtcacacctgaaactgcaagagttacagccacagtgtgtgataagtgcttagtttagatggaaaaggcattaagtttgtgggtggaaaacataaacggtaacacatcccgattgatggcaatcgggtttggtttcaggcattcactgggtgtcttgaaacgtacccccctcagataaggctgggggagggcactatatctactgtgctttcatatggagattaaaaagcagagtaaatttttagaggtgactcaggatgggagatgagggaggtttattttggagcatattaaaggctccaggaagttctactttaagaaacctctttatctttgttcaactagtgtttcctaaagagtattttagttgcctacctatacagaattagtgtgtcatggaacacagtttgggaaatagtgggctagctatttccacagggtctctatgttttatgattataattcctatttggactgatgttcatttcatcttctccctggagcctgctgtagagttaatggtgtatgctgactagcccagtctccctcaccaaaaattgattcaatttttaccatttcaaggctgtttgttagatactataagaagaaataaggcccataacttttcttcaaggagctatggtccaatgtatactttaaagatacacataagtaactaatctaaggaagacagtactatcagaaaggtaggtagaaataaaatacagacaatatttagagcagtggttctcaaagtggggtcccaggaccagaatttcttcagaacttgttagaattttaaattctcaggccccaccccggatcaacagagtcagaaactctgcagtggtacccccaaatctgaaatttaacaagccttatgatggttctgatggtctctagagtttaagagtcatagctttagaagaagtggtgctcacatttgaatggggaatctccaaaatagcttcatagaattggtgggtggcattttatctaaaccttctgagtaaaacttgtaggtgcagatgggtagagacctgcattcctaaaggaggcaagagctgtcagagtcaaattcacagtggagatctcaggtctagttttagcttttttataggcaagctgtgtgaccttgttcaaatcacataacctgtctcaatctgtttcctcaatggttaaactagggtgttggggtagataagcttatgatccctttggctataaaactcagtgactttacatggctttggctcagtatttcattatataatgtgaataatggcataagctaaattattgtgattcaaatacttagtatattatcttatacattctctagctacagtggtttgtattttaaagaaataacccacatcaaaccctttttcttcttttcaggcagccattagcaccaaccagggagtaaaactttattcccaagtatgtcatacgagcagtctataactgatttcaggagcaaggacccagaacataaagtagcgccatgagaatggtaatttgggtggtatcagaataggctgctctagaagatagggctaagcagtatctggctgttctgggactcatcattgcaaggagaaatcttgcttgaactccccaggaattaaatgctagctctaaggagtagttccctaatgcagctgtagcttttggagtttgaaagtgcacacacgggaattggaatcaattacagagctctggcaatagcttttggccatgtcaccatgcacaggacctctctgtggcattgactctgacccctggcacaagtttgtgatctgtgaaagggtagctttcatattaggtgtggtccctctctggaccctttatccttacctcagttttactcgttttttgttttgtatccctgcttctgaaaaccttaataattatgtcagttaatattcacggaatatttactatgtgccggacactatgttaagccttttacctgagagtgtgaactcttatactccccattttaaagatagagaaactgagatttaatgaagctttcaatattagccccaaagtcacccagccactagatggcaagtcctggattcaactcaggtttctctgacctttgaggctaacatagtgttcttcctttgcttttagtaaagaaaggacattctttcctttacctttgatgggtgtttttttctactggaaaataaaacgtagagtaggttgtaaattttactccctgtcttgtgattcccagattttgtcttctctaaaatctgcctttattaatgataatagctaacaattatatacaatgtgccatgaagtgttttaagtattttccatttattaactcaaatcctattcggtaggcattattgttctcattttatagaagaataaactgaggtgcagagaggttcaatagcttgcctggggttgtaaagctagtaaatggcatagataggattcaaatgcaggcagtcaagtgccaaggtgcatgttctgtaaccattgcatgctctgcctttgtgttggcattggctctggcactgcatacaccagagcagagactgatcttccatttgcagtttgaacacgggtcaccttcctcaaggactcctgtcaaggggactctatattgactttgttctttgctttacagcctaacatagcaaatttcttgagtaccctcccgatttggctaacaaaatcccctcaaaatagaaaagataggaagagagggaatgaaaatgaaatatatttttaaaatacctttggtagtgttcagaagtctcaccaatttaagcagaccagattaatgttggcagaaaacagctttatcaggttaccaaagcaagcataggtaccctacagagccaaggctgtcccagagaggtagtctctgtgattgctgttccctgcccccaaggtctctggtatttattcatccatggaaagaaaaatctgcatgcccttctgagtcccacagtaagatccatcctaacagagcagaagggcaggatggggaggcacaccaggaatgcctctgaaaaataaatgtctcaaagattgatggcttgatgatctctttggagattatatcaaaaattattgattatgttagtaagtcgtagaaaataggctctgaggttgggaactaagtgctttctttaaaataatctagaagcagtagaataaatcaatgtgcagagcatctaaaatactgtatcatattggcttcacaaatagcttggcttcaatgtggaaagggcaatattatttttaaaaaaaacttcaacagttgtcttggcatgctaaaaagaaaagaagacaaaattcaattctattatttgctttgcaaaattttacaacattcctagcttctagcattcatttatttcctaatcagtgggaaaactgcaaggctttttaaaataatttgtgccagatagggctttttttttttcctttgccacaataaagatacaaaagccttaaaagatattttgttttcaacaactgaatttgacaaacttagtcctgctcagttttttggtggtaggtctgaatttcagtatgtgataatactactccatttatgcttgttttgaaatattttctatttgcatttaagaccaccgattccggtttttaagaaaacaattccagcaatgtatcttgctgaaagaaaaactcactatgcaaaagcaccaatttttgaatagttaaattgaatgatacattttcatattatgatagcattctttgccttgaaagattcacagaaagatttgtaaaaagtaactatccccttagggcactttaatgtttatttataaacagttaactacttagaggaagaaataacaccagggagagtaatatggtgtcagaaaaggaagatgactccaaaataatgataaaccacagctctaaaattttaatgtaacttaatgaaaactaattcaattgaagcgtgtttcagtttggtattagctctgaacctgggaaacttgagtcctggcattaggggaatctcttcattttatggaccctggtttcttcatctgtaaactcaggagattggaacagatgatctttaaggctcctttgaacctgtataatttcttgattcagtttcctgaagtaagatgtgctttttgttggggaataggaaacggagcatattaaaggcatctgggcctctggttacattagtacttagggttctgttcaacaaaccagtgttgtttgcttcctgtgtggtgggtgctgtactggatgctgggaatagagtgatgtacttcccatcaggtttccttaagtagaagttcaaagtgtgaatgagggggcagactcagaaaagttcagttgaactgtatttttcatgggggaagttttcctctctgatgaccatggagtctagactccttgggctaaggatcggcaaaattactgttacaggaagtcttctcagcacaggatagtgagtgggaaataaggcagaaactttatttgtatttctctggagcattctgggagtgatcccagtatttcaccttgagagagtgtaacctaaccttcacattcccttacgagagactcgcttactttaccgtgttcacatgtccacagtgagcctaaaaatgtctccactgctttggagccttttgagatgatgaaatagagactcctgaggcatacaaaatactattaaagcttctgctagtgtacttctgtgatcactacagagaggttcttttgctcccatatttcagttgactgtgctctacaaagtagacaccccaatcacactgtgggcttcgccactctgctaggtaggacatttgaacctactgcatccagaaaaccccaaatgtatcattttcttaataaagtttcctttgaaatgaccagcagcccagtgatgtctttctaggaacttactgagcagggtcaccagcggccatctgacttggtccctgccctagttaccagagctgctgtccacaggctgcctgttccacttacttagcatatgcaatgtctctaaagaactgcatgtgaaattaacttcctttatagacgcttactccctttttcagcttttcatttttgctgtctattaatgcctgtaaagtccctaaattaaacttgactttttctatctgtaactccatgttttctacgggatacttcagcaaatgatagcagcaagatatcttacattcccaggcagaaccagcatttgcatgctcagggtttcacttcaggagagtctcctgtaaggtggagctgaaaaaaaaaaaaaaagaaaagccttgtggggtatggagagagcctgagctctaatctagagtctgctagactctatcaatgactattaaatttagacagtttccacagtttcatgactatgtgggttaaaaggtaaaaactttttcctattttagccagtaaaattaatcaaggagaggggagaaaggaggtattcaacaagaaaaagttaagtctatttagacttaactaataaagtcgagataggaaaatgaggttttatattatcattaacaaaaaggttataataatatgtgccttgctaaccttggatatgaaagggttttataaaccatacaatttgtaatattttaatatgttaaactcctgtagggatttttttttttttcagtttgcagccaataactagaactacattaaaaccagagaggagataaccaaaaagatatgctgggggcagggatgggttgtactttttaaaatcaatgacatatgttgactatttcattagaattaaattatgtcatatatgcttctaggatccttaattatttcattcttgcttgcaggtaattttgagagagtgattgtgtgatggggaaaagcatggattttagagaaagattaaggtctgagatcctgctttactacttgccggctggggaacattgtttgggcaaatgtctcaactaaatagattaacttctctgaccctcagttttctaatatgtcattgggtaaaatagtacctattacttaggattatcatgaagattaaatacaacaaagtggaaaaatgactgacacagtgcctacatcattacatgcctgcaaagaaattcattttccatctcctctcatcttcacgttccctgtaaaggaagaaaaggagaatgtcaagggcttgcagagtataagactggatggaagaactcatatttgggggttctaaaaatctgatcctttgggtatgaatagacttaactttttcttgttgaatacctcctttctcccttctccttgattgattttactggctaaaataggaaaaagtttgtatcttttaacccacatagtcatgaaactgtagaaactgtccaaatttaatagtcattgatgaaagtaattggaagtatctcttgtaatttctaaagtttttcttgcaagtaatcactcttacctcccttgttctgaatagttctggatatcactccagtcatataactccttagggattattgtctctgctttgtaacttgacactttgttcattctcatggcattgcattattcataaaccttgatcagtttaaaagtaagcacaataaaagatggtaataccttgaagcattttaaaaagattataattataaaagtaattatgtaactattgatgaacaatgttcattgaagaaaagttagaaaatgcaaatatgccaccaaatcccaaaacacagttaatcctttttaaatataaaaattcatttgcacatataggtgtttatataataatagaactcatgctatatatactgtttgatgaccttttttccttagcattacatcttactgcatctgaaaatgcacatcttttatgtctctatttttaatgactgcataatattttattttatgaatacaccatgaattattcagtcctctattgataggcatttagcatctcttcatttttttttttactttaaactgtgctataacagataattgtctaaatgtttctataggataattactgcaaaggcagttctaagtcaaaggtaaatgcacttaaggcttccaatatatctctaaattgaccttcagaatgtaagaaatcttgtaccaatgaacaacgctgtcagtagtataaaagtgttatttaaaacaaagtgtcacttgaaaacaattcttacaagattgggctaaattctagtaatcttaagttccttattacctagtagtggcaaggtttctaattttttcttatattgctgttttagtaaaaagattttgtgataaagttttaaaaagcatggcttcctaatagttatttcccactctcccccttcttctaggatggttaatttatcttttctctctctctttcttccctccaggatggaagtatgatgtgatggatataattatgggacactgtgtgggcacacggcctcctgcttgttgcctcatcctcctgcttttcaagcttttggccactgtctcccaggggctgccagggactggacccctgggcttccacttcacacattccatttataatgctaccgtgtatgagaactcagcagcaaggacctacgtcaacagccagagtagaatgggcatcaccttaatagatctatcctgggatatcaaatacagaatagtgtccggagacgaggaaggctttttcaaagcagaggaagtcatcattgcagatttctgttttctcagaataagaactaaaggtggcaattctgccatattaaatagggaaatccaggataattatttattgatagtaaaaggttctgtcagaggagaggatttggaagcatggaccaaagtgaatatacaggttttagatatgaatgatctgagacctttgttttcacccacaacatactctgttaccatagcagaaagcacacctctaaggactagtgttgcccaggtgactgcaacagacgcagatattggttccaatggagaattctactactactttaaaaataaagttgatctcttttcagttcaccccacgagtggtgtcatctccttaagtggtcgattaaattatgatgaaaagaataggtatgatctggaaattttggctgtggaccggggaatgaaactgtatgggaacaatggagtgagcagtactgcaaagctttatgttcacattgagcgcataaatgaacatgccccaacaatccatgtagtcactcatgttcctttctcgttggaaaaagagccaacatatgcagtggtgacagttgatgacttagatgatggagcgaatggagagatcgaatctgtttccattgtggctggggatcctttagatcagttcttcctggctaaggaaggaaagtggttgaatgagtacaagattaaggagaggaagcagattgactgggagagctttccctatggctacaatctcactcttcaagcaaaagacaagggatctcctcaaaaatgttcagcattaaaggcagtctacattggcaaccccacaagagacactgtccccattagatttgaaaaagaagtgtacgatgtgagcataagtgaattttcccctcctggtgtcgtggttgctatagtaaaattaagtcctgaaccgatagatgtggaatacaaattatctcctggtgaggatgcagtgtactttaaaattaatcctcggtcgggtctgattgttacagcacggccactgaatactgttaagaaggaggtttataaactggaggtgacaaacaaggaaggagatttaaaagcacaggtcaccatcagcatagaagatgcaaatgaccacaccccagaatttcagcaaccactgtatgatgcttatgtgaatgaaagtgtcccagtgggaaccagcgttctaacagtttcagcttctgataaggataaaggagaaaatgggtacatcacctatagtatcgctagcctgaatttgttaccatttgtcattaatcagtttacaggtgttattagcacaactgaagaactggattttgaatcctccccagaaatttacagattcattgttagagcctctgactggggttcaccataccgccatgaaagtgaggtcaatgtgactattcgaataggaaatgtcaacgacaacagccctctctttgaaaaagtggcttgccagggagttatttcatatgactttccagttggtggtcacatcacagcagtctcagcgatcgatatcgatgaacttgaacttgtaaagtacaaaatcatttctggaaatgaacttggcttcttttatttaaacccagattctggtgttttacagcttaaaaaatcactgacaaattctggcattaaaaatggcaattttgccctcagaattacagcaactgatggagagaatcttgcagaccccatgtctattaacatttcagtcctacatgggaaagtgtcttcaaagagcttcagttgcagagaaactcgtgtggctcaaaagctggcagagaaactactcattaaggcaaaagcaaatgggaaactgaatctggaagatggatttcttgacttttattcaattaatagacagggaccatattttgacaagtcttttccttctgatgtggctgtaaaggaggatctgccagttggtgctaacattctgaagattaaagcctatgatgccgactctggcttcaatggaaaagtgctatttacaatatcagatggaaatacggatagttgctttaatattgatatggagactgggcagcttaaagtccttatgcccatggatcgagaacacacagacctctatctccttaatatcaccatctatgacttaggtaatccacagaaatcgtcatggagactgctgaccatcaatgtggaggatgctaatgacaatagcccagtttttattcaagacagttactcagttaacattcttgaaagttcaggcattggtactgaaatcattcaagtggaagccagagacaaagacttaggttctaatggtgaagtgacttactcagtcttgacagatacacagcagtttgccatcaatagctcaactggaatcgtttatgtagccgaccagttggaccgggaatccaaagccaattattctttgaaaatagaagccagggacaaggcagagagtggtcagcagctgttttcagttgtcactcttaaagtttttttagatgatgtcaatgactgctccccagctttcattcccagtagctatagtgtgaaggttcttgaagatctccctgttggcactgtcattgcttggcttgagacccatgatccagatcttggattggggggtcaagtgcgctattctttggtcaatgactataatgggagatttgaaatagataaagcaagtggtgccatccgcttgagcaaagagcttgattatgagaaacagcagttctataaccttactgtgcgggccaaagacaaagggcggcctgtctctctgtcatctgtttcctttgttgaggtggaagtggtggatgtcaatgaaaacctccacactccctatttcccagactttgctgttgttggatctgtaaaggaaaactcacgcattggaacaagcgtgctgcaggtgactgctcgagatgaagactccggaagggatggagagatccagtactccatcagggatggcagtggtcttggaaggttcagtatagacgacgagagtggtaagtgtaatattttgtgccaagagtgttgtttcacctcttttaaatggtcaacagtggaaaagtaaagggatgttaggacactaaaatagaatgacaaatgaggttgcatttgktgcagagacgacgcacatagatgctttttcttaggatgttctggtttgttagaagatctgtttataaactaacagctgtggtttccagtgggagtcctggtttgttttgttttgttattttcttgctcagcactattgctaccaggtcatcttttgataagcctaagtaattgtcacttctgttgattgtactcctgaccctctctaaatgaaggactctgataaagtaaattacatttgaattggctttaagttagaagtgtgaaatggattttcaaatggatcttatataggaatctttccctttacagtaaggctttgcagaagtgatattgcattagttgcttggtcttttatctttcatgggttcatctggtccttgaatgatgggcatttgcactctgtagctccattaatataaggaggtgtgcttctacaaatgttttcttaatggaataaatgagtcttgctatgaattttatttataaaaattgattttaagaatttatttgtaaggagatatttacaaaacattaaaaaatatggggcaacattgttccagtattttcatcgcttctgacttactttttaaattattcattcatagatacagatacaggttttttaaaatacttgttattgtcgctatttgtctttaaaatgttcatgtgcctggacacatgcatctctttgtgtatgtgtgtgtttctgttcctttgttagcactgtgcatttttctagattttagattgtagacatctcaagtgagggcctgtgtcttccctgtcttgtttaaatggtaatattagcaccttaccattttcagagcacatttacatacattagatacttgtccacaatatttgtagagtgcttttttccccttagtcagctcaagctgctatagcaaaataccacagactaggtagtttaaacaacagacatttatttctcatagttcgggaggctggaagtccaagatcagggcaccagcacagtcaagatgaaggccttcttctgggcttgccaactaccaacttctttccatgtcacatggcaaagagagcaggctttggtgcttttcttcccgtaagggcactaatgccatcattaaggctgtaccctcatgacctcatcaaaacctaacttcctcccaaagactctatctctatatagcatcacatagggggttagggcttcagagtatgaatttgtaggggacacatacattcagttcataacagtcccagtgatgatgatgatgattagaacaggtggtaggaaggtatcactatagacatactaactgtatatccacaataccagaaaaaatgatttaagaaactatattaaatattaggtagcaagaaagctacatgtaccatctcaagtttaaactataacttttgtatacataggctctaattatggccagtgtaaattataaaattggtctccgtggctatagtagattaaaaagtctatattaggaaatttcacccctgactttgccacatactgtatgttattatgtattccttataatttagttggaatatatttctgccttttaagcacaaaatgataaaagaggggaactagcctttactgagtgcctactctgtactaatactttactactaataacaatgagttcatcgagtacttacaatgtgccagacactgtacagagggttttatagacagatcttatttaattcttccaacagcaccatgagctggggctgataattaccaactcatgaactgaggttcagagaagacatagaatgtggagcctaytttcaaacttagctttgtgtaactgcagtataccttkctctcacacatctaaagataagttggaatttccctgcatgtacccaactacactgaaatttggtgttgagctaaaatctgtaagtcaataaagtattaaacaggtttcaaaatccttgcaaccctggacttattgactaatggtgctggtcattgattaaccttcctgttttctttatagccccattgtttatatggctctccagtgatgaacttagctttgagactcaggtaaatgtggataggtaggtcataggaaaagtatgagctgaatcattcaccactgctatacagatgactacatcaagccatactgaggtttttttcttttttttttaaaatcaggaagttgcattttggtttacctgatacagtgaaaagttggaacaatttggtattagtggcctagattttcccacaggtaacttgctacagtgtttctaccttgggtgttatttagaaaagatacgtatctgcatttgctccattgtattctgaattatatatatattaaaaaaacttttattggtcagtcatggtagcctatgcctgtaattctagcactttgggaggccaaggcaagtgtatctcttgagctcaggagtcccagactagcttggtcagtatggtggaattcctaaaaaaaaaaaaaaaatacagaaaattatctgggtgtggtggtgcacgcctgtagtcacagtgactcaggaagctgaggcaggaaggaggatcacttgaacccaggaggtcaagtctgcagtgagtggtgaccacaccactgcactctagcctgggtgacagagtgacactctgtcttaaaaaaataataattaaaaataaaaataaaaacttttgtcatcaatgatactaatgccacttacattttgacattgctttgtgacttaaaaacctctttcctataaacattaactcctttgwgttgaagagtagctaagtgagtttataaggtcacataggctttaaaggatataagctgtatcttgaacccacatctcctcaatcctaatccattgccctttcctttcaattctttcatgtttctgatgttttttcatagttttaaaattatagtagcaatgtctttcctcctttattatttcattctgttcccttctcttagaaaacacaactgggttttttctctgtattacaggaaaaaaggtttgggcttgttgagattttttttaagaagactagagtgtccatacaatcttaaccatctttctttctctcctctcagcacttgtagattttagaatctaagcccaaggagctgatgaggagtgaccatctggatttgtttccaggtggtgctaacactgaagagaagtttggcaattgtatgttcaataagagaaggtgtcaccttggtgccactgaatttttactactgttgaatgatccatcaattttttgcttccaagtgctaaaaaaaatatggtttgagttgccagcagaatgaaaagctgtttagccctgtagccattactgagtctcaggtctagactctgttgtctttatttaacctgtgggcatagaatggcctagacttgcttggatttaagtcttttaaaacctttaagttggctgacaaagattacccaagtgtttgcattggttagcagctctcaaacttagagtacacatgagtcatctacagggtttgttaacaaatgcagattcccaggccaaattcccaattatcgtcattcagtaggtctggagtgggagcccgggaatcttcatttaggcttttcaagcatttcctcctcatgtggtttgcaaacactaccctaaatttacttgagctcctcagacagtggctaccagattatatatatcttttctgtaaaatattttttcttagttttttaaaaggcagatacttgagctcatgtcttagataaatttcttttctagtcaaattttacaattcaaataatcttttattatttattagtggtgatatttttctgaatgccttccgaatggataaaaatctatttctatgcttcagtaattgtagtgcttaatgttttgtggaagtgtgtatgctgggattagttgatacatttagtagttttatgttcttgactttctttttttttattattatactttaagttttagggtacatgtgcacattgtgcaggttagttacatatgtatacatgtgccatgctggtgcgctgcacccactaactcgtcatctagccttaggtatatctcccaatgctatccctccccgctccccccaccccaccacagtccccagagtgtgatattccccttcatgtgtccatgtgatctcattgttcaattcccacctatgagtgagaatatgcggtgtttggttttttgttcttgcgatagtttactgagaatgatgatttccaatttcatccatgtccctacaaaggacatgaactcgtcattttttatggctgcatagtattccatggtgtatatgtgccacattttcttaatccagtctatcattgttggacatttgggttggttccaagtctttgctattgtgaataatgccgcaataaacatacgtgtgcatgtgtctttatagcagcatgatttatagtcctttgggtatatacccagtaatgggatggctgggtcaaatggtatttctagttctagatccctgaggaatcgctacactgacttccacaatggttgaactagtttacagtcccaccaacagtgtaaaccccatcgtctcagcccaaaatctccttaagctgataagcaacttcagcaaagtctcaggatacaaaatcaatgtacaaaaatcacaagcattcttatacaccagcaacagacaaacagagagccaaatcatgagtgaactcccattcacaattgcttcaaagagaatgttcttgactttcttagagctctgcgaatcaaaccatacctttgaaattctttgctatgcacaagcatttaatatatgtttaataatgttcacartaaatggattaaatgggggcctccccaactatagtggatttgatcacaatttaaatcactagtctggaagatgcaatttaatcrtatttttccttcacaaagaatgcattcttattctttgacacaacagggattcatatttttgactactcagaggttttacaccattttagaaagagcacagtatatatctcaaaatgtaattttctrtaaatattttggaaggtacaaacttgatcaatggtttcaccctttctatttatctggttaattaaagaaatatttaattgagatgaaaaatttccaattggcactttaatcatggataattgggaagatattttgccatcctttattactaattggattatttcttccagttatcaagtacctattatgtgccaggcactgtgcaaggtacattttaggtactatttgtaattgtcacagtaatgcaacaaggtagggatcactgaggcttgcccagacagggtcacacatctggtagctgttcagagctgagatttgaactctagtgtaatggactcaaaatttcatgttattgtccttcttttccagtccagcatgccatcataaccttgttacacatatgtatttgtcagatttttctgggttattgctatataacaaacaattktgaaacttcactggcttatggaaatatttttttcttgccccagactctgggggaacagctgaaacagcactgtggcagactggattgacttaggatctgatccacatgtcttttcattccagaacccaggctgaaggagtactcactatctgggatatgatgttctcaaagtgagaggcaggagctcaagagggctggtgcaaacttgcagtgcctcttaaagtatctattcaaaactggctcactttccattggccaaagcaggtcatggggccaaactcagcactgtggagcagaaaagaatattccttgttatgtcctaaatgtttgtgcacccctcccccacccctcatagctcatgttagaacctaataacaaatgtatagtgttaagaggtggggcttttgggaagggattgaatcacgaagattccaccctcgtgaatgggattaatgccctgataaaacaggctccagctagctcccctgctcttctgccatatgaggacacctagcaggcagcatctgtgaggagcaagccctctccaaacactgctggcaccttgatgttggacttcccagcttctagaactgtgagcaatatatttctgttgcttacaaattacccagtgtaaggttgtaaggtttttttttttatagcaacttaaactgactatgacactcctccaacaggggaaagggagagaggagtgaataattactgaacaatagaatagcatgacatagcacgtgacagctctcacaattgtcttcataagcttacattaatcgagcactgcctatgtgtaaggcactgcaccaggcactagtgacacaaacaggcagaagtgtaagaaatgggtatctgacaggtcagaatgcagatgcaagagatgatgctggtaacagtggcagcagtggttaacatctactgagcaccatctgtttgtgtgccaagttctgtgcacactgctttaaacagatggtctcattcagtcatcccaggaggtatggacagttattttcttttttttctatatctggtgttatgaggaaagactcacaggcccgtgcctatgcatttacatttacctttctttgcactgaggctcttgaaacatttctccagcatatctgagcacagaatgctctttattccaaatgttttgatagacctagcagagasttaggagacctaatgtacactttgaattcagatagacaaaccgaaaaggtatttgagacacattaattactgtcaagctaatttctatatattgtgaacagattattccaataataaataagtataactttataatcgtgttcagagttgggctaactctctcccatttgcctctctgatccattctcactcttctttctgctctgtgcccagaggctttttggccagtgggctcttttgctgtctgacatctcttggttccaccaatgggaacctaagaaagaaggagagccaggtcaggatattcatccctttgactctttctacactggttactgtgggctggatgcatccctccacagatgggtggaacagttccttgctgttactagccctagattacgacactatttttgttttgttttgttttacttctttaaactctgcccactcctttgtaaatagtctatttattaaatgttcctcattacccagtttgagtgtgccatctgttttctgccaggaccttgactgataaaatatttttcttatttaaatatttctaaaacagattttaagttttaaaatattttgaatactgatattttctagcaatctctactgcagtttctgtaatactgctttgatgtgttggtacatttcagtaccaacagtagagagataataattatccaatgcttttttaacaaggtaagaaagtgaaaccagaggactgtatcttcccatctaacttatgctctccacatcttttctaccataaaagaacaacttttgttttgctaaagaacctgtgtcctcagacagaaaaaagaggggtttggccgatggtagggtaccaggatctttcaagctctcaaacattgtgatgctgtactttgatcttctagagggagaaggatttatttcagctggtggccaaggaaagaataaaggcaaacaattgagtagcttttatttatttagttcaattgaagaactgttcactagctgccagtgctgagtctaatattctttgtccaaagcctctaatcatcatagtcaagagtgggtgagtgaaaaccaagaaatggaagagctgtattgtttgaaaaaatgaggagctctttgtcattgaagaaaccattagcttcagcccagatatttaaaagggtgattaattcctatagtagcatatctcttgcataatgtaatataatataaacttcctttgtctcatattcagaagcaccagaaatcatattttatcttatagctggttgttaatctttccaacttctttttcccaaacttgcctggcaacttctctttgacatgttgaggaataagacagatgttatttggtggctttggtttaattcatgacaaatccagactaaatggcatccctgtcctcattctttttttgagatgatatttttactctcgcccatctaaatcaaaagaggcttgttgcattttggcccaggcttgcccttaaattttccccatgagacctgagcaagcaagggagagaaatgaagttatgatcaagtgacagcagaaacttttcttggctctagactttttgaccataattatttgagagaaaaaaaataatgtttccctgaggagtcctgaacactccacaacattctgatgaactttgtagttgtcatgtaagccaggtgggagaaaggattagaagcttctggaaaataataaacagcatgtttttattactcttttcagcaggtgtcttcttcttgacctttttttaactgtgggctgagggcaatttaggttttaatagaggactgttggttcaaatctgtaattatgtcttcattgtgtatcaggcttgagctgctattgtctctgtataactagtaaatgataaaaataatgacagtcataaagaggtaatccaaatakgttggcaaacctacaacctggaaacttgtgtggtcttttctctgtatgcaatcttccttttatatttaataatagacattttcaatggcttaccggcccatcaggtcagggtcctcatttctccagtgccaagtgatgctgtgttatttttatttcttcaattatcaaacagtgaaatttcagaagcctagtaagcatagattaccaaaactacgagatgattgcttcatatatttgtgactctccagaaggcagtgggataaatttattgcccttcatgacttcagatagcttgcatctcatttcagtcttctaagaatagttttctgctagtgttttgtacgcgcattgaaagatacttttatttatcattacagttggaagaattatagagtttgataaatatttatgtgatgccactacattcacaatgtttcgttgaaaagaaaatgaaatgaaaattaaaatgggctgtagtctgtatttttcacttgccagtttttatgaaagcatgtcttatcgacagacagaatctacaaagagttgtgtgtaggattcagttcaatttatattaaattctgggcattggtatacaagttattgaatataataggactctcaaaattttcccattggatgttgtaggacttagtggctcctctgggccactctttgtgattaaattcacagattttcatttgcataacatagttaatattctagttggttttaaaaagcagtatactggtgagaataatactgagtaagataacagattgaatatgaaatgtcttgaactgaaagtgattaaaagttgaaagaattaaaataaaaggccaagcacagcagctcatgcctataatcctagctctttgggaggccaaggcaggaggattgcttgaktccaggagttcatgactagcctgggcaacaaagtaagatcccatctctaccaacaaaatataaaaataaaaaatttagctgggcatggtggcatgcacctgtggtcccagctacatgggaggctgaggtgggaggatcacttgtgcctaggaggttgagggtgcagtgagccatgtttgcatgattgcactccagcttgggtgacagagtgagaccctgtatgaaaaacaaacaaataaaaaatgaattaagataaaagtttgaggtacacacacataccctaaaagatatggcaaatggtaaaaaaacagactttgtagttaccttcaagatgtgtaaaacagagtttaaatcatttttatgattttttcttccacttgcttccttaaaagcctgcctctcttcctttcctccttcctttttcctttttcttgacctctacttcttccttctctcatttccacatttatcatgcacctgttctctgttgttatggagctttgcactgaagaggatgtatagatgatttttaattgcatatcmttcctttattatactgatctggaaaaaggatttagtacagttatgctcaaatgaacactgggcctgtgtggcagggccaagcaactagaatatgattcagaagtcagtcagtgaaagacacacttggacaggaccaagaggcatttcactgccttgaaacaaggtgggggagagattctaaaatacacagcaggaggcactcctacccctcataggtcaaggagcttatcccatattggtgtgaagaatggcttattttctgatgaccacatgtggggctatttcaactgccatgagaaaccccagaaaggttagtgttttggattatttatatacactatacttctataaaagtaaatgtaacacatacactaaagtcaggattgatctcaacctgctagagccagctctctggggtgagggaggaaggagttgtttgtcacatcaccatgcaggttgcattcatcttccactggagtgactagagctcccaggcaatggcctgactctgaaaagcacaggactggctctaggagcagatcggctctcttgcgtctccttattggtcatggcttagcatggttcctccccacaagtccttagtaaacaaagcactggcaaaaacccaagtcactacctttcgactctcttggacaaggagagctttttctcagcttggactgagaacctgtgccctagaagcattattctgactaggttgtaaagagagaggctacaggagacaaaatggctaaaatgaaaatgggagccactgatccccatctgcagttacaacttaagatgcttacagatgtggtcagtgtgacatgtccaggagggaggtgcacagggggatgtgacagacagggagggtgctcctggggacagtagcttgcccgccagccctcacttcttggccttaccctcggcagccgcagcttccatggctttaccgatcatcccccaagaactgcatgcgcctgatgggcttcaagtccttgtccaattcatagacaatgggaataaccagttgacaggttcagctccatgatagcctcttcagagaccttccacatgcttgacaatggttggaaggctgtttccatgggctgcaatcagtactcatttcccctccttgatctggggagctatttcttcattccaaaagagtagagctctggtggtagtgtccttcakatgctcacaggaaggtagctgatcttcagtgaggtctgcatacctgccatccttactgatgttgctgtagaaaggatggttgggcttcattagaggtggtgggacatcacaggtgcacctccagatctttacctgggcctcgccatgctttgcagcagtttctgctttattgactctggtcagacacccatagtgcccttattgaggtgtcaagtcctcattactggcagccacatctgatcaataacatctagcactgtccggacggtccagatcactctcttctgcactgaggtgaagcaggtgtcaaattcagagccagcgtctcccagtgcctgcctgtagcactttgccttctcgtggcctgctgggctcaggttggcattgtaccacccactgaagctgttctccaggttccacatgctctctctgtggtggatcagcaccagcttgtaggcagccatggtggctgtctgggcatgtggtgccaactggtacagatgattaaatgaagaactggtagtagaggctgggcatggtggtgcacacctgtaatcccagcactttgggaggccaaaacaggaagactgcttgagcccaggcattcaagatcgacctgggcaatatagtgagaccctctgtctaaaaataaataaattaattaaaaaataaataaaataaataaataaggtgggcatggtggcacactcacctgcagtcccagctagtggggcaggggagggctaacatgggaagttcacttaagcctgggaaattgaggcagcagtgagctatgatcatgccactacaatccagcttggatgacagagtgagaccttgcctccaaaaaaacaacaacaaaaaaaaactgatagtagagacagaaaagcatgtaatctaattgtacaccatgtggtacaacataaatgagtgtcttctactgatcattcatcatgttccctgtggccttaggcccatccttcggcattgtgggatgagttttacaaattccaattggagacataacagtatgaaggataactagagcactgaggtgagttgataatgctatctaagcaagggttaattgtcaaggaatgcctaatcccagaaatgaatcccagttttgtggggcttgaagttcatactattgcgaatgcctgctttgagaaaaagaataagttagaagaacaaaattgtgtttgtttagaacaaggaaaacaatcacagcaacttaaaagtttgaaagtcaacaaatatgacagataccacaaaactcagaagaataacatagtatttttttaaatgtctgacacacctctctaatgttttttttcttacatttttgggttgaaattttgcttgattgcctttccctaggataacaattttgtaatcattgccatagaaaataagaaagattatttaatttttctccagtgtggttgactgaaatttgtgttttttattattgagagtttagaaccatttctccaaagtcacaacttgttatttttaatgacatgccaatttttaacattgtgtaaaatttggaaaaacttctatcaagtttctttttcatataaacttttacagatactcttgctattaataatactgctgcaagtctgtgttccataaagaacaacaacaaaaaaactagtaatttctgtgtctgtgagttttgtcaacaaaagaaaaaacttacagtgcatttttaacttgtatgctgcatcatccaggagagaactttcattttgtctctgtatgcaagaaccacatcttctagtgacaagtttacatgtctaatcatttggtagttttccacagagtagcttctggctctgttcattttagcctaatttctcctccaaaactgctgtaattctagtgccacccacctcaggttatattcatayggtggtaccagtttttgtcttaattccatgctaaaatgctgggtgtctcagtgcaatggatagtgggagtggttttggaagccatttctacactggaatggctaacaacagtatgtttgtgtgtatacatatatatatatatacayacatacacatatatatatacacacatatacacatatatatacacacacacatatatatatacacatatatatatacacacatatatatatactgttgttagccattccagtatgtgtgtatgtgtatatatatgtatggaattgaagatgagtcatataaataatcccactaaatgaaaactaaatgtatcctcaacttaattctcttttagacagatctctatactggctgcaaccacttcacctaatgtgatgtaaaatgtaatcaaggggaaagagaatagaaattttgaactgatgcggttaaaatatattttgcaaaatttataaaaatgtaggacaatgtgaatcattgttaggatcctccctggggcttggaagtgttggctttaatagcttcatgttaaatctgcatctgcccagcattactggtaaatgaacatttttctgaaagaagtctttaatgttattgcaggaagtgtttgagctgggccaggccacaaagtctagtcctgattttaaggttgatgccaaagaaacctggttagaccaggttttaggttgtcacttctcttgtatrttactgaaccaacagacaaatgttgcaaaggacatagaccaastttgtatgtgagtggatctggctctttggtgtctctgtatcgctggaggaggtgccctggaaattctgtagccaaagcagcctttgaagaataagaaatctgcaaggtcttggtaggtcaaggcgggcagatcatgaggtcaaggcaggcagatcatgaggtcaagagatcgagaccatcctggtcaacatggtgaaacccatctgtactaaaaatacaaaaattagctaggtatggtagcacacgcctgtagtcccagctactcgggaggctgaggcaggagaatcgcttgaacctgggagacaaaggtttcagtgagccgagattgcgccactgcactccagcctggtgacagagcaaaactctgtctcaaaacaaaaaacaaacaaaaaaaactgcaagttcaataagtatggagctttggtctcactgctttttcggagcagttggctgttgaaagaattgcattttttcttgggcctactccttctcataaaatatctttgggaaatcacgagtaacaatataccagtatccaggaagcacactaaaagggcttttgagagctgcgctaataactgtcccagagttctttcactcagactcattctccatattctaaaagtgtaacttgagggatttccctaaattataagaagtttcaattaatcataatatgcacattattgttgtaatttactataaataatctaacttataatctctatattagtagcgtatcttagaatccataatttccatccctgtgggccattggtttggtgggatgtttctgatttcattgactaaaccctagataaagcaccatgattcttaaaaagaaacattattttgaggttggctttgaaaggaaattctttactcggtctatccaagtatgagatccgaggttgtgaatggggctgtgaagatggaaagtaaggttagtctccttcatgcgtgttggtcctctgtcctcatacgtatcacacatctctccccgatactgggtagagttaggtatttctttcttacaccttgaggatacttctaatagaatatttggttaataaaggaataatgattaaactgaattagccttgaaataaaaacagttattaaatattggataaccattttatacaatactgctttagatgctaaaatatcacatgtactctttctttcatctgactgctaatttatcctacactgatatttatcctagaaggtaaaccatcagaaatggagtgagtttgagtttggtttatggtcactaaattcttgtgtttcacaactgagatactgtaggtgctcaagggtgattatgctaactcaaaattctgtattctgtaggaatacagcatgactcaaacatagataatgatactttagctcatttagaacttcataatttggtaaaatatgttcaagaaccaggatgtaagcaataatggctattgggagctttctacagagtttgcactaatatacattaactctgtggttttcattcagtccctacttactttcactttgcacacaattctaataagatggatttcctgatatgtaatcctatagcattttagaaattgcgaagtggagatattgcaaaagatggtcatacttacagcagtgggaaataaccccgtaaatcaggcagcaggagaaagagttcactaactctcattgtgtgtttttctgtgccaggtgttaaataagtattgacatattttcttttcataaggattctatggggtatgtactctgattatccacatattatggatgagaaacaaaagcttgattttaaatttcttgtccaaggtttcacagcttgtggtggagctgagatttgaatgaggtaggtcagaactagaatctgaaggcttaatcttgggacttcagacattttcaggataaacagccctaagtacctccttaggggctgtaagcccaggccaggtagtggcttatgcctataatcccagcactttgggaagcgaggcgggtggatcacttgagtccaggagtttgagaccagccttgccaacatggtgaaacaccatctctactaaaaaatacaaaaatcagccgagtgtggtggcgcacacctgtaatcccaactactcaggagactgaggcaggaaaattgcttgaaccctggaggtggaggttgcagtaagcagagatcgtgccactgtgctccagcttggacaacagagcaggactctgtacacccctccctgccccgcaaatggaggctttaagcccaaagagctctcatcacttcattcattcccatgcagcataatagctaggtgatgattgtaatgaagttgggatcattgtcaaggcccaggttccctagaaaacagaacctaaaggaaaagttacagtacatgctaatgttttactaatcacaggggagcaagagtgaggaaaaagaagtcatatgggatgaaatggagaccacatataaattcgtgtgtttttaagttggtcacagcttcacaacaatactcagcctgttttcagttgctctgcctgtctccagagagggcactgagaaccactctattttggaccatttacctggagttggaaggaagggtaagcagtttctctgctgcctcctgcccatttctggccttttattggtcaaatctgccacatagaccattaagtcacaaaacttctgggaagtactagtgggaagctagtacttctgtgggtaccatctggtcagtgttcacattactatctgtcttttatcaatgagtactggattggggggcttccttattctgtggtaggaacagagagttcttatcagggagtagggtgaacagtcgatgtttaggtgtctgtggtacaggttggcctgagcagrtctcggtgttgcacaaactggacctggaaagagaattgtaatgcactttggaaagattttttaaatcaaaaatagaaaattaaaaaaacaaaacaaagcccataaaattatgatgaccatctgacaggctgctcaactacttggaaaactgaagtgtgcaaaatgacacatttcccaagggttctggtttatcaaggttttgtgatccctctgtctctggaacctggactgcttagaactacaaagaggaaaagtagcagcactttgcrttctttgattgacatgggcaaacaatttttttttttctgagacggaatctcactctgtcacccaggctggtgtgcagtggcgcgatctcggctcactgcaagctctgcctcccgggttcatgccattctcctgcctcagcctcctgagaagctgggactacaggcgcctgccaccacgcccggctaattttttgtatttttagtagagatgggatttcatcgtgttagccaggatggtctggatctcctgaccttgtgatccgcctgcctcagcctcccgaagtgctgggattacaggcatgagccaccgtgcccggccagcaaacgattttttaaaaattacccatcctttcttgcaagtatccgaagtcagagtgctattttatggaatgtacgtgtatgaattcatgagctggaaattgggagggaagtagaggggctgaagtgaaggagtttgggaatttaatctgctggacttatttttccatcgtccttcctagtcacaatcatctttacttcctctaccttctcctcttccttagcaccatcaccactatcgtctagtacttactgagagcatgctatctgctagatactctgtaagttgtttaatgtacttgagctcattcatgcctcacattaaacttatgaggtaggtactcttactgctccagatttgtgggcatgggaactgaaatttagagaaatgaaataatttgcccaagtccacagaactactaacagagccaaggctataactcagcctcgtcaaaatccatggttctatctcttgtcccgaccacatactcctcttggagtaggtatgtttggatctttttgtgcacatttttgtgtctaccttgtgcattctattttctcatgtgcctttgttgttaggagcttaaagggaatatctgtaatattcatgtattcattacaatatgtattatatattatgcaatatatagtatatactgttataatgaacgcgtgatgaactcctacagtattctaggcactgagttaaaagagtgatccaaacaggcaaaaatctttatcctcgtaacattctgtattaggcagggtttccagagagacagaaccagtggagatatgtatgcacacacacacacacacacacacacacacacacacacacacacacacacagagacatagatagatatggatatagatgtatgagaggagattaattagggggattggctcatgtgataatggaggctaagttctatgagagtccatctgtaagctggagaaggagggatgccggtagcatgggtcaattcaagttcaaaagcctcaaaaccaggggagactatggtataactctcagtctgtggccaaaggactctcagacagagagagggagagagagagagagagagagagagagagagagagaatttgctttccttctgcctttttgttctatctgggtccctctctaggtgtatggtgcccacccacattggatgaagattaatcttccttacttagcccactgactcaaatgtcagtctcttccgaaacaccctcactaacatacccagaaataatgctttttcacctatctgggtatctcttaatccagtcaagttagcacctaaaattaagcattgtatattctagtggggatgttgcacttaaaacggtctaacatatcacacatkatgcatgttttccttgattattatcaagygctaagcagaaaaataatgcaattgaaggatcaataaattgtacaggtggtggtgggttccaagaaggcctcactagggagagacaacctctggataaagtcctgaaggaattttagttttgttacctggtattttaacttgcaggaaggcaagaaagatggagaataagtttgactgatttgccacaaactctgataactactctttgtgatttaaaaacccactatgaactgtaggaagaatgtaatttgaagtacacaattataaatgcagatttgttaagcatagaagtagcctgtttaaaactatttaagagtgaatcaaaagtcgtggtgtaaatggaccccatctcaaacttcccttcactccatcatgcctgtaccataagaggaaaaacactacctccaccctttactgttgttaattgtatgcatatatcccatcttccttctgaaattccatttttctgaatactgtcttacagcagtttttttttttaattgtacaatgtaacatccttaaacatgacttaaaattgaactgaagagctgctgtgtcaggcatgttgtctgaattgctggacatggagctatctccctggtttagaggaattccattctagttgggagcataaaacattcacgcagagaaagtggtagtatgctgacctgtttrataaaacatgcgcacacacacacacaccatacctaaattagtaatygtcaaataattagagtaatttaatatatatcctgttaaacttattatataatkggatttttctgagacagggtcaccctgtctctgtctcccaagatgcaggctggagtgcagttgtggggtcatagcttacagcagcctccaactcctgggctcaagtgatcctcccacctcagtctcccaaggagctgggactacagatgcatgccaccaccctcaactaatttatttttatttttatctttgtagagatagggtcttgccatgtttcccaggctggtcgtgaactcctaggctcaagctctcctcctgccttggactcccaaatagctgagattacaagtgtcagccaccacacccagtctagaattggattttgtaaaaagtgtttaaggattctttggaggcttgagctcatgcccatggttgacatttgaggaagatgagacttattttcccttagccccagggatagtcagtggcacaactgacccttgaacccaggacttgtaaacatgggtactattttgttcaaggctgtcttgataatttagcaggtgcatttgaggtcttaggttttcatttttagctgtatttattactgagacatggagttactgacatggctgtaagtaagcatcaccttttattagatgccgatgccagagttgactttgtttgcactttatacttatattgtgagatgtttggtgaccatcctttatggtattttacaacttagtagttcacattttgttgtttactgacctaaaaaaaatcatagctaacatctgaagcaaagatgaaagcacattttcttttatcacacatctctgcttttactcacagaactctttaaattaggtcattaacatatgcaaacacttcttttcccaaagtgtttttctactctgcaattattatgttgtttttggtaagataaataagccctacattaaaacgccagatattaaaatgagaaacagtagcactttataaaatattagaaagctttgaaaaacacaaataaatagaaagcatccccttgtggcttcaggtagtgcatgttaaagagtttgtmcccctgtactctgtcttcctgtgggctgagtactgggatgtggcaaagtctcccctggaattgactggcagaccactttgctgggggtggatggggaaagagaggcttctgcattcttttgtcctgatcaaaccaaagcagtttctccagctgtgaggtcaagtttctagccttttagtaaaattaaattgtttgctttgtctgatatcagttctggtttcagacagagggaaataacagtgggaaagcagcctgtgtggggaacgcaagcaaatgtgctgtgggctctcagacgaatagtgaatcattctggggatctcacatgctcacttaacatgcagagcttggtaaccagcttaagatagatgacctgtcactttcaagaacatgtcaactgtttgttgcaggggaatatttcctagtcggttcatgggattcttaataaagatgttggaaccagcagtcctgctgtgtttcagcttctaaccagaagctgaataaaggtcagaagggttactgcccctctcaaatggatcccagaatccctcactttggatagtggttgtggttttatctgctttggtgtttgttgttattattttctgtcttcttagtgcttctgagttgctcagatttggcaaattttgaatagacatatatatgaaccccaaataattgtactgagaaatgcagaaaatattgagcaagacgctgctgaatttccatgagtaagcaaatatattctaagagctcacaggtgaaaatttctttttatttaatatgtcatttttattggaaggtaatgattatgtccaggccataaatacagtgtaaattctcttcaatagacatkaaaaagatgactttcaattggaagcagctttttaaagrgcttaaaggatactgaggtataaattttcagacctgtacagtctgtacgtgtaagactaggaagaaatgagtgaaacccaatacaggctcatgcatgggaacacatgtttatgaccataagctgtagtttcacaaaacatgttgaagaaggacatataatggacgtataatggctaagagttttaaatgtattgttgtgtgtgttagtttatagttataataaaaatatccaatgggttatcagccctatcatcatttttcaaatgaggatactgagrtgtgggataatttcttaaaaatagagctgtgcttcacaaatacccaggaaataaacacttgttcagtcactaagttctgactccatgttgtgtattttgtctgtattaagattctgttcagctgcccagataaaaagtgataaaagttttctagctgatattcctactataagatatcttactgtctgtttccaactagctctgaagggtcagctagttttattagaattattgagcatgcccaggatgtggttgtataggctcagcttaaatttacatcaattggcaatactttctcttggttcaggatcagctgtatattcctctcattccttatttctgcctgattgtaggctccttgaaggcaggatttatttctgatgcactattgggtcctgtgtctggctcagtcagaacctggcatatgatcactgctcagtaggtatttttggaaggaaaggaaaagaaagaagggctagctatgtagatgcaacagcagctcagtgtctatctctgattcctttccaaaggttaaattagatgaggaagacaygttttctgggcatcagctttacctccgagtacatgggggatctgttccagtatctttgttcttttgtggttcaaagctttgaataatgtatgttttgatgaacaaaatggacactgtggctctatgaagaacttaactacaaatactgcagtttgtgtcatttttttcagccatttaaggtggtgtcaaaaattacagtagcttacattttaaaaaatatttgacttttaaataatgttcactgtgtcattgaccctaggaaggattttagcttacatttatggcttcttactgctactgcaatagagccaacaaccacagatctgcccatcactttcttataaatgtggttatttcagatttccagtgtgttctggtcacctggcttgctcttctcttaaaatgtgtttaatgctctcttggccagtggttaggctcatacttcttatatttctattatccaggagactttatcatcgagatagttataatctttcttctatttttcattaaggtcttataagcctattattggtgctgaagctcaccaagacctccatacccttgcctctcttcagcaggtgctatctcttataccccagttggaaatgtaggttcatttcagacagcagttttcacataaggcattatatactattttaactatatcaagggccttgattttcaccatcctcttaaagatttttaaaaatatcttcattctgaagtctccgaatttttattttatatgcattgacttcttctgttatttccttgcaaaaatactttggtgtttgtcttagtccattgggattgctataacagaataccataagctgagcagcttataaataacagaaatgtatttctcacattactagaggcttggaagtctaagtgcaaggagccgacagattcagtgtctggtgaggacctgctttctggttcatggatggtgctttctggttatgtttttacatggtggaagggatgaagcatttttctcaggttgcttttataagggcactaatcccattactgaggactgctgccctgtgatctaatcactttccaaaggccctacttcctaatattatcaccttgggggttacgaattcaacataggaaatttgggtgcacaaaacgttcagacaatagcagtgtttttcccatttagatctttggccttgtcatcataccccctgccactcctctctccatatgctttctgtaagaaacacttttccaacctctttaaaaatattctgttttcctccttcagcttggaaaaccaagttttaagcttgttccacaagtgattttgtgctttataataagtgagttattttacatatagcacaaagcacattgcctagattcttatatatttatttcacttttctcgatccaaaatacattcataaatttgaaccacaaaagcattaaagtgtcaaacatttctgtatttgccaagccatagctttgtttctcttctggaaggtagcagaagttacttttgatggagttatcttttttgactggaccaggaaaaaggcccccatgatgatgagcaggaaagcatcttttctatctataccaggcagttctaaggtaagccagaccaaagcagatgattctgtccctgcctccaccaaaatcactgttggattgtagatgagaaracaaaatgacttaaaccttggactgggacaattcattttctgacagctggaggctcttatgaacaagtgagaccaatatttgtgggttatcttggatttggcgtactcatctcttcacagtcaggagcrgtcttcagagatgtgatcaaaaacatcattaagtactagggtgaaaaatccatctttttacatttgggtttgaactttatgtttgtcactgtttcagaattgctgaaattactagaacagggtctttggagtggaagaattttggtttcttcattctatccaaataagtacagaagaaggtcaacaaggaatcaggccatagtctggaagactgatatcccagagtggctgtgaggtagatgaggtaaaaaatcaacctaaagggactggttaggttctgagctggaagaatgtttggaggaagtaaccgtgagagacaggatggatagttctcttgcttgatgatgtcgttgagtcagaatgccatcatgcaaactgattcgtgtgtgtgtgtgtgtgtgtgtgtgtgtgtgtgtgtgttcaatgaaggataattgatgttacgttttataacagggattttgtgtgaggaaggttaaatttgaaaacgaatgcgaatgtactcaccacatgactgagtgtctcccaccttcaagattcccatttgcagttgacctttgacattccttgtgcctcttgctaatgcttggagtgaacactttggacctcgtatgtgaaattccacttgctctgtggttctcagtgctttgtggtctttaatcagttctgtatgcctgccctgtcttcctcttccaagacaacaagacttggctgtcagcttgatctgtccattgtagtttatacagatgtttcttttgtttttgtttgaacgccctcaaagaaaccatgttgactgtgctccatcacatgaggcggtgcccatgtgtccttcatagtaacactgtgaggcataattatccacacttcagagataatacacagccaacacaatttagcttgctttatagagctgaggcaaatcatttcccctcaccctcaggccagctctctagtgagagattacctcttggtgacacttcagtctttggtttagcagctagaattcttttatagtttgggaaggatatgggatcacatttctatgagtgggtgctggaatatagactcccatttttcacccttataccctcagttaacttctctatgtgagtgagcttctgatgggataaagtctttggagaaaccttagaattctggttttgtttttgttctattaaggtcaaactcacatagtataaaattccccattttaaagtgtacctttcagtggcatttattacattcacagtgttgtacaactactacctctatttagttccaaaacattttcatcaccctaccatcacccatacccattaaactatcactcctcattctgcctcccctcattccctggcaatgaccagtctgtttcctctcttttgtttttgtttttataagaatagattatagccatattaagaatgagatgcaacttgactcatttatccaatgactcatttatccagatgttaaaagagaaagtaagaacttaggcactggaacttcttttatattcttatatatctaggagttgggccaggtgcagtggctcacgcctgtaatcccagcgtttagggaggccgaggcaggtggatcacttgaggtcggtcaggagtttgagtctagcctagccaacatggtgaaaccctgtctctcctaaaatacaaaaattagctgggtatggtggcatatacctgtactcctagctacttgggaggctgaggcatgagaattgctcgaacatgggaggcggaggttgcaatgagccaagatcacgccattgcactctagcctgggtgacaagagtgaaatcttttttcaccacttttttttcaccactccttccatgtggtgggtgcattcacatttgttttcaaatttagcctgttgtaaaacgtaacattaattatccttccttccgaaacacctttgatctgacttttaagaaataaatagatatatttttgtttaagcaggtatataggtagttaaaatataattattcaattaactttttcattttaaaatttgggattttttggtgaattatattaacagtccaggaaaaatgaaaaaattattaattactatcctattttaagtacttcctttttttcttaaagggaaatatttttgaaatgttgattgaatatttatgagacgatgagtgtaccaggtgttaaaaagaaaatgaaggaaatatgagatgtctttttctcaaacattggtgggtagtttttgtcctttcagcaggatttttgcttcaagagtttttgttggttcttcattgctgcattaaagttactttcagagggctaaatctcataaaatgccaggatatcaaggagaaaattgaactctggctcaaatcaattgcatattatgttaggagagagagacctcatgaaaatgcttcatgttaaggggcaggagctggattttcctttgattccggattttaatatcaactgtcagtatttaatagtaaaaagacatggcttcacatgtatttttaatttcctcaaatttgaaagttgcgtgagtcttaaactggcccttagaagtggatttcagaattggtgtttaaaatataaaattcacagaaactcctagtggggggtcagctggagtgtcattttcaggaataagcaatatctatattgttttttgttcaatattttgtacagttttcatttggtaaatctggttgttattaaagtgacaaagctaatggaatcacctgctgaggcgctgtctcccaggaaggcacctctaacaaaacctttcctttcctgacgggagatcattatgagatcctgcctcgtaagagggacccctaaaggtagatctggaacattcctccatcctacctgagtgtcacttggctttaatccttctgccaccatctagatacccatcagcctccagcttggattcctttcaaaagatacttagaaaaaaaagaaacaactttcaggttttgctaatcttgagatatctacagttctatgactttttccatgtgtgtatagagaaggatgtgattgtgttccagttcaatctrtcttaaagagtggtccgcatggagtcagcaggtatgggtaggccaggcttctgcctttttaaaatttttattttcttcaaattttattttaagttcatgggtacatgtgtgggatgtgcaggtttgttacataggtaaatgtgtgccatggtggtttgctgcacagatcattccatgacctaagtattaagctcagcatccattcgctattcttcccgatgctctccctacccccagcccctgcctacaagcctcagtgtgtgtcgttccccaccatgtgtccatgtgttctcattgttcacctcctgcttataagtgagaatatgcagtgtttggttttttgttcctgcattagtttgctaaggataatggcttctaactccattgatgtccctgcacaggacatgatctcgttccattttatggctgcatgggattccatggtatatatgtaccacattttctttatccagtctgtcactgatggacgtttaggttgaatctatgtccttgctattgtgaatactgctgcaatgaacatacatgtgtgtgtatctttataatagaatgaattatactcctttgggtatatacccagtaatgggactgctgggtcaggcaccagcattccagatgattctaatgtaggtgatgtgcagaccacagtttaagaaccactgttctagcccctgaaatcattttgggcctgattttgtcccacagtgtatttgttttccctcccagttttgaagcatgtgaacatttggctagaaggccatgacctaatcccagccattaggaaaaatgttgatggatacaagagtgaatcagagccctgaggcaagccactggagacttctctccaagttgacactctgccttatgaatactgaaattcaatccgttttaaacccctttctttggcttgtcatttggcccacatttttcctgtcttatcctccaggatctcatgagagattttgtcaaatgccttgctgacatccagatatgccagatttgcagaattaccctgatgtaccagttcagcaaacacatttcattttttttaaaaggaaagaattaaaaagagtgagagagagagaaaggaaaataaaatttaaaaaggaaaagaaaaatgagatttaatttggtgtgatattccttttcctgctaatccaaagatataaatttgaacccacaatttttttttkggttatttcatctggaatcctgagattataggatatatttcacagtagtctctaaagctcarcaaagaaatccatgtggattttccagggaggtttcccctccccaaaggaacatgtgcagacttaagtgtggtaagtcattaatactagcctccttctttgtgtgatgggaagcgggtggtcattcaccctcaagcagtgattttttttgggagcagtgcagagaggggcatttccctgtataaatctgaaggcttcaaagtggtcacttcataccatctcattttgagtcagaccaccctcactactgctaagaagccttaataagtgtgtctgttcttcttgtgtattggagaggaaacaggtagagagttgttaccctaaagagaagggaaaattctttgagcacatttgaatgacaaaattatatttctcatcgagtttctttttagaaaaagggaagaaaatagatgtgtcttggaattctgtccatgagaccacagaaaagaactttgactcataacttctttaagcaaattcctcccccagccctttgccccatgatgtgttgattcattgtgaaaatctaaagcaaaccaaatttcagcacatacagaagccagagtagtcagcatcagggagatcatgcactgctatcatccctggaagactgatgtttcaaaggctcagctaatgtgcttcctgatgtacgggttaaaaaagtgggagaagcaaattaattacattcaaaaggaatttaaaggagactaatcagtgcagtggaagagaccaggagctgtttacagatgtgccaagatgtagagaaatcagtattggctttgtctggaagaaggagtggggctcctcttctctagctaattaaagcaagcttatctgtaaatttagttattcataaagcttgcttccacggagctgctgtttttctaataggatgggaaggctgggtttctgtaaatgtgggtcagtcatgtgattaagtgacccagatttccgcagacaaccaaaagaaagagcagagagaggatgtgccagctcctgactgcacagcacagcatgggcacacctaatgcctcctccctatgctaaaggcagagattgaatgtgaatgttttcacttgaaaattgcatcatagtattactcctataagaaagcagcaccaagcatcagctctttctatttcttttcaattacttctctttctacagtcaggaagagaccttttaagcatttaaattacggtacatctttaaatgctgtagctatgtttgagttatctggcatcccaggaaatgggctggtgtttccaagtgtccgtaggtagagagtctagaagtggactcatgctgattttatttcatttttgagacagagtcttattttattttatttatttttgagacagaatcttgctctgttgcccaggctggggtgcagtgtcacaatcttggctcactgcagtctctgcctcctgggttctagcgattctcgtgcctcagcctcccaagtagctgggattacaggcgtgtaccaccacacccagctaatttttatattttcagaagagatggagttttgccatgtttgccaggctggtcttgaactcctggcctsaggtgatccacctgcctcggcctaccaaagtgctgggattatagacatcagccactgcgcttggctacctcttgctgattttagacacctcatctcatcagcattttcttatctgtttttacattttcattataatgtagcaactattttcattgcatggtcagccagttttttacctcttataaattatattcaagattacatggtttactggaggaaaagtagaaaacatgaatatgcaaaacacaaaagaaaataaaattggtcaggtgcagtggctcagcctgtaatcccagcactttgagaggccaaggtgggcggatcacttgagtccaggagttcaagaccagcctgggcaacgcggtgacaccccttctctactaaaaatacaaaaccattagctaggcatggtggtatgtgcctgtagtcccagctactcaggaagctgaggtggaaggatcgcttgagcctgggaatttgaggctgcagtgagtgccactgcactccagcctatgctggaaagaaagaaagaaargaaagaagttaaaagtgagaaaataaactcatcctttctaccaccactcagaaataaccattcttattattttgggtcaacaaccaagaggcagttttgttatctagcttgaaatcacagctctgtcactgttcagctatgggatttgggcaaattacttgatctctttgtatttcagttgccttgctgataaaatatggacacctacctcaagaaaatgcctaggaacatatacaagacttcaaacatagtgaacattcaataaacgattgttgaaaaagacattgaatgaatgcatacatgaaacgtttcccatgtagtataaagttgttcatgtatctggtccctagttcattgcctactgcaatcataaaagcataaaggaacttcacccagtgcgtgagcaataagtacattataaatgttagttattattattgcctgacacatcattaatattcattagatagttgttgaatgaatggatgtcagtcactgcccttgggtagtttaaacttgagagaagacaagagaagattcatgaaacaataaatacgtggtgagccatttggtactcagtttgaggggagagctccccaggggctgttttatttggggatttccttggaatgttcagctgattaaactgctcccattacagcttgagtgacactgggtaacagatctgggaccggatcctacatcatcccaccacgtaagtggactatatcatgccttcattcattcatcttttcccattccttttcaacaatgcttactgagtggcaggagctgtgtgggattctagacagccaaagacgtttgctgttgccaccgtcttgttaggagatctgtggctcagaggggattcataatgtactgtgataaatgctatgagccagcaatgcccaaggattatgggagctagtgtgtgtgtgtgtgtgtgtgtgtgtgtaacagagggaaggaacgtcagagcgtcctttccacaaggaggtccagttggaaccaggtccaaatagagaaataggtattattctaaaccaggaacacaagagtagcatttgcaaagattaggcagagtgagagaactgggaggtgcatacagcatggctagagctctgagctgcagagaggcacgaaggttctttcttttagtggtgagtgggagtggttacattaaatggttttaaagctgggagtgacaagatcaaatctgcattttggaaaactagccaaaatctgtgtgtgttgcagggtgaaggaaaaggtggtgggatagactggggccaggaacactagttgttggaaaccagaaagaagggactgaagtaagggtaggggagaagggatgaattgaagcacccaactcaagatattagggagggacagttcacagaatttgttaaccagtggttgtgtctgtgtctgtgtggctggatgtaggggtaagtgactaagaaggaattaatgatgcttctcaagtttctggcttgttgtggtgtgcatggaatggtgagaccttttatctagattaaaaatataggagacagagaaaggttaaggcgagaagatcctgtataagtggattttgatgagccattgacacatcaggcagagcttctgaatgggagtggtgctgaggaggaacagcagtggaggagaagctgggaagcatggatttcttcatgcagatcatctcctacttgggtcaatagatagctcttgattttaagtagcttcaggagctaagttctatcttcttagagtaattgtcctgtcaatactgaaccatggtatactgtccttgttctaaatacagtacaaagatcttttctggcacagggacttaatctgagctactaatttccattttggggctttttgccaggctatttgaggcagcatttagaagcagaraaaagtagattagcactgactatcattttttatgtttagactccaagctgataaagcaatgacatttttattatttcagcatggttttgtggatgtgtcacaattatttatatagtttttttttaggtaaaggaaattaaattatttgaggaactgtgccctcaccttgtggctgaatctatctggtgctgctcttccttctyctttccctcactcccttacatggtcaggtcattttaaatatgtccagtcttcagaggagakgcctcctgatctcccaactatcactgaggggtggaaggtagtgcttattcctcatttgtttgatagtgctcaacaccttgggttaagatctttcctggaagagaaatggtagggaagcaatatgcaaaagatgaagacatggctataatttaattcttaattgttctaaagtgacgtatttcagacatagcaggataaagacttgggtacatgtttcaacagaatttatttaggatttaatattttataccagatgttaggatttccttgtggagggataagggattgcatgtatataagcaacagggcctggtagttctgacctgaagaagcttattcatttcctggggaagatggattttcaaagaaatatatgcaaatcaatgagaaaagtactataataaaagaatatccaaaatagtatggagattcagagcataactgcctggaaaatgctaagaaattctttacagaagaatgcttcgtgggaagtctataggcttgtctgtcttgtttggaccagatggcagacttgttgaaggtcatgtccctttccctgaactggactttctttccattttatctgtgctgcttcaaatgcatttgttgcttggctttctatggcagtttcttaggcataagtctttttcctatactctcctggaacatcttcagggcaagacccctgtttgttcagctctccatcccctgccatacccagtaggtgccatagcaacacatgaaatcttacattttrttctcagaacagcactgtaacattgatgttattattagcaccatttttaaaggtaagaaaactaacacacagagcattgaaaacttttctcaaggtgtctcagtcagtttgggctgctttaacaaaatgccatagactgggtggcttaaacaacagaaaatggatttctcacagttctggaaactaggaagtctaagaccagctcgtagatgagtttcttgggaacctggcttttgcccataacggacctaacaatggtgactactgttttctgtcctgatgtcaggctaagtattcataaacaccttgacttgatgtttacaacttcataaggtagattatttgtattcttgtttaaaggtaagaaaataagttggcaaatttacaagtatggaggaaaaggcgtacatgcaaggaaagttaaacaaaaatagatttaaatggtaaagactaatgatattagaatatcttaaggcagaacggacctagttgccagatgcctggtacttaacaataactaccatttattgtgttgtatggatgtggcttatttttggtgaagcactttacaataatcttcacagtagcagttagaagtgaggaaaatggacttttccttttactgataataaaatagaggcacagagaaggtaattgccgatgatcacatgagtgtcagggtacgtgtcaggtctgtttccactatttattcccttaaatactatggaattagagcaacgtaacacactgagatgttaaacttggagtttttcttttttaccccgtcttatgtatggtctctgtctaatcaaccagtgtcttcacattaccttgtggaaaatcaggggcattttaggcaggagcagagtaggtgggaggcacgtctgtagaaaagcagtggaagcaaaagaaaaaagcctgttttttttttaaactttcaaaatagactcttgaagtccacatcaaaaatgacagttttaaaagcaaagttttkgatcttaagagctaagttttgttgagagaagaaagggctcctgaaataaaaaataaagttcttgtaaagtcaggaatagagtttatgccataatagattaggaaaaagactaaaggaagatctaaaagctttcctccctatataatcctcccaagactaggatccttaggctggtagaaaaggagagttaggtaggacttgagtagggagcagtctcttgggctgctgtgatgggactgggcctgggctaacccacagggagagaagcaaagcaagtatggagagtttgtccagcactagccatgaccatctcagggcacccagcctaaacctattctccttcacttttgaaatgaacatctgaagtcactggggtcaaggagccatagtggttgctcaccatcacttaccatgccttccgaggatggatgtctgcctgctgctaatggattgaccactagaatccatagtcctcccagtgccccaagattgtgctgagctttgacgtgaaccactaagtttgggcattctcctttttctataaggagaatgaggaacaggattgccctgcaaggaaaaccagttcttgtctgagtgagaatgactattcaaaaggagaagtgaagaatactctaatatggcctcctggagcaggaatgaccaaaacaggacctccaggaatgggtagaagctgggaggactgagggtgagaggagcctgagaggtctgggagcagggtgagcaaaaatgtagtcctggagaagcacagttagagttgaacaagtgcttcttcaatcttgtggttctggattggggccacattctggcaaaagagcctttgaatggcagattagggtttagacatcagcttgtgtgcagggggaagccatcaaagctgtcttttgtttgcctgttgatttgtgtgacttgataaaatyctctactgagcatttctcatagtacccacttaatttttaaaaacaactccagagcagttaacaactccaagtagcctaaggctgtgtaactgagaagaggtagaagtcagcagatttgattttatatccatgtgagacaaaattgtgtgcttgttcaaacctttcactctgtcttctgttccctccccgatgtttgataatgccagagcccagagtggacagactctaagtggtatctaggggacagaccgtcgaagacccagatgtgttcctgcaaccttgccaataagtataagtccctgacagccccacctccccaagtgtttctagcttgtttattcccaggttaggtgtccccttgttctcctaatttctacctctctgggaagcaaaatgagtgtcaatcacccctaagccttggccccaatgctgcaggcaaatagttctttatctcaacctcttagttcctaggtctgtactttacacaggatcagtgtgtgtaatcttttgttcttttgtcttcacagtaacttaattcctgtggtaagggaggatcatgtgtattcttaagtgtgggtccttattatttgtatgtagtttgcatctgtattctgtcagctcattagtttgtccacttttcattcagttaatgacaaatgtggagtatgcaaatgtttgacattcaaaacagacagctctgcagttctgtgcttttagatcatttactcatttcttcttagagatttatctaaattagcatgacagtggccgtgtttcctcatagttgtacgtgtcctttatggagttatatttggcaccccagaattaggaatgagatcgttaacatcaacaattcattgagataaacaggaccagtgtccttgtgctcttttcatagatgaggaatccacaatacccaagaggtgcactactgtctggtgaggtggtggtgatggctcagaatgctcacttgtgttcattcctttggcattcagctttacactcagggtagaagcagctatgatttctcccataagaacagccaggtctgtgctggtttatcacatgcagttctgtgcttttaggtcatttactcattggccagttcatgtctctggggagacatgcacgcacgcacacacgttatattccagccaaatcgaaccatgcttattttccagaatgttccatacattttcctacctctaagtatctgcagacattgttgttcttgttactagtattacaaaataataataatgataaaaatagctatcaattattgagtgctaatatcttaactcacattttcttatttagtgttactattttcatgtttaagagatgaagaaatamggtttggggcatttggtgagccaggacgtatttctgtctcactctaaagctgctccctctgcctcagcgctgctttcttcctggtcacctggctgaccgcaatttatccttgggactcagggtatctgtctcttgctctctacccctccccmcaaatccccaatctatactaaatgctgctcccttgaagtgtctacaccaccctatactgtaatgtagcacattgcacactgcactacattggatagcttatctggctaactcctttactacagaaagggaccaccacatctgtctggtttcctgttgtatctccaggctgagtagtgctagactgtcattgctcaataaaggtgaaataagtggctgaaaatgacttggcaattgtggaaggagaaagctccccagaacccttcagctatatagagattgttgctcttgaagcccctcctctcctagcccatagcaggtgatcagcaaatatttgttgattgactgaatgaatctgatgaagaggagtctgagcaattagtgacagggagctttgggaatctggcagtgcctcagttgcgggttggaggagtaggaggaactaggggcagtgggacgggtatgggtgtgagtgtctgatcccatctctgagttgctaacaggccatcttttatttggtttttgtgagtttctgttttctaagtggaacctaaatgtcagttatgtaggcaaagaacaaaataattctctagctgctatttcttttccagctggctttatacctaccattagagasagatgaaagagacctatggaaggcagatcttacctggttttacatgcacatgtgtacctgtgtgtgtgtgcctgagtgtgtgtatgcacacacactcatgtgtgtctctctggggactggggagaggttctgttttgccaccagcctctctttgaaaggcattgctgtcatcacagtgaaacatgtggcatcaaagcagcagcagcaattatgccaccatttggatgtctgtgctatggcagcatctgttgatgctttgagactcttctgccaggatttcgccgccaaaccatctgaaccatatgttctcatcagcaggaataccagcatcccaagtctttcaggggtgaggcatcatagatcaatgaccgacatctcgatctggataagcacagcttgtgtttggcttagatagcggaggggaggggatgggatgttttgcaattttgatttttgaaacaaaggtattaaaaataatgtggaatttacttatgatccacaataattggcagtgtaattaatggattaattaattacgagtgcagtatttttccaagacctaatcyactggctcgttagtgagaagaatcattaagcagaatagcatgaagggcttcactcagaagcagttgtttttgtaagtggcactagagtttctttaacttctggtcagggagggtctcactttctgttgacactaacatggggattttatatgctactgacttgttatgttgtaatatctcaagaattgctcttgattgctttctaattgttacagatgtacgtgttctattatctatccctctttytcctaaagaagagagatgcttgtcaagggtggggactgcatctcctattcctttccactcctagaaacccaccacagcactggacatgtaggaggtgctcagtaattcactcaaggaaagaataacattggcaagtaagacttatttaggaggcactatagtgtggttaagtcactgatagattataaaaattaaaactttttaggtctggcagcggctcacacctgtaatctcagtactttgggaggccaatgcaggcagatcgcttgagcccagcagttagagaccagcctgggcaacatggcaaaaccctgtctctatraaaagtacaaaaacaattagctgagggtggtggcatgcacctgtaggtggaaggattgctcaagcctgggaattggaggctgcagagagccgagattgtgccactgtgctccagcctatgctggaaagaaagaaagaaaagaaaaaaaattaaaagtgggaatataaactcaccctttccaccaccagttagaaataaccattcttattattttggggcaacaagcaagaggcagttttgctacctaacgtgaaatcacagctctgtcactgctcagctgtgggatttgggcaaattccttgatctattggtatctcagtttcctgagatacaaaaaaagaaaaaaaaaactttatcaaaaaactctgtatcttatttatatatataacaaaaatttaaaggaaaaaaactctcattttaaaattgaatctacagtctttccattttcttggacaatttaaaattaataggaaaaaatttgttattatagatgccatagaatattcgtacttaccagttatacagatgaaggctattggagtctttaaaactggtaaaagtttctagttcttttcctacactgcctaacttttaaaattaaagcacattaaatgtatcctcagaattcagttcccattaaggcagggatgtctgttttgttttctgccacacccattggctaggagagtaactggtatatagtaggtgttgaatatttgctgaatgaatgaatgaacccaaggtcctttccagcccagttgagagtgagtagtataaaataaccattttcctgcttaataacattagctaaaatattttcaggagtactaaagacattttcctccaatttttccagatatattctcttttggtcctttaccaatttctcactttgtcttcctgtaatgctgaacgacttgagtttaaataggtacttgaattgattgacagtattgacattgttcagcacttaagagtctcacctatcatatatagtgggtgctcattaagtatttgtaggaacagtgcagcttgtctgattacctatcaggtctcttctgtacatggccacctttttgctcattagtatttataagccaaggctgtatgcaattatgcccaggtctttcataccagcctcatctcttaccatgcctgtcgagagttcagcactacagcctcatcacagttctctctgttctacaaggatgcccttttttgcatgccttctttttcctccttgctttgcatccctatgacccagattcagtgtcacttttttttttttttgagatrgagtctcgctctgtyacccaggccagagtgcagtggcacaatctgagatcactgcaatctccacctcccagtttcaagctattctcctgcctcaccctcctgagtagctgggattacaggaggctgcaaccacacctgacaaatttttgtatttttaatagagacagggtttcaccatgttggccaggctggtctcgaactcctgacctcaggtgatcctcccaccttggcctcccaaagtgctgggattacaggcatcagccaccacgcccggcccagtgtcaccatttttgatgtcttccttgggcatccttggctccttttttctccttctatgttaatatttagccacttgtacagcagtataaattcatttgggtgtcttttcccttaggagaaattagtgttttaccctgtctcctctcccctacagccacttcactctaacatccagtcagtcatgggcacatccagaccctgtcaatgtttacagaagaagataatagcttccttcacctacaagcataggagtaaataggtgttacatctaataaatctgaagggaatggtgcactttcatgagccaggcawtttacaactttaatgctcaaaaactttccaagatgaatatgatcatgaatctactttgttctgaggaaacagacacttggagcagctgagtatggtgttaaagtgtaactagtcccaaaccaggatttgtttacttatctaaaccttggtagctctgctttcctggctgcctttttgtctcatatacaggtgttttatctaagccagaggggcagaatttacaagtgcatacacttactctcatacagcctggcaatggaagatcccgtctacatgtatggataaaatcatggagtggtttattgccagtaggaattgggtattgaggtatgtggtatggatcagtggcctctcctggcccattggtggagaacatccagggaccccgtggaagtgcaaggctgagatgagaaatcacagctcagaagtcagccatggtgggtctccccatctcatcataccgttcttagtaacagaataagtcactaagttgtgttttgttggccctttgttatttatttattttttttgagatggactttcattcttgttgctcaagctggagtgtggtggtgcagtcttagctcactgcaacctccaccctcggggttgaagcgattctcctgccttagcctcccaagtagctgggattacaggcacccaccaccacacccagctaatttttgtatttctagtagagacagggtttcaccatgttgcccaggctggtcttgagctcctgacctctgttaatccgtctacatcggcctcccaaaatgctgggactgcaggcatgagccaccacgccttggccctctttgttactttcatgggccacacacctttataaataaatgagatttggtgatagtgcagtttttatcaattaatgatagtacaatcctatcttacaggaatttcatgacacctcacttgtgccaccaatgtgtgctacactagactgtagtggggctaaaactgttaacaaaatcctttttggtttggtctttatatatawaaaaaaaattaactgcgatttttggggggagttgggcactaagcagtacatttgcccagatgttaaaagttaatttctaagggatggggagattttgtttatggtatgggaaggaagcttaaagggaattagtttaattgtgtcagaatattaagcaatcttctgccatctgctgtcagcagcgcatgggtcccctaaggttcgcttttccattactctgactttctccccatctagatggagttcccaatatcattaacatgcctcacatagtttcttttgaagctttggctgggttaaatcacttttacttrtgcaaagtggattgactaaaaccttttccccaaacacctgccagaccagctatttttgtttccccttgcaatggactcatagcaagtctcacgcatgcatcaccagatcaccagctactccgtttaattgtgctgctctttccactcatcctcagagagaagctcgctttttccagaaactgccttccatcccccgcttgcgaacacgccacctcttctccttcccagaattttttttttttttttgcctgccttctgtcttaaggggattgcccagatagatatcagtgacactctatttgcctgtgttatggaatactattttacaaactttttttgactgtaatctacagtaggaattagagtttacattatgacccataatacacacaaatacacacatacatacatactcatgtacacaaggaccaccataacaaaaactggggggcttcaacagcagaaatgtattgtctgacagttctggaggtaagaagcctaaaatcaaggtgttgagrgggccacaccctctctgactgttctaagggagaatccttccttgtctcttgctagcttctggtggttgccagcactccttggctttccttggcttatggatgcattacttcagtcacatggccatcttctccccctgtcttcacattgtcttccctctgtgtgtgtctgtctctgtctaaatgtcaccttttcacacctgtaatccaagcactttgggaggctgaggcgggtggatcacctgaggtcaggagttcaagmccagcctggccaacatggcaaaactccgtctctactaaaagtacaaaaattagccaggcatggtggtgcatgcctgtaatcccagctacttgggaggctgaggcaggagaattgcttgaacctggtaggcggaggttgcagtgagctgggatgatgccattgtactccagcctgggaaaaagagtgtaactccgtcccaaaaaaaaaaaaaaaaaaaaaagtcatctttttataaggacacaagtcatattgaattggagcccaccctattaattttatttttaacttgattgcctctactacagaccttatttccacataaggtcacattctgacatatacttgggtgggggatacctacccagctagggctccaacctattgtgtttagggagacacaattcaaccgataataaataactcaccttaaataatgccttcatgttctgttctgttctagtttattctattccattccattattttgtttagacatgtttgttgcttttcactaacttgatttcacattgatttgaaaatactgtttgggacagtgttctgagtctgaatcctggcttctctgattttcagtttcttcacataataaacacaatcttacttcagaggattgtagtgagaatgaaggagaaataagagaaagtacttggtaaggtaaatacagtaaagacaagtaaaaatgagcaggaaatcaggagcattaatctgttcaatgaaactatatagaatcctttatatctgatatgatcaggaccttgagttgtttgttaaccaaataattcagtgaaagtgtgggattattagcaattacatacacatatatacacatattaagatgtaaatagtttatgagttctccagccttttaatgtaagactaagagttttgtggttttgttaagagtcctgtgattgatatcagacatcatgtttcttgcataaagcccatatcatctactgaccatttcctytggagtttctttataatggagtgaaaatttcaaaacacaaaataacctgaggatagaattcggactagagattcctttaccagtagaggaaatagttaatgatattcctgtaaaattttaagattcttttgtccacatctaatttgatgggtgatttttaaaaaattgattctcatttaattttctttctgtgcacactcatatgaaatatttaattaaattataaaatgttgttaacaaaactggcaaactagtaaaactagtttggggaacaaactcagttgattcttgacacgcccacaacttggttggtgggagcagaagaggaaatatcctacagaaatgcctattttccatgaccctttattccagctatgggcatgggttcgtattttacagaggaaatggagagcaatggttgatttggtgagccccttaagtggcagtggattaagggagcttttaccttttaacaaccacttacgcaaatcagttgtcagccacagacagcctagatgttttaggagacccttgtgtaaaccttctgtagcactaatatccgtgtattcaccagggatccagggtatgtgatcaaaaggcagatctggccaacaggaggtgcaatacagacagagttgagttgttcactaagtgtttttcttcctgcctgctatacttcaagagtctgttggtgtgggcttgggatgtatatattcttattgaggcacagactattggctttccttggctcttgcccaacacctctgagattgtcaggaagggaaaatacacttcgcagtggagtagctttctctattaacgtgggtgactttttgcctgtgttagtatttttatctagcaaaatgagttgaagctgaacttttaaaaagacatatgcataatttcatcaggtatttattattaaatgtcaagtgatgatatattaacttagtgaggtaatgccaaagaaatccacagaaggcctgaagtctggctgtaaatagctgagagccattttctttgtaactgtcttaggtttggatcacttatccacaaaatgtataggcttttgactttgattgtgtccttctaagtgttttctctgcagatcacagtcctcaaaaaatagacctaatattcagaagataaggttaatgagaaatggcgagtattgtaaatggaccaaattatgaaagaaaccaaaataaagacaaagatttctgaagttaaaagtactgtagtttggcaataaaaggtcatatcattgcatatttgtgcattacttacttcctgtcagatgcgcattttcttataaacagcgctatgaaggaggtactttctataaagttttttctccaaagaaacagacacttggacatttaaatactagataagtaacaacagggtaagccacctaaatagaagggagataaatatcaaaattaaatataatacataataaagttatgaagtaagttgatatgaacagcaaatgagaggaagcacagatcaataatattcaaaagagtatataatttcataattaaaagatttatataagtatgtacagatactcactaagagaataccataaaaacaatctgctggtaatttacaaaacctaaatgaaatggaaaaatcctggaacaaatatagattattaaacttgacctaagaacaaatagaaaatctgaaaagattaaaaccataaagaaggagacaccttgtttcaaccgtgacatatatagagtttggaagtccttattgccattcttacaacaagagaaaaatgaactaactagaaatttacttttcttgagatttggttacctggagcagaaaccaccagatgccataagctggcggggatactttactagttattttgatgaattgctggaaactgagtgcaggctagtgggagattaataagctcctgggagttgctgtctaaggggatcttcacactttcacaggcttttccccctggaactctaccagrtgctcagtaagaggaccctcatggctctgggataggggcttgaaggggagtagccttcgtgaaacccttcctgactcttctctctaacaaagacctcatctctaggaggaaagacttccccacagggcaattctgaaaacttatcccagctgggagacgagaatttggtccaaagaaataaaaaccatagtcaacaggggagcttcaaggtaataaccaggaaagggactagagctgaaggttgggcagaaataaagctctacctgtgaagagggacagaaacacatctgaaattcacacccttgaaacacagcctcactgaaagactgaggcttaattaagaagacttgcaacaccatcctcccctacactccaccacaatgacaaggctccagtaataataataggggagcccagctgaaaagctgcaaggaacagactctctgtgagaatcagtacaaaggtaagccccaaagctaggaggagaggaacaaagaagcctgctataggaatttgaagactttggcaccagtagctacaataaacattaaacacagctcatctcagattaatagaaattctcacaccaatggcctatttacttcagtgcctattatcctatagaacatgtctggctttcaacaaaaatttacaaggcatgccaaaaggcaaagaaacaaaaaacatccaaagacataaagcaagcttcagaaccatactcrgatatgacacagattttgcaattatcaagtaatttaaaataattatgtttaatttgttaaaggttctaatggaaaaagtatacaacatgcaagcctatataggtaatgtaagctgagatattaaaactaaaaaagaataaaagtaaatgaaattaaaaattaaaacccacaataatggaaataaagaatgttttcaacaagttcataggtagataacacaaccacgggaaaaaatattgatgaacttgaagataagttaataaaccttccaaaactgaaatgtaaaccaagaaaggatggggaaaaaagagacagaaaattcaagagctgtgggaaagcataaatgacggataatgttttcagggtgagtctttgtttattttctgtcctaggggagaaaataattagagtaatattactcaagaattctcggtctgggtgcagtggctcacacctgtgatcccaacactttgggaggctgaggcaggcagatcttttgatctcaggagttccagaccagcctaggaaacatggtgaaaccctgtctccacaaaaaaatacaaaaaaattagctggacatgatgatgcgtgcctgtagtcccagctacttgagaggctgaggtgggaggatcacttgacctgggaggttgagatggcagatagctgagatcacaccacagcgctccagcataggtgacagagtgagaccccctctcaaaaaaaaaaagaaagaaagaaaagaaaaagaactttccaacattaataatagacacaaaaccataagtccaagaagctcagggaacaccaagcagaataagtatcaaaaaccaaaaaaaaaaaaggccagcaccaaaaaccccatagctagacatgtcatatttaaaactgcagaaaaccaaaggcaaagagaaaaaaccttaaaggaaggtgggggcaagggacataaagaagtggaattagaaatcaaaacttgtccactctccctwtccacctccacccaaccatgcctccttcactaacaagatagcaggcccatcagtcttacagacaagtttacttgcaaacttggtagtaccatggcctcagcttacatacgcagagcttgagctcctctccaccattctgtctccaaagaaagaaaaatgaagatggatatggggggacaagtagatgtaatgtcaacaagaagaaaaagtctgtggtacctgagcaagatgtctgtttacattgattttgtatttgaggttttctttcttctttttactttacccactcttctaagttcccacactcaatgtcttcttaaattgtttaattcaaggatttttcacttacttgctgtgtttccctgagccagtcttatttgcttatttttccctaaaaaggaatgttctttgtaacattgagaaggctcccagaaacagtgagttaaataaaattcattgcagtatgtgattaagtgccaggtggatattgcaaaatgtaaatgtgataggagtttagagatgagagctggaggtacaatataggaagatataaaagagttagatttgaggtaggccttaaaatttgtggttgctatttacagaggtggagcttatttccaggggtgttctaggccaggacaactgcactactaaaggcccagggcgggggaatgtgtaggacaatgcactggctcatttgctccatcagcagagaaaagtttatattatggagtgttacaaaacaagtatgggggccgggtgcagtggttcgcacctgtaatccaaacactttgggaggacaaggtgggaggatcaygaggtcaggagatggagaccatcctggctaacatggtgaaaccccgtctctatgaaaaatacaaaatattagctggacatggtggtgggtgcctgtggtcccagctacttgggatgctgaggaaggataattgcttgaacctgggaggcggaggttgcatgagccaagattgtgccactgcactccagcctgggccacagaacaagagtccgtcaagaaaaaaaagggagagaaagagaaagaaaggagggagggagggaaaagttgtatatcctaccctgaagagaaaaacaactacaggttttggaactttcatccataaactcattcattagttcctccattcaacaaatatcaaggatctgtatatgtcagtccctacactaccacagagagtacaaatattaaaaaagacattattcctgcttccaaggagctttacytctagaaagacagatgtgttgatggctaaaacacactgtgacaagtgctgtactagtggaatgtatgctgggtacaggatagccagaagaaggagtgattaattctgtcaggtaggaagaagaaaataaaaagaactgggagaatggaatcccaagtaaactaccctggataacctagtagctaatccacctttgtcaaattctcaacattatttctcagtgagtgttcatttgacctttgaggtcttctgcttgtctttggtcacagcctaactccattgtttgaagaccatgtcaccatggtacaatatggcaggtggatgaaactgacctactggcaatttccccaggtacctcttacttcccatgatggctaattttatgtgtccacttgcttgggccaaaggatgcccagatagctggtaaaacatttctacatttgtttgtgaggatgcttctgaatagcatttgattcagtagactcagtaaagaatgccctcaccattgtgggtgagtatcactcaacccaatccattgagagctcatgtagaacaaaaaggcagaagaagggccattcactctctttgcctgagctgggacatctatcttctcctacccttaaacacagatgctcccggttcttgggccttcagactcagatggtaacttataccattggcttccctcgtttgcagacctttgggtttggtatggaattataccaccgactttcctgggcctccagcttgcagacagaacatcatgagacttctcagcccccataatcatgcaagccaactcctcataataaatctctttctgtatgaacccagttggttcatttttttctgaataacactgattaatataccaccctatcctgtgttyttcctcatgaccattttctcccaagcagatctctcctgtttgacagatgtttcactttggggcatggaggttgcttcactctgatcatggaggatacttttccagtgccttctcatggtgctctagaggatcacaggcatcatggagggtgcacctgggagcatccttacaacagcatctgctgcaatatgaaattcattgtggcacaacctttctcaagcccttctccaaagaggtttattattcagcaagaacttgctgtaatatgatctcatttaataatctttccagtggcttctaaggatggcattcaaacaaggctccagtttatacattaagattcatgcctgtaatcccagcacgtggggaggccaaggcggtaggatcacttgagcccaagagtttgagaccagcctgggcaacataacaagaccccatctctacaaaataaattagctggacatgatggcatgtgcttgtggtcccagctactcaggaggctgaagtgggagggtcacttgggactaggagcttgaagctgcagtgagctgtgattacaccactgcactctagcctgggtgacagaagcaagaccccgtctcacaagaacaacaacaataaaagattcattcaacatttggaggacttttagaaaaatatgtatttggaaaggaggcaataagaagttagggaatgagaatggctagaaattttgtgtccttaggcaatttgtagaaatttaaaattttcagtgagcagtgaaattctgctttctttagcaaaattgttttgttttgagctttcccccaacttcctagttaaaactgtgaacattttgaaactgtgaatatttcaagacatattcttgaaatttgaaatgtgtcttgttattgtaaaagctgagaaaaatcttcattccttggttcataagtacgtgtgcttgattgatacagtgttccttatatatccttcctagtttccactatgagttcagtttttgttttgattgatacagtgttccttatatatccttcctagtttccactatgagttcagtttttgttttttaatctggcagcagcagaatttttaaaaagagactcttttaccatttgagccatactttctatcacattgtcttaacattcctatggagattgtcttgctctctgggaaataagctattttaggggttattagagaactagatatactttatttctgattccttgtgttaccccaggctctgataaaactgtattttagtagcagtttatacacttcctctctgattgtatttttagcacataaagagtccttaaaaattcctttataagtaagtgttcctttcttaaataaatgccttagtgcctcctaaactggagtaaccaagggaaccaaggtgttctcctctccctgaactaatctgatatctttgcttcgtcacctggattaatttgctgccacgaaagctgtgcagatggtggtagacttccagaattgtttcagaaggatgaggtgactcagattcttccagtgaggtgctctgtgtgcacttggcctggaggaacatttagatttcaactcctttccaggaaccagtaacagcaaatcatactagttacccaatgtccagattgcaggtatctctgaaacccaggtgactgaaatctcccaaggtggatcagataaaggcatcctagcaggcaaacactagacagatccaggtttctaccctcttcctggccagatgaggaatccactctacagagcatgaaggggactctgtttttatcatgatactgtcaagtcagtgccttttaaggttttcttcttaatatcttagaagggttgacccataaagaccacaacagaaaggggctatgagaggctaaacttgttttaaggtgaaactcaattgttctagctgccagataccaaccttgtactatctctgcttaggcttaaagccaggtgattttattagataggaaaattctttaaggaggtactacaagagggtagtgggggcaaactatgttaacaagagaaagccagggagatggagattgactttgaacagttacgggatattttcgagagaatgagttttttttattccccattgtgatggaggctccggtatgctaaagactggagctgcagtagtgagggggaaggcaagcacagttcttgaagagattcttagaattatgccttttcacttcatacatctcttaaacaccgacaacactgactacaacatagtaagtgttctataaatatttgttgaggggtaacatgaataaatattaagaatgaattttctaagcttttcagcacttgtacctttgcttcagttcatgcatttactgtagtttgcctgtgtaactttgggttgatttgagaggaaatgcccttgattacataaatgtaactagtcaagaccgatcagactgaaatctaatgtaggcacctaatttaatgaggagagaaaaaattacccaaacaagagcatgtgtaattatgctaaatttcatgactttggggtcataaatggatttttcttgatgttcatctgacacgtattaattccagttgttgctgactattaagcagcggcttgtagggtcctttataataagaggacattaattcctgttaaattatgatgagcctcctgcagcatcatacatttcattcatatggatgtcactaataaggagacaataaaagacgaggaggatcaaaaggaagcttttgctgcagaaattgatggggaatgaaacttcccagcccrtgaggcaaagtggtggcaaagagctttaaaatgggtgtgtcagtcagctgggctgctgtaacagaataccacagaatgggtggcttaaacaacaaacctttattttctcatcattctagaggctggagagttcaagataaagattccagcagtgttcagtttctggtgagggctctccttctggctgctagatggctgctttgtcctcatgtggcctttccactgatyacatgcgaagaccagcatgagagatctgaggtgtctcttttcctaaggacactaatcctatcagaccaagaccccactcttatgacctcatgtaaccttaactacctcctcataattccaaatgtagccacaaagtggggttagggcttcaacatatgagtttggcaggggtgtagggagggtatcatttggtccatagcagggggatagcttcgtgtttgaactccagttctttctcaactcagcttcttgactctggcctgttgcttaggctctccgagccttagttcccccayctgaagcatgggagcagtaatcacagcctgggttggaagatgacactgaattaaataagtgtatgaaacacctcacttaaggcagggcacagagtgaacactcaccaaatgccagccctcactgggattttgtccttctttgcctgttcaggctgggttccaggtttgcaaggacatttctgatgttgggactcctcttagtgataagtggatcatattctgggagagcagaaaaatcttcagaagcatggatcaaatatggaacatgtgcctatgtgaataagtggtgatgttgagaaaatgagaggattagaaagcatatgaactcctatggaaattacggcatagcgatgcaaaggaaggcatttttaatgatttgagtaaatgagagagtgaccttgattctgttctttcaaattataggattaggtgaagggcttgctttgatgagaaaataaaatggaataattttcggcaaaagttcgttttaaaattatgyccatatttaaatatttttctttaataatcctgtcaactattaatgaattaaacattacgtatagaagtgttgtttttatttcttctgctgcaaataagtctcatgaggaaagactatacatcttctctgggctttcttctcgtgatatttaaaattaagttcctctagccaagtgttatatataattcttattcatgattttagcacagatgttaataaatgtcaccacagtatatttgctttctttgttaacctgaatcaatgaagctttcgtgtgtgtgtgtgtgtcgtgtgtgtgtgtgtgtatgtgtgtatataaacacacgagtagagcctgaacagcaacacttttaaagagataagcatatttttctccctttgtacttgagaaaaaagatgtcatcctgtgtcgttccagctgcatttcaatacatttgtaaattttcgttaaatacgctgcttgtgccctgtgtattaagccttctaatgagctaatatcagccctccactacagtttatctgtggaatttcctcagctcagcaaatgcataatctttcattcattcatcctgtagagcacttgtcagttggtgctatttaatgtgacaggaggaggaaaaaaagctgtgttttaaagtgctgtcaaattattatcatttttttggtcccagtccttgtatttggtattcaaaagaaaccctttattttagggcattgagcacaaaattagatcagttccataagataatgaccatatttcacagttagaagccagcatgattgcagggtagtgcttacaacttagagttgtttcttgttgttcctagaagtgaacttgtagatttatttttcttttgtgttttgccagcctcagacagcattctatacaagtggttgggaaaacagaactttaatttttctgaattcagtgtagtggagtggacataatctttttgactactaaagtgtcctgatgtgttgggtttttttgactcatttgtaagaagaagtaaataagaagtatacrttgttcaatcctgggaaaagaaaaaaatgcatgagatgaacaagggtcaaaaatgtaaggaattttaaaaagagtttactttttacatttcttttacctgagggtgtttttaggattatgactatacctgctatgtgtgtggtggttggtgatttttttttaaatcatcagatgtgctgcagctgtggaattctacaaatccagaagtcctttgtgctattttctgcactgcctttctcacctgcatgctatgtagccacttaaaagttcacttgaatttttttataggtgtgtgtgtgtgtatgtgtctgtgtgtatgtgtgtgcacgcgagtgagagagacggagagagagagagagaccataaaaataaaattcaagtacagtggggagcggggagagagagtaattactctgggaccattttggtttgtggaagggtggagctttaaccttgcttctgagacatctgagagattatgatgcgatgccctactgctggacatataatctgacaatgtctttrttgagtcaacttgaagcccaagagacattccccagtttttccattagggggtccttatttttgctgctgtacattgttgtgtcctttttttttgctttttgtttttagctaacaagtaagcttagtagctaatgagaagagggagtgagtttacggaataattttccagatcagtttctggcccagacttcaactgcaaccagcatgatttcagagatgccaggtccttatttgctcattgacctccctggcctccctgccagaaccaggcaaaataaacaataaataaaaaatatggctcctttcctgccattttcttggaatataatcttggggacataagccaaagctctaataaggaaaaataaaccttatggggtggaaatttttatatatcatactcaattttatttttattttgaacattaggtactgttggtttatgggacaacttcaaatgcatacatcaaaggtcttaaaggtgtggagtctcttaggcaaggaaacagggtaaaatgtatataatatatatataaatatatataaatatatgagaactatatagattatatatattatatataaaaawatatatatttatatattatatattatatatataaattwtatatatataatatatatataaatatatgagagatgataaaatcagtgaaggcctctaggcaagttagactgaccttacttttctaggaaaaaagttaaaggtaatgttttttgagccctgccatgttagtgtcacctgctaggcattgtaggaatttcaaagtctcattagaccaaaatctagtagggaattatgtaaaatactatggtgtaagagcagtgtcgagtgcccagagaagtacagatgcattttcatgagaggtaagtgtggggagagattgtgtctagttcattgcttctgaaagtgtgtctacatacccaccacttgtaagaaatacaatttcacagggctcacctgaaccttttctcagggcaagacccaggaatctgtattttgacaagccttctggtgacactgaaaaacactggctgtgtttcgcatggaaggagagaatccagggattctcagaggaggtggtgattaagttgggtgggaggggccgacagaataggagtaggccctgcaggaaagcaaagttcgcaaagtcattaagttgccacctattttagtgcctccaactcttacaatgaaagatttattttttctgaatctaaattcatcgtgtcttctcaaaagcctgtttcctctgtttgcattctcggtggaattgtgaatcatggtgatcatattttgtataatagcctttgccatatttcaaggaggatattaagttccccacagtcttttcttccccatgctaattaatcttcattcatcagccttttctcttacattccaaccctttcatcattttcattgctcttgtctgggctttccctaaatttttcagatttcyccaaagatataaagaaccaaactaaacctggtgctgtgttgatatctttacctctgcaggagtagatgggcatcttatcccccacatgttattattattatttattattttttgagatggagtctcgctctgtcgccaggctggagcgtagtggtgtgatctaggctcactgcaatctttgccttctgggttcaagcagttctcctgcctcatcctcctgagtagctgggattacaggtgcgtgccaccacacccagctaatttttgtatttttagtagagacagtgtttcaccatgttggccaggatggtctcaatctcctgacctcgtgatccacccacctcagcctcccaaagtgctgggattacaggcatgagccaccagacccggcctatttttttttttttttttttgagagtttacctagtgaagtcgcagaatgtatagtaggatttgtaacctgttacccttcaactcatggaagattggagattgttcacattcacatgggattcttagatctatataggtaccaaccattgtctggagactccataactattatgattcccacatagatacatttttttctaacatatttagctgtaataagaattagcaaaattcaaaatctgtaattttatcttcttatgttttctcaacaaagagtaaaagtccaactatgatggtggtgatatatatatatatatatatatatatatatatatatatatataaatatacatacatatatatatatttaatgtaagactttatatttttagagaagttctgtgttcacagcaaaacagagaggtaagcagagatttcccatatacccccctacacacacatgcacagccttccctatagtcgatatccccaccaccagagtggtatggttattagaactgacaaacctacattgacacatcatagtcatccaactcctacagtttccattagggctcacccttggtattggacattctgtgggtttggacaaatgtatagtgacatttatccaccattatagtattcagactattttcactgagctaaaaatcctgtatttggcctgttcttccttctacaccccaacccctgtcaatcactgatcttcttacagtttccataattttgcctttttcatatgtcatatggatgaaatcatattctatacaatttttaatgtcaacaaaggaacccttctgtgtttgaaaacatgtttgttgaagcatcaggccagacaagtggggcccatgatcatctataaaatagggagaatagcattcctctttcctgaaatttactgtgctgataaggtgttatatataaaagaacgtagtaggtgtttagcaaatggtggttattatttacatgttgagtattctgtctcatatgtaccttttaatcatcatgatcatttgttcaaagagccctagtttatttagataacacctgtcaaatggggtcacatttttctccaactacacctctgtgttcttatcattttcttgtttttctgtttctgtgggaaggggataaaggaaaggttcagttttgagagcttcctctgtctgaattggctttccctatgctggatcttgccataagaggccccttcatactcaactgaatgtctagaatttcagctttccctgcttgaacgacaagccataaaaaaggaaatagtatcggggtgggtttgctgaacagcacaaagttgaaaatttaagacacttttctatataatcatttgagctttcaccaagaatattatttccatatatgttgacaggcgggagaggaaagtttcttagcagaactgagatgaaggcatggctggtctcagtgagtcctctcacgaaacagacacagttttattggtccaattctgcccctaattctgggatctgtgcatgcatgttggtgatgctggcacaggttatccttccaggagttgctatagaaacaggtaacagccacacccactttctctgtctgttttgcattttgcgtgtggaggtctggcggtgctgccttatgcgcccttctttggtgggttgctgcttggttaatgatgctcagtccttaggattttctcttgtttggcatactgagatataatttcctatccttgtcacttttggcttcactccttaggctttgctttgagttatcttgctaacaaaattcacatgtctaaaaacaagctgagagagatcacggacacctgccccttatccccacccaattcatgattgaggaactagaacctttcatgaaaccacaactgctccagaaactagagaacaattgacagtttgatgcttaaaaagagaactagaaaaataccccacggatttggtgatctggtcaatacagagtactttaagtcaattagaaagttatacttcctaggtcattcttcttttgccaagctcagtcattggtggctttccattgcaaaataaaatgtagttacttttgtaaaattttaaatgtagtctgtcatttcttattttacttttttaaagcattgcattagttttgtatttctccactacctctgcctaggagaaatacaacacatgggcttggatgattttctttcttggaaacatggttgacaaagctatacaataaaaggataattttctcagcagaacaaaacacactaccctcttgtcrctgggcttttaaaaatctgaagaataggccgggcgtggtggctcatgcctgtaatcccagcactttgggaggctgaggcgggcggatcacgaggtcgggagatcgggatcatcctggctaacacggtgaaaccctgtctctactaaaaatacgaaaagttagccgggcttggtggcaggcgcctgtagtcccagctactccggaggctgaggcaggagaatggcatgaacccgggaggcggagcttgcagtgagctgagatcctgccactgcactccaggctgggcaagagtgcaagatttcgtcaaaaaaaaaaaaaaattctgaagaatacacttacttagatacatttggcttgtattttaatatttctgcagtgacatcgctgcttcaggaccttctgaattgaaaaataccaaactttcttgccctgatgtgctgggaaaagaaaaatagattttcctgccaatttcagtgtggatagccatggtgcttgtttaacttgttctctttataagttacaaacctagaataatcctgccatttcagaaattaaaatgtgttctcgtttgatctagtttattcagcagtgagtgctgaggacattccacagattgatcagcctcttcatttgttatatgccttgggtattacattcctagatgtttgtgtgttcttggcatgtctgaataaggatgggcatggagtcaggatccttggagtgggaacagatgcttcaggccattagctaatctgtcctcctgcatcactggagcagcaggattgcatttgattcacctcatgttggccatcgtttcggaaatgtggggccttattagactgtactctacctctatgcttcagatgccagtggctgtggtttaagaagacactagattgctgtggttggaaaaataacatttgtagtgttggaaaggacagtaggcataaatccatttgccagcagatggttcaaagcatctgacacctaggactaattttgcagggtttccctgttactagctttgcaacgtgcaaatggggacctgaaatgtactttattatagctcctaccaccccaaagttgataaatgtgtgaataattgtattagaaaaagtaccaatcttttagcataagcatttttgcttttttttttttttttttttttttaagagattaggtgtctgtgtagcctaggctgacctcaaacttctggacttaatggatgttgacttcatccttagcctcccaggtagctggacctacaagcaagtgccaccatgcctggctatcttttgttttgttttaaaccctgttccacgtgattcagagccaaccatctccacacaggcagtctcctggaagcctaaaaaaaaaaaaaaaaaaaaaagtccggcatggtggctggtgcctgtaatcccagcactttggaaggctgaggtgggcagatcacgaggtcaggagttcaagaccagcctggccaacatggtgaaaccccatctctactaaagatacaaaaaaaaaaaaaaaatagccaggtgtggtggcacgcacctgtaaccccagctactcgggaggctgaggcaggagaatcacctgaatccaggaagcggaggttgcagtgaggcgagatcgctccattgcactccagcctgggcgacagggtgagactccatctcaaaaaaaaaaaaaagaaagaaagaaaaaaaaccttccacgttaacatcaatcaatgataattaatttatatgacactcaagttagtgtattttatacattgttctctaattgggaaaatggatagtgtattttacacatttttctctaattgggaaaatggatatgatgttttcttaagcgcatctaagaaaccacttgaagagccacttggttcagattatttccaaactctgtcagtgctttatcgactaaacagctctgacttacttgggatgtgaaaacagttcaaatagaaagccagtccttggaaagcagttaacatctaagtaatgagattttagtggggcgtgaggtcacctgtgagatgcccttgtgtagcaggttccagttaagagggtgaacgcagacagaaattggtgggactctttggatggctcctctagcatcctttacagatgcagatctgtccacatcctgctgggaaagattgatgcatttgacctttggttggagcagatgatgatgagcaccaggacagatgtgggaagttaggcagtatcctagggcatttcgccagggcagcttggatgtgtgctttggaaaataccagtcagacaggacaaaatcagggccagagtagaagaataaaggataatgaaggtattgaggcaactgtttgattctataagctctccttttgggtttagaggtgaatttctacacgtcactgtttttgcataacctgctgttttgatagttcttaagaatccatggtgattttgttgtggttcatttcctattttaaaaatgctaacctattatgcaagttttttctaaatcacagctgtggggaagagttcactgtcaactggtaacagggttgtgtttcttattagataactaaactcattacagggaatctattttaaattgtacacactctcaaattcaatataatatgtattggatgcctcttaggtgcattgctgagttatggggataacaaaatgagaagatatggtctctgtcctcttgaaacatattatgtagtcagaaggcaggtgtataaaccaataaatacaaagtagtgtaatcagtgattgtagccacagaaatatgcttaaggtaaataataagcctgggagaggtcattgttttcattcctagagaaggagtgtatgaatcagggaaatcttcagaggggaagtgatatctgaagccatttgacaggtggatcagaactcaatagaaagggaaaaaatacacaatggaaaatatactgggcagagccatagcatgggcaaagtttcataggtgggaatttttttagtcttaaaccactcttgatgagagaaaattgactaaccaaacatttaaaagtaaaacaaaacaacaaaacacattaagtaatagaccctgactttcctgattattaacacagaaccattgcagctcactgtggatctccaagtgatggttgtccttaagctcaggtgagaactattctccttaaacttaggagaggacartagcagtagatatagaaggtgctttacccctaaaccagcaggtgcttaatgaattcctgttgagttaatgggggtggaggggtagcagggatgattttcaggtgggaattctagtctcctcactgattgggaatgtgaacttaagcaagtcacttgttgaagtcccacttgcctcttgatcaaaatgagtttttgtatgtagattatctaaattctcttccaactctattccatcaacaatcaaaacatcttttaattgatttccgcaaatgaaggagaataattcatgtgtctggaaaatttccttatactggataaccgaggtatttcatgtcacttagcaaatctcttagtaaatccatcatttagtgaatgcattttaggtaatggtccccttagaccttaaagaagccaacttttggtaggctagaaaaaaatactttaaaaaattattatttaggaataattacaacaacagcaacaaacttcagtgcaaaagttaaacaccccccccacccccccccacacacacagagaaaacaaagatttcatcataacaatttttggcatcgattagactctgtgccttgctgttgtcctggttgttatcctccaaatgtgaccctgctgcatgccaagtcatcagaaggctatgagcacctttggtaaggatgctacttacagtgagtctgcctcactgtacttgcctccccaggacccatctgaactgcatattggccctaccactctggggaccatgccaagagggtgcatacctgtgcgtgctcatttctgtctgcagtagtgacagatgcataaagtagtttgcttagggaatttgcttggattcttttctgaatcaaagctgtttccaaaagttggtttttatgggcatatcttgctgggaattgccttggtgctgttggtaaataacaaagagagagccctgtccttacaatgcttgcagtctttccaaaacaaaattgtgcctatgatagcttttaggaaatcactgggcctggagagaaaacatttttatagtatctggacctccaagccaaacaacaatctgtcttttaaatattacagatgaagcaaaagagttttcaaaaggaacttcagtgtttccctaaccccctctccaccagacccctgacttacattccctgagtgaaagctcttgggcacaggctccttgttctcctacccccaattcatatgccattctcatttattagtgctcctttggaaaccagagctactatgtgacctctggattttattttccttatgtaagtgatcaaattataaaacagctttcttaaaagctgaatgtttgtgttgctattaacttttaatgtttcatgatgtgctatgctcctattttcatctttgtgtagcattcttaaatgtggtttaaaggacttccacatttctaaatagaaatggcttctggggaaccttgtaataggttgcaggtgagagggatctaattaacttgcatagatccagactattcatggggctccagtttttgttaattctggtataggatgcctagaacagagagttaggggcttgaaaaaactgaagattcccatgaagactaattggaagatacagagaagagataggggagtatctttatatttcttttatacctcagctttctttaatccttaggtgtgttgtaatagcgcttatcttcatgattggattggtattttgaatgtccactttctgcttttcccatactttatattgtttactggtgttactgatttatatttcttaacctccagctgtgtacctgtcactaaagccagggaccctgactagtcttaaaggagataaatgagaatcaggatctagtgagtcgatttcagatggactccttttatctgcaagacttcctgccatttctcaggctaaatgacaaaatcatagcctgttggctcataggatacttgccatcttgagaggataaccttttaacctcttagtgtcttcgggaagataggaaatttggtttatataagaaatcatttccttaaggataaccaagacaggaggaacacagagagtccgtttagattttatgcccattcttatttctgtaggtgattatcagagcaagggtcaacaaagtaaagcctgccggctggctgcctgattttgtaaataaagttttaacggaacacaggttttgtcattcaagggcagagtctagtagttggcacagagaccatctgacacacaaagcccaaaatattcacaatttgactctttacagaaaaactttgctgacttctgccttagaattttactggtgtttaatatttattaggaccacttatggatgataattataaatcataaatggaaaaggtctttttgataagtccatacatcatggtttctgctttcccaaaagtggccacacttttatagattgctccatgaggatgcagtggtagaaaaggctgaaccaagtttgcatgtggatagctatgctcagtcttagttcagggggacattctawaacccctcttcttgtctcccactcaacttagtatcgagtgggatttcacatcaaagttcttgtcctgaaggattcagcagttccagaagacatggcaagaatcagctctcagtcagcttttcaactccttgatgggggggttaagagtagagagaactatccatcataactaaatctttactaataatttaaattctacagattccaggactatggcatcttgactcagtaaatctttcttgcctttcctttttttaaaacaagggaaaaatatacaaacagattaaagtgcacttacaaacccagctggcttgttttaagctcccaaaggaacacttgattcccaattatactatttttcctttttatcaaattgctaagaaacagtaactcaattgattttaatgatttctatcacacatagcctttaagactagtaataggtttattatgctcagtcataatgatgatattttacttctatgaatggtatttttagcagggctcataaaatacccagtttgattttgtttattaactttctcattttccattagcggatgttttcctgtctcagataattctcctgcctgttgatattacactattcaatagaaatgtgtgtttcaaaagaacagaccacatactctttcaggtttggattggatgcttttatttaaatacttcccaaagaataattcttcagttttttgtcaaataccacttttaatgttgtaacttgactatcacttgaatrtcacttcgaatttaactcttaattttggtggcttgctatttagtagtttcatattgctgagagcctaaacattaataggtaatttttttctattttttgataagaaaatattcagtttccatttattcagtttttatkgtctgcaaaattagagaagatgtctggttctgtattaggaggttttaatttgttgtttaaatatctattgagcctctttcagtctgtttgtgcagtgatctaagcytgcataaggcatctgaattattttttcagcttccccctgttttattggcaagtgaccgtgtgtatggtaattgagcaattgtgtgcttacatggatttatgaaatttgcatgagcaacttttagagatcttacatttttgtctctaagcagacttgaagaggaagctttctgaaatattgtcttttgcttaaaattatatttttgctttttattgagagacaatcgacctcaaaacattgaagatttgtttccctttcctcttggctatatcttctgtttttgttctcttgaggactgagtcaactctccgtctctaagtggggtaggtgaaatgctaaggcaagggataggtcatgggctcagccccaggtagaggaacaggcagcgagctgagccctcatagctcctcctgatgctcagctgctattttttcctccctgtttgacaaatgaagacactgacatttagacagtgagagatcctttgtctgaatcagccaacaagtgtgatggaacaaagttgcgaacgcaggtctgactggcattacaggctgtgagctgtacctggtgcccctttgtctgtaagtgagcaaacctttaagtaatgtattactgggctctctggtcaactttttttgactgtgccatcagggagacgcacatgtctcagggagtttcctttgcctatactccacaagtctttggagtacatctagttctccttccaatgaccagtgagaaagacaagtttgctttctttatttcacaacctctttccacaacaatttttctccttgttcaagttccaactcacttattcctgaaatgggctctactagcccctggatgttttgcctgccacttcaaattctatttctgcccctgtttcttgctcatacttcgctgagcctccttcactttttcagtgcctggagcaacttttgatggaaaagtgcttgtgttgaayttgggcccctctaggttgagccaaactccatcttgaagctatagttccttttcagtaactgacagcatctgtgaaggccctatgaagggaatggggttaaagggcctttgaagaggagaactgtggcagggcacataggatggaggagacaggagagagttctttcaaaggaggtgagtgcttgaccagaggctgagggcaggaagcaagggtgtataagtgtctataaatgttgtgttgggtgtagaagggggtgtagtaagaggaacaaaaggctgaaaagaaggctgaaggtgggatgtagagcctggaatgtgaacatggctttggactttcttctttttttcagcaaagagctgctgggacttggtggcagggaagactttgccttgtattgtggctggcacagtctatcagtagatattcgttgcatggctagtggtcaaatcagttgtcttgcaagggacgttgaccagactagaggtaaatgactggaggcagcatcactgaataggatattagtgttattcattcttcccccttctctatgtctgtcactcaaaggaaacttgagattcactaaaggacaatggctctggaatcatatttctatttgatgtgtttacactaaaagcatttcatttatatttaggagaaataatagcaaagactgtatggagtataggcagaggaaaatctctgagacatgcctatctctcttcctctcttcctgtctttagtgtgtcctgagacaataatcagcaaaatacactggacagccatggattcctccaagtcagtactttgcaagctgagttatgaccctatacacggatcatgccatgaagttagtcggttgcaaagagcattggaaatgacacataataaaatataaaacagctcattgcattgccatcataaaggtcagttttgtgacataaaatatatttcttattgtgagtcatgaagaagtttgaaaaacaagggtgaaaggaaaaggatctcattactttggaatactataaatctatctttagctctgcgtgtaaggagatcatgtaatttatcatccacgatgtgtttctgagggaaagggctacctcttaataattatatcacaacaactggtgtaaccacactgcctcacgctaattaggaaatatggtcactttgcctgttttagtcagggttctccagagaatatgaatatattctcagcatccgtatctacctatatctgaatctatgtctgtagagagagggtggggagggggatttaatttaaagaattggctcacatgattgtggagctggagaagcaggccagcaggctggccaatcaggtaagagtttatgttacagtcttgaggattccttcttctttgggaaacctcagttgttactcttaagatcttcaactgattagataaggcccacctgcattttgaaaaacaatctgctttacccttagtctactgattgtaaatattaatcatgtctaaaatataccttcacagtaatatctagactagtgtttgatccaacaagtgggtctcatggcctagccaaattgtcatataaaattaaccattaaaccatttaaagaggacaaatggagggtggacacctacaaaggttttgttttgttttgttttgttttttgctttgttttgtttttttattgtccaaaggcctttgctgaagctgacccattcttcctgattgctttggcactgtttgctttcattcatagtaatagctatgaacttgttaaatattgctgttgtgaccttgtggtttcttaaaataataattaacaaaaaggggttgatgtctcactttgctaattttgatagtttttgaattagatgtgaattatacctgcttatttttattcaaagctgttttaatattttacataatgtttttatgaaatgactggaggagaatgcttcagaatagcttgtctgccaaggctacagtggttctcctatggaccttgccacaacaataactttataattactcaacaacttgctatttctcttgctccagaataaaccatgaagggtttgtaaaatggccagagaatttgtgaatgctttgattcttgggaagctgcaaggactgaccactgatcactattgcagtctagtagtagactgcaatagagtggctgctatatcccagcagaaatttaattttggccttgtgaagatatttgaagaaggaggaagaactctgcaaatttccatgctgaaaaatgtcaaagtgaaacatttatcacttcttttttattgacatgatattcaacctgatgttcacctccttacgttttgaatttttttctamttttggaaggattacttgctgattatagaaactataacttggaaaacactgaagacatatgaaggagaataaattgaaaatgatgactatgatcagattgtaatgtgattattaactttttagcatttccttcccctctcctttctgtgattttttttaagtaacagagattgcattgattacatacttttatgtcttgcatttttgtcwggtgacttaacaacactttccaatgacaataatcaccctttataaatgttatgtttattgtctgtacaatatttcatcatatggatgtgtcacatttaacttgttttgagttatttctttttggaatctttgggtttttttccatttcttttccattgtagtaaataatgctgtagtgaacagctctgtgaatgaagcttttctgtttcttcagagtgattttttaaaaaggtatttttctggtcgcttttgaattctaggattatagcattttcaatgggccctacatgctttgggtcctgagattggtcagagagggcccaaagatcagcaaaccctgaagatcttcacggaaggctgagctacttgcaaagtagcaacaaaaagccacttcctttttcttattttttttaatttttatacttaagttctgggatacacgtacagaacgtgcaggtttgttacataggtatacatgtgccrtggtggtttgctgcacccatcaacccgtcatctacattaggtatttttcctaatgctatccctccccttgcccccacccccaacaggctccagtgtatgatattcccctctctgtgcctagatgttctcattgttcaactcccacttattagtgagaacatgtggtgtttggttttctgttcctgtgttagtttgccgagaatggtggtttccgactttatctgtgtccctgcaaacgacatgaactctcttttgtatggctgcattgtattccatggtgtatatgtgctacattttctttatttggtctatcactgatgggcatttgggttgattccaagcctttgctattgtgaacagtgctccagtaaacatawgtgtgcatgtgtctttataatagaatgatttataatcctttgagtatatacctagcaatggtattattgtatcaaatggtatttctagttctagatccttgaggaatcaccacactgtcttctacaatggttgaactaatttacactcccaccaacaatgtaaaagcattcctgtttctccacatcctctccagcatctgttgtttcctaactttttaatgatcgccattctaactagcgtgagatggaatctcattgtggttttgatttggatttctctaatgaccagtgatgatgacctttttttcatatgtttgttggctgcataaatgttgtcttttgagaagtgtctgttaatatcctttgcccactttttgttggggttgtttttttcttgtaaatttgtttaagttccttgtagattctggatattagccctttgtcagatggatagattgcaaaaatgttctccaattatgtaggttgcctgttcactctgatgatagtttcttttgctgtgcagaagctcttaaattagaccccatwtgtcaattttggcatttgttgcaattgtttttggtgttttagtcatgaagtctttgcccatgcctatgtcctgaaaggtattgcctgtattttcttctagcgtttttatggttttaggtcttacttttaaatcttcaatccatcttgagttaatttttgtataaggtgtaaggaaggggtcaagtttcagttttctacatatggctagccagttttcccaacaccatttattaattagggaatcctttccccattgcttgtttttgtcaggtttgtcaaagatcagatggttgtagatatgtggtgttatttctgaggcctctgttmtgttccgttggtctatatatctgttttggtaccagtaccatgctgttttggttactgtagccttgtactatagtttgaagtcaggtagcatgatgcctccagcttcgttctttttgcttagggttgtcttggctatacaggctcttgtttggttccatatgaaatttaaagtagttttgtctaattctgtgaagaaagtaaatggtagcttaatgggtatagcattgaacctataaatcactttgggtagtatggccattttcacgctattgattcttcctatccatgagcatgcaatgtttttccatttgtttgtgtcctctcttattttcttgagtggtggtttgtcattctccttgaagagatccttctcatcccttgtaagttgtattcctaggtattttattcactttgtagcaattgtgaatgggagttcactcatgatttgrctctctgtctattattagcatataggaatgcttgtgatttttacacattgattttgtatcctgagactttgctgaagttgcttatcagcttaaggagtttttgggctaagacgatggagttttctaaatatacaatcctgtcatctgcagagacaatttgacttcctctcttcctatttaaataccctttatttctttcccttgcctgattgccctggccagaacttccaatactatgttgaataggagtagtgagagagggcatccttgtcttgtgccagttttcaaagggaatgcttccagctttcgcccattcagtatgatattggctgtggatttgttttatatggctcttattattttgagatatgttctatcaatacctagtctattgagagtttttagaatgaaggggtgttgaattttatcagaggcctttgttgcatctattgagataatcatgtggtttttgtctttggttctgtttatgtgatagcttatgtttattgatttgcatataccgaactagccttgcatcccagggatgaagcagacttgatcatggtggataagctttttaatgtactcctggatttgttttgccagtattttattgaggattttcacactgatgttcatcaggaatattggcatgaaattttctttttttgttgtgtctctgtcaggttttggtatcaggatgatcttggcctcataaatgagttagggaggagtttcttcttttctatttcttggaatagttttagaaggaatggtatgaactcctctttgtacctctggtagaatttggctgtgaatccatctggttggtcctagtctttttttttggctggtaggctattagttactgcttcaatttcagaacttgttatttgtctgttcagggatttgacttcttcctggtttagtcttgggagggtgtatgtgtccaggaatttatacatttcttctagattttctagtttatttgcctagaagtgtttatagtattctcggatggtagtttgtatttctgtgggatcagtggtgatatcccctttatcatttttattgtgtctatttgattcttctctgttttcttctttgttagtctggctagcagtctatctattttgttaatcttttcaaaaaaaaaaaaacagcccttggattcattgattttttccaagggttcttcatgcctctaactccttcagttctgctctgatcttggttatttcttttcttctgctagcttttgtacttgtttgctcttgcttctctagttctttcaattttgtgatgttaggatgtcaatcttagatcttctgcactttctcctgtgggcatttagtgctgtaaatttccctctaaacactgctttagctgtgtcccagagattctggtacattctgtctttgttctcattggtttcaaagagcttatttatttctacctcaatttcattatttackcagtagtcattcagcagcagattgttcagtttccatatagttgtgcagttttgagtgagtttcttaatcctgagttctaatttgattgcaccgtggtctgagagactgttatgatttctgttcttttgcattgccgaggagtgttgtacttccaattatgtggtcaattttagaataaagtgctatgtggtgctgagatgaatgtattttctgttgattcggggtggagagttctgcagatgtctattaggtccactcggtcgagagctgagttcaagtcctgaatatccttgttaattttctgtcttgttgatctgtctaataatgacagtggggtgttaaagtccccactattattgtgtgggagtctaagtctctttgtaggtctctaagaacttgctttatgaatctgggtgctcctttattggatgcgtatatatttaggataattagctcttcttgctgcattgatccctttaccattatgtagtgcccttctttgtccttttttatctttgctggtttaaggtctgttttatcagagactaggattgcaacccttgctttttttttgctttccatttgtttggtaaatcttcatccatccctttattttgagcttatgtgtgtctttgcaagtgagatgggtctcctgaatacagcaaagggatgggacttaactctttatacaatttgccagtctgtgtcttttaattgaggaatttagcccatttacatttgaggttaagattgttatgtgtgaatttgatcctgtcattgcattgctagctgattattttgcccattagttgatgcagtttcttcatagtgttgatggtctttacattttggtatgattttgcagttgctggtactggtttttcctctccatatttagtgctgccttcaggagctcttgtaaggcaggcctggtggtaacaagatccctcagcattagcttgtctgtaaaggattttatttctcctttatgtgtgaagctttgtttggctggatatgaaattctgggtggaaaattcttttaagaatgttgaatattggccctcactctcttctggcttgtaaggtttctgcagagagatctgcttttagtatgatgggcttccctttgtgggtaacccaacctttctctctggctgcccttaacattttttccttcatttcaatcttggtgaatctgatgattatgtgttttagggttgctcttctcaaggagtatctttgtggtgttctctctatttcctgaatttgaatgttggcctgtcttgctaggttggtgaagttctctgagataatatcctgaagtgtgttttccaacttggttccattctccccatcactttcaggtatactaatcaaaggtaggtttggtcttttcacatagtcccatatttcatggaggttttgttcattccttttcattctttattctctaatcttgtcttcacactttatttcattaagttgatcttcaatctctgatattctttcttcacttgatcaattcagctattgatacttgtgtgtgcttcacaaagtcctcatgctgtgttttgcagctccctcaggtcatttatgttcttctctagactggttattccagttagcagttcttgcaacctcttatcaatgttcttagcttccttgcattgggttctgaagcctacttctgtcaattcgtcaaactcattctccacctagttttgttcccttgctggcgaggagttgtgatcctttggaggagaagaggcattctggtttttggaattttccgccttttgcactgttttttccttatcttcatggatttgtctacctttggtctttgattttggtggcctttggatggggtttttttttaatatatactttaagttttagggtacatgtgtacaacgtgcaggttagttacatatgtatacatgtgycatgttggtgtgctgcacccattaactcatcatttaacatcaggtatatctcctaatgctatgcttccccgctccccccaccctacaacaggcccyggtgtgtgatgttccctttcctgtgtccatgttttctcattgttcaattcccacctatgagtgagaacatgcgatgtttggtttttttgtccttgcaatagtttgctgagaatgatggtttccagcctcatccatgtccctacaagggacatgaactcatcattttttatggctgcatagtattccatggtgtatatgtgccacattttcttaatccagtctatcattgttggacatttgggttggttccaagtctttgcttttgtgaatagtgccgcaataaacatacgtgtgcatgtgtctttatagcagcatgatttataatcctttgggtatatacccagtaatgggattgctgggtcaaatgttatttctagttctagatccctgaggaatcgccacactgacttccacaatggttgaactagtttacagtcccaccaacagtgtaaaagtgttcctatttctccacatcctctccagcacctgttgtttcctgactttttagtgattgtcattctaactggtgtgagatgatatctcattgtggttttgatttgcatttctctgacggccagtgatgatgagcattttttcatgtgtcttttggctgcataaatgtcttcttttgagaagtgtctgttcatatccttcgcccactttttgatggggttgtttgtttttttcttgtaaatttgtttgagttcattgtagattctggatattagccctttgtcagatcagtagattgcaaaaattttctcctattctgtaggttgcctgttcactctgatggtagtttcttttgctgtgcagaagctctttaatttaattagatcccatttgtcaattttggcttttgttgccattgcttttggtgttttagacatgaagtccttgcccatgcctatgtcctgaatggtattgcctaggttttcttctagggtttttatggttttaggtctaacatgtaagtctttaatccatcttgaattaatttttgtataaggtataaggaagggatccggtttcagctttctacatatggctagcaccatttattaaatagggaatcctttccccattgcttgtttttttcaggtttgtcaaagatcagatggttgtagatatgcggaattatttctgagggctctattctattccattggtctacatctctgttttggtaccagtaccatgctgttttggttactgtggccttgtagtatagtttgaagtcaggtagcatgatgcctccagctttgttcttttgacttaggattgacttggcaatgcgggctcttttttggttccatatgaactttaagtagttttttccaattctgtgaagaaagtcattggtagcttgatggggatggcattgaatctataaattaccttgggcagtrtggccattttcacaatattgattcttcctacccatgagcatggaatgttcttccatttgtttgtatcctcttttatttcgttgagcagtggtttgtagttctccttgaagaggtccttcacgtcccttgtaagttgkattcctaggtattttattctctttgaagcaattgtgaatgggagttcactcatgatttggctgtttgtctgttattggtgtacaagaatgcttgtgatttttgcacattgattttgtatcctgagactgctgaagttgcctatcagcttaaggagattttgtgctgagacgatggagttttctaggtatacaatcatgtcatcagatggggtttttgagtggtcctcctttttgttgatgttcatgctatagctttctgtttgttagtttttcttctaacagtcaggcccctcttctgcaggtctgctggagtttgctggaggygtactccagaccctgtttgcctgagtgtcaccagtggaggctgcagaacagcaaagaatgctgcctgctccttmctttggaagatttgttccagagggtcacctaccagatgccagccagagctctcctgtatgaggtgtctccctgtcaggaggcacggggtcagggacccacttgaggaggcagcctgtcccttagctcgagcactgtgctgggagatctgctgccctcttcagagccggtagggaggaacgtttaagtctgctgaagctgtgcccatagctgcccctttcctcaggtgctctgtcccagggagataggagttttatctataagcccctaactggggctgctgcctttctttcagagatgccctgcccagagaggaggaatctagagaggcagtctggctacagaggctttgcggcactacgttgggctctgtccagtctgaactttgcagcagctttatttacaccgtgaagggaaaaccacctactgaagcctcagtaatgatggatgcccctccctccatcaagctcaagtgtcccgggtggacttcaaactgctgtgctgacagcgagaatttcaaggcagtggatcttagtttgttggccccatgggggtaggatccactgaacaagaccacttggctccctggcttcagctgcctttccaggggagtgaacggttctgtctcactggcattccaggcaccactggggtatgaaaaaaaactcctgctgctaactcggtgtctgcccaaatggccgcccagctttgtcttgaaacccagggccctaatggtgtaggcacccaagggaacctcctggtctgcaggttgcaaagacagtgggcaaagygtagtatctaggctggatagctctgtccctcatggcacagtccctcacggctttccttggctargggagggagttccctgaccccttctacttcctgggtgaggcgatgccccaccctacttttgctcaccctccgtgggctgcacccactatgtaaccagtcccaatgagatgagccaaatacctcagttggaaatgcagaaatcacccgctttatgcattggtctcaccgggagctgcagaccagagctgttcttattcggccatcttgcccaggaatcgaaaagccacttcttaaaaagagccatcactggctgggtgtggtggctcacgcctgtaatctcagcagtttgggaggccgaggcaggtggatcatgaggtcaggagattgagaccattctggttaacatggtgaaaccccatctctgcttaaaaaaaaaatacaaaaaattagctggatgtggtagtgggcacctgtagtcccagctactcaggaggctgaggcaggataatggcgtgaacccgggaggtggagtttgcagtaagccgagattgcgccactgcactcctgcctgggcgacagagggagactcagtctcaaaaaaaaaaaaaaaagaagarccatcactgtggattgagagggttgaacttcagaggatgctgatcagaggagaagagtgtctcatctcataatggattaactatggcttagttaatccaccatgaggctagtggatccagcactcaaagaactcctaktccgggaaagtaaggtagtagtgaaatggaaattgccttgcttggggtgttcatgttcctcattgacagtgacccctagcaaggaggatgaaggcagactgttgctatcttagaatctcccatgtacagctgtttacatcatttctactcacagccaaagtataaaaagggcgcatgtcttacatagttctgtttactctttaaaataaatcagtggtaaatatgctcttcatccattagtctgaagaatcctcagattgccatatttctgcataaaatgtggtgaggcaagcttgtcctcacccctgagaggtgtcattactctagaaacctctgatcaggatgaaagtgggatttaggggactgaaatatctcctgcacctgacattttccagtctagcaactttggtgctggttcagtgttggttctagagcaggcagatctcaactgaaagtcatctgccactactgattagctgtgaggacagctgcttgacctcactaggcccatttcctcctctgtggcatggatatgtaatgcctgcttcacagagttgtttgaggattggataaagataatgtacttatagtagtttgcacattacttgacatgtagcaagtttcattaaatgcaggtgtttatttttattaatgtattgggcccatatgatctgaaaatcagtgtcctcatatatgaaatttcagtgcaacattgggtgactctgtcatgctgaatgtgtatcaactccaatgggaatggaaccacgttcagctggctgaagaagagacctaaagacatgggattttattaggggcttgcatacagtgggaagagttccgtggtggcaggctgggcagaaaaaccacaactgcttgcaaacagcatggagtttatatagcattttcacctatatcctcccccttaatgacctccacctggcaagagtgatttaattcaaaactcaggacctcaagcccctgtgcagcctgtgttccatgggactggacaggggctcagatgttgctcatagacaaggaatggatctcctgattccctagctcagaactcacattcagggatgtctgccagagtcattctcagggtatgcttaagctattgctatcaggtgcatttaccatacaggcttttccctgatgtcttttctgtgaccactactaactggtgttagaataacaagacacagctagaggtgatatgataatacagctcttaaagactttattcattaggaccctccctctcttcttatttcttcacattttcttttatttatccttccttccttccttccttccttccttccttccttccttccttccttcctttctctttctttctttcccttccttccttcctttctttattctttctctttttttttttttttgaaacagtgtcttgttctattgcacaggctggagtacagtggtgccatcttggctcattgcgacctctgcccctgggttcaagcaattctcatgcctcagccacttgagtagctggaattaaaggtgtgtgccaccacacccagctctaattgttgtatttttagtagagagggtgtttcactgtgttggccargctggtcttgaactcccaacctcaggtgatccacctgcctcggcctcccaaagtgctkggatttcaggtgtgagccactgtgcccagcctcttcgcattttcattacctattctgtgtctagtaccctggtaagtgctggagatattaagttaaacaccattcgtaatgttaaatcatccatgtggccaattagttgtcacgttactaacrtatatacacatgaattaaagcacatgtgatgatgctctctcattcatctgtgcacatcctaacaattcacaggccagaagggctctttattctctctttaggttgttttttattttcttgcttttttaaatttttcttttatttttttgaaacagagtcttgctctctcacccaggctggagcgtagtggctctgctggatctgctggagtgcagatcacggctcactgcagccttgacctcatgggctcaatcagtactcccacgtcagcctccctattagctgggactacagacatgtgccaccatgcctggctaatttttaaaatttttttctagggacagggttttgctrtgtttcccaagctggtctccagctcttggactcaagcgatccacctgcctcagtctttcaaaatgctgggattacaggcgtgagccactgtgcttggcctctccctttagtttgatacccaaagtcctgtttgccttgctacagatccctttgttaagggacaggtttctaccctgtagacttcagacactcagctcagtatcattccaaggacctagctcttccactggtccatagcgccagtacctagcactgtttcttcagtggtttggttggcatcagggaccactcttcttatgtgcaaatatgaaaatcttcatctcagatcctaaagcaaggtctcatcaagacaagcctctggctcgatgccctgtgccagctttggggtccatctgttccattttgaactctgagtttccaatttctgacaggcccactttgatattctggttcctgctctgtgttgttttgcttcctgagtacaagccagggtggtgtgacgtgttgcacagcagccccagaaagaaatatcaagataagacatactgatttattttacacttgccatggaagcctctagaaattttagtcttccatgaaaaagttttatgacattttcctagtgctgtctcaagccctgtctttggatgtttagttaatatttatgctggcattctcatcaattgattgatccctgagtagtaatagcaatgacatttattcaatgtgttgtgattttttatttctgtctccagtgagacagaaataggatgaaatcttgaaatcttatttacctaaataatgttctaagcaggcagcaaataaactctcatccttcttttgaaggatgcaaggggcttgaaaagcaacatgtgaaatatttaagctactcttaacatcttgtggaatatcagagttgaatatgttttggtagtaatttaacccaccttcattcattttaaaygtgagaaaaggccaagttagtttttgcccagtattaattacacagtattaattgtcagcagaagagccgaattcaaatccatctctccttattcgctgcatgaccttgggcaagctatttaacttctctaagcttatgtgtcctcatctgtattaaagggggaaattatctcaatctagtttatagagctattttaagtaaacaaaatgaggttgccagtgattagtacacttgaaatatacactcaataaacattgttatgatggattgtagagaaggacatggagaaatccactctgagctaggcttcaaaaaaggaatcaattttcaacaggtgtcagtgatgggttaggatattccagtaaagaagasacagaggcagagaattgagggtcttaatgggaacactgggggtaatccagcttggcttttccgtgtagtgcatgaatcgaagtagtaagagacgagatctcaaaaagcagttgaaatttgatcatggtcagtcttgaatgccagaacatggaaagtagatttcaatcattagtctggggatcagcatgggggtcactgatggctttaattggtgggagaragagagacacagtgacagagacagagacagttagacctgagctaaggaagggtaattggatgatggcatacaagagagaaaggcccttgtttttaaaagtggatgtatggaaggtattctcacagttgatgctgaaaacttgaaaatgtgcctgcctctgctgtactggcaattgtgattttagaaaactttgcagatataatgattaaaaaacaagaataatgtaaatatctaaaaagggggacttggttaagtaaataaacacatgttaagtaagaatttaaaaataaaataaagacatgttaaataatttcatgtcatctagccattatggatgatgttatttatcaacatagatcctttgtgatctatgattttaagtctaaaatattagaatagtgtgatcttatttaaaaaatatgtgtacttgagaggagttatttcttcattcaaagaagtccagaaagggtatraatcaaaatgttaaacaatagttatccttgggtggttgtgtcacagaggattctttttattgtagtaaaatatacatagcattacatttactattttaaccatttttaaatgtgcaattctgtagtattacgtacactcacattattgtgcgactatcaccagtttccatctctagaatatagttctttttaaattcatttttaatgtattatttgaattttataatcaaatcaatttcataatcgaaacaattttggttaaataatacaaagtagagatttgagactaggatattattgctgtgatgtgggaaattacatgctaactcaaggtcaggacagttgcaatagaaatggagtgtaagaaaagagagaagaccatgttgtctaatgtttctatttacaatgttttatccccatgtagtagatggtgcttttccacaaggtaaagtttggactccaagttgaaagtaactggatttaaaagttattggggacctgtaggcttctactgtgcaccagtagattgtagtaccatgaaaggtttggctacaccaccagatccatgatcaggtttggtgtttacacaatcattccatctcaggcatccaagtgacacagatctggttaaggttacatgtgtgaggaaaacatacaggcagaaattcttgtgttggcagatcactgactatgggagaggcttactttgtttttgcaaaagcatcaagaatttcaaaatcaatttcattctgtgtattattggattctctgatgtctaaattccttcacttacaggaaccgttgttgcacaaatattaacagaaggccacaaagtaatataaaaaaacccacaatttttaatgctcttttaaaaaaacaggccagtgcctctgatctaaaacagagaattgagaatattttagcattttcctctcatatgccatgtcttattaggtacacttactttcatattccacaatatgaaagccagaactctccctataagataagaagaaaaattcctaaggaagcatccttcaataagaaacatgtggttttatttagggctgtttttgaagtttaccytttttcagcagacatttaatgaatgtctaccmcagagaagcacagttgctytggtgaatgcmagaatggatatgacagggtgtctgcctttcgggagctcacagtttagtccctggattgcagtggaagtaaatatattaatacatgtcactatcctcctactagacctgctaaaggccaggcatggtggcttacaccygtgatctcagctctttgggaggtggaggcaggaggatccattgagcccaggagtttgagaccmacctgggcaatatagggagaccctgtctctacaaaaacttcaaaaaggaaaattagccaggcgtttgtgcctgtggttctagctattcaggaggctgaggcgggagggtcacttgagctcaggatgtcgaggctgctgtgagcgttgatcgcaccmctgcactccatcctggatgagagagtgagaccctgtctcmaaaagaaagaaaaagaaaagaaagaaaaaaaaaaaacctgctgaagctggcaggtatcaaagtgaagcctgctattaaagagatacacaacattctccctggggattggctaagggttactggtggagggaaggttagtattgagcactgcaggatgggtagttttgaggaggtggatctgagtgagaggtgtgttctagatggaaagtaccgaagagtaggagtattggagatctacaggatggtgttgggtcttaccttgggttctgccagttgcagaggcaaggattgggtgcaattagtttattagggatggtcctggaagcattagtaggggagtaaaggagcaaggcagggaaaggaaaggagtcagtaaattgtttgttattaagccaatgaccactgtgggcaagtggagccagtgctgctgggagctctgtaaacagtttgtaacatcctgcagatttatcccaaccaaggggcaagaaagccactgcctgtaactctcagatcatcgttgggttgagaactacctctaggagcattactgtggcccttccagagtgccctgaatagtcagagtgtgcttctgtggctagaattgcaagctctcatatgtggcgtacatagttagagccttcagcctatagagaagaaagggaatagaatgttgagggctgcttccattcaatgcatggtcagtggtggagatgtcaatcaaagaaaccaagaaggaagaggacagagataaagtagaatgccatgaagtgttttgggaggcggtgaaagggagagtttcaataaggagggaaaattgaaacgaagataatattttaccaaagggttagtaataattgtgctttccaaccccaaactttttaaacatgcattaacctgagaagtataatggaataggcttgcctttgtaagttggttgtagggtcgtagttctggctatgctattcactagccatgtgccctcaggtacattccttaacctgactgggtctcagcctcctgtggcataaaacaaaaccattgtttccaatctcttgcagcactaagatgcaattcctgtgagttcaaagatgtgacatgactcctgtctcactacttgtcatttattaagttcataagtgtattgcatgttaaacagagaagtaatctaatttcacagttaaatataatgctgatttaaattacttttgaaattaaaatgttaatggaataaataggctgtcctcccggcttcccccacattctttgaattctctacattgtatcrtctctgtctgctcctgtttctccacctcatcttagactctagaactatttttatttagtgttggtttacttttatctgtggctgttttggcagcaggaattatatccatttgcctgacacagagttttacgtggatcatgtgtttgaaagattaatataagcagttgcttctgaaacaatttaatcttgctttccatagtaatgaaaaatgaataatcaaaagcagtaaattgtgtctggaagataataaatacttcttatagcattttagcaccgactgtgaattatagccgacccgcagatcgggaggggtgagtatgaccaactggaactccacagtgtgtgctggcctttaatatcaggctttagctgcttgattcatttcattgctctctrtcaatacctggagaatctgctgtctgtcccactgatttaaaactaaaaacaaaacaaaacaaaacaaaaaaactaaacaattagaggagtctctgtttaaaacaccacaaaacagattttctgtctttctctcaaccaacacacaagcctaagtggacctaggtaagaatttcaaacgtaaatagtaacaacctgaattaattctagattcaggcactacagggaagctcctagggatgggtcttactcagaacctcatcaacttcttgcaaatggttgctgcttgagtgaaatctggaaggatacccccaagacttagtcttaccttcaaatacccactttcagcagacacgttcacgactcaggagctactcaagaagggacagcttttaaaaattagtgcatttctctaatgaggtctcctattgaagccctaaaataaatgacttcctttttaagtgcaaaacttaagaaatatatattttatatatatatatatatatttttttttttttttttttttttttttttgagatggagtctctctctgttgcccaggctggagtgcagtggcttgatcttggctcactacaagctctgccttctgggttcacaccatttccctgcctcagcctcctgagtagttgggactacaggcacccgccaccacgcccggctaattttttgtatttttagtagagacggggtttcactgtgttagctaggatggtctcgatctcctgaccttgtgatctgcctgcctcggcctcccaaagtgctgggattacaggcatgagccaccgcgcctggccaggaaatatatttgagcatggtattcagatttctaaatagtaataaaaataataagtatataaataaataaataaactaataaataaaatgcatctatagcctccctgctgtgatgaaacttaaaaattacttttcaaatgtagacttaatgtactctgtaaagtagcagtcaggcacagacaccaagagtttccttcagagctgatggcaaagggaattcaggtgtgacttgtgcaggtccggcttcatcactctgtttatctgcctgaattgaatgtgctttaatgtgtttatatttgcctgctagtctggtgtccaaaggaccatatcrtcacaacccccaaacaggacattgtctatgtcttgtgtactgaaaggaaccccaaatgacaggttcatttttttttatgctacctattagttgagatacatgagctaaggtgcttaacctcactgagcctcagcatcctctaaaatggtgataaagcttcccttcttttctatttctaaaatatgtttttaataacaactgaaaccgtgcatgatatatgtaaacccctttaacaattcgacacgataagcaaacacaaggggtggttaatctacctgacaaatgctgatttctcttatgtctgttttgattctattttaattacgaacataactatttcaaatgtctagtcaagagatattttcgtgccttatacttttgcatgagtttgtgttttcaaacttagaggtgcaattaggaaatctaagtcaatgagagaaaaatcaagtgagaaaaccagtcttttgagggaggagagattcttcctagtttattgtttctaaaaataagctttcctaatttagcacagctgttgaggagcagcaatgggatgtcagtagctgaaagtccccaagcgcacactgtactgtattgtcaaatccttgcagaactactgagaacattcctggcatatgggttttgttctaacaacttaacacagctcaatttttaaaatctgcttttatagaaatgttcaggttctcctggattcttttgaactcttgccagtaagtgatttaagcccttgacttggccatgagaacagaagttaaacaccaaagatgaataaccatgtggtctcttacacatgagaattgtccagttaattttttaagtcgccaagactagtctggcagaaagtatgtattttatttttgtccttaaacattacattttgagttatctcctgaagagattttgcaagaaactgrtctattctgtgtggaaagatggctatttctcagcgagtacctcacttcaaatcatttgttctgaagtgtcatggtgtaatgaaaataakaagaagcatgaggagatggttacgaaggaggaggtaggaggaggagtgaggaggaggagaagaagataaataagaagaggaggaagaggagatcataatgatgccttataaattgtttatttttcatcatttacaaaatggctttatgttttagaatctaatytaaaacttaaaacaccccagtgggagaactgatatcacaagtgaggaaactcagtttcttggacagtgtttcctatgcatcatatagcttaaaagagagctggtatttgaacttccaattcaaagtctgacatttttttctaccaaaatttgattccaaatcttaattcatatctctaaatgtatgaataaaatattgtgaaccatataaatgagagtatcttctctataaacctggggaggggtggtggttgtgttcctttctcatctgttgttttcaaaggcgagtcatttccagttttcccttccagaagtgacatgctcattggggatttactcaatccagttacccagttaatcaagaagactgagcccccagaggttaagtcacatcattatgaagaagaagatctgaaccccggtctcctatcctttcatttgtactattatattgtcatgtaattcaccttttctcaacaaatgtgcaagtgctaaacagtgtgagtttacattatgagcctattgataaaacgtcttggaccagtgtcctgcgcagagtgagtgctatatagaaatttgataaatgaaataaataaaaaattgtgttatgagaagaaagaatgaaacatggtaagtttatttagagtccatctcagacgtaggaggacatatccaccaagctcccaagaaggaaaatactttaatgatattaatggatattactgggggggggggraaacatacagtttatattattttcttagaagcacactaatttttaggactagatggatcagttttatagcagtcaggacatctgattgtggcagctgtcaatgcatatgaccttctccttcttcaagacacatcaacaggaagttagcagaaactacacatttgaaatgtaatgactacaaccctttcaatggcttccgtcttagaagaaaaaagttctgtcattttgatggcacacaataaattccaaagccacagtttgttaaagtcctaacctccagtgcctccaaatgtgactatatttggagacagggtctttaaagagcaaattaaatgaggccattaggggaaaatttgtgctcaggcacaggatatgaagacatgggtagaagatagccaagaagagaagccacagaagaaacgaaatctgctgacctgacaytgtgatcttggacttttaacctcccaaactatgagaaaataaaatacgttatttaagaaactcagtctatggtactttgttatggcagcctaagcaaactaatacactaatacactgttgtacgtcagtagctctcaagcccagctgtgttttagaatcactttagaatttttttcaacaatgctgatacagctccatcccagagcagtggaatcatgatctctggggatggggtttgggtggctgtgttcttcaatgctccccaggagattccgatactgtttgggttgagaatcactggttttcattgttctcccagaagagttcccaactggttcctttcaaggaggggaaaaaaaatcttccatccactgtctggcttgttgaagcacattactcagagaacagagggagccaacccatatggatcaataatggtccactgtgactcacccttagaatcatctgagtatctatgtttaagacaacctatgagtgattctaatggtaatttaggttaagaaaggcctaatatttgttttgcatatatgagtgtatatatgtgtgtatgcattgtcttcaacaaggaaaaattacctataagtccatcaaggagcctgttcatttttgggggggtgcaggggagcaggtggtggtctgtggttgtttccttgggtctttttttctttattattctcttcaatgatgagagtgttcaggacactgggattgattttaacaagtaggtgtggaatttcacagtttggtgttttgtagttatgacctcaggttaaccagtattttccctttctaaaacctgctgttagagcaaaaagtcagatgctaacaaattatgttcacaattgaagtgaaaattggactcttaattcgtttgctaatcactcctatttatgaatatattaatcagcctccatggggaatttatctgtcatgtgcagtcaaatatatatgcaatatttcattgacctaaagtcactgatcctcagcctaaacaagttaagatcatgttggaaaaaagaaacgcctgtggcatgtcaaactagatgtcaagctaataactaccacctgttgtgaatgatactatgtgcttacatgcacaatcacaaaatagccctaggtgatactattccctagtatacatgggaatgtgttactattcccattttacaggtgaggaaattatgatcaggtgagagatgctgggcaactcagtgatcctggactggcatgaaggaagaagccctttgactcctcagctcaagctcttaacaattattactctctgctgagctatggcatatccaccaactcctcaatgagatacttcacagattgttttattctcttttggtcctaatagcaagtttggtttttggattttctaaccaatatcaagttagaataagcttctcaataaaaaaaaaaaatcaaaaccacaacttatgaaataaacatttttcaaggtgatkgatycctttacaaaattttattttcacttaaaagaagacatactaccattttcttgaatataaggagattctgtaatacatgtttccacgcattaaattgtaaagatatctatatgcctataggctatattcrtaatcccaccctaatggaaaaacaggatcttctagtttttgacctgttggtgtctttgtatcattgaaagtggaaatgagtatttttaatattaagttttacaccaagcaaaactactttctgtagttccaggtagttctaggtagtcatcagaggaaatatctgcaaatagtcatttgagttgatagatttgaacttgcagttttatatctttgtatttccaacactgtctacctcttaaaattacctggattataagcattctgaggttgattaccctgtcaaaaatttacctctaaatctgcaggagttcacatactacagaacaaattagccaaaaagtgttgattgaatgtagcctaataattgttattaaatatcctctaagtaactgaaaatgatacacgtgtgtgccatatgtgtgtatgtatgtgtacatatgtgtgtgtatatgtgtgttcatatatatgtgtatgtatatgtgtgcktgtgtgtgtgtgtgtgtgtgtgtgtgtgtgtacagtggtttcaagcacatttttcagagttaggctgacttagaccaaaattcttgctccacttttcactccctgagtcaccttggggaagttacttaatctgctggagtcatacctttttttttcctgtaagatgagaacagtaatgcctacttggaggtggagattaatgacagaataaaggtggagcacttcaaggtgtgccatcctggcccgctgaatgtgtagtaagagctaagcaatattatagtattaaacaattaaacaccattctaatgaatgtttcattttccccaaactgaactacagtaattgtacaaagtaaggtaacacctgtatatttgaggacaatgatggtaacagcacaaatgaaatttccctggtcttacttagaagcgcttttcttttgctgaatctttgtgaggttcccctgtgtcctgatgtgagcaagaccacctactgctgtgcgccaagaccagtagtcagggatgtggaaatgtttttggaagaagaagtggaacgagaagaaccagaatggcttcttttatccaaggctaatcttgtgagcagtaggagggaaagtcaggcctgtccaaagcagcttgagcctttctttgcagaagggtagatgctgaataaaaacttgcaaacacagtgacaagaaggcaggatccagaattaggttcaaattgaccctaagtttttaaaggtcattctctagcttgggagagaacctgggaaaggtggcagagtgaagtcactctgggaccacatggccgggacactgatggctcagccccttactagctgtgtggcctcggacaagtctttatgcttttctgtggccagttcccttaatgtaaactgtgattaaaatcacacttaccttttagagttgttgtgaagattgagtaaattaatttatgaaagtgcttggaacaacataaggcaaaaaatataaggattcattaactgttagctgtcataatctacgtatctcaaaggctgaatggtcagtttttctctctccaacatttttctcyctctttttttcatgattgcatctgaacttatgtgcatttctatttaagaggtgacacttgccagtgtgtggttttctgggtgcagacaaatgtatggcattatgattgataggtcctaagactgttctgtcattaaattgtggtcatggaaacagtaacttttcatattaagactgacttatcattcttactaatctttaagatgcaaaatctatattataataagcatgggttagcacagaacacatttgcaggcagagaacgaaaacatttctgaggttagagcatgaattagtttttagaaaaggtgtttgctcaggattcaaatagcatttcttgttctctgtgataaactttttggagtttttgataggtctggactcccccacagccttcattaatttatcttccttgttgcctgctgaaagtgtgctgggaaaacagaactggtgctttcacgtttcctttctccctgctcttttgcattcagaatcttagggatttaacttgtcactaagccccatttagagccactgatctctgaattctgctgtttggtttttcatgctgctattctagaatatgctacaaggctcacagatgttgttatccaggaaattccaaagggcagcatggggctgctcaggtgccaacctctgtctccagttgagatgtgtgtggctggctgacattttatgccagggcctcttgtgttgccgattcagccaacatttagtgaaatctcacactggcccgggctcaatgctaagaagttgcagatgccttctcatttactcctcacaatatcctcatccctattttgcagactgctgaggagcccgagcaatgccaataaaaaagcatcactcctctcagcctgagtactgaacaatttgagaaataaagtgaaagaatacaggccaaagaattgtatttatcaattagaaatgctaagttggtggatgcaggttagtgtcatagccaaatgagcatgtgatggctgaatctcagaactaggcagatgtacgcaccagtcacacagaagtggaaacttcctcacttggccccctgacccaagcagcatctgagctctgggaggggcagtggaatcgggttccctatgagtagcttaatcccaagacaaagaagtgtagagctgagtgcagtatacctggttattcttcccaaatgcactaactcaatgagtcacccctctccctccttagaaatgaatagaatgggtcaagtgttggggagaggccaggagtgcatttagggaacatacatcctcatgaaaatcagtgtaggttgttcagatgaggaaactgaagcatggagaagttcagtaacttgcaaaggttacacacatccttagcagtggagctcaaagtttaatacagtctttgtacttatgtaccttatgctgaattggggcttttctcagaattgaaaaaattggaattatgacataggaaagaactgtggaaagtcattcagcctccagaattcaaaacgatattttatataaattatccaagaacaataggtgggtattttctcccttagattggcttcatctttactttcactgttaactttctgttgaaagttctggctgcttccccttccacaacatgggccacttccttttcttgaagttaccatggccaaccattgaacttgctttttctgaaagtgactctgacttggtacactgaagctcatgtgtcctttccccatgccttgtcttgtctaactctaactacctccttagccagaggccaatgctgcccctgcaccaatcggctttgacaactgtgtatacggcccctgcctgacctgcctgtactcagcgttggcagcctcgttgaggtttcattcattgccttcaggccctgcttctaaaaatttctccttcttttaaatgtggttaacatgatgtttaatatttaaaattaacaattttgcatttttaaccttgacattggatggctgaactgcatcctcttcaaggacagcttgcacagccttcttgaagggtaggaccctacttcaaattgtgttcaaggtcaggtgtctgctttcctgtggctgtggggggttgggtagggtagggatttatgggtatgattcccattaggaggcttcttggaagatctttatgaatgagctagagagagggattgaaggagacataatgtcacagcctctggttcctacaaggccttggttccaacacaagactggaaacaattagcagcagcaagaatttgctgtttatggaggagtgggaggaatgaagtaaatcttgtatttggaattaaacatgggaatttggacctgtatctcaatcaggtgaatcagaagatatgctccagaagccatgaaatccctaagtctgtttacatcttgggtgataattttggaagcctaaaatagcctttgcctttgtggctatgctaaactgatactatggaacagttatagattatgttctcttgatattattaactagatgaatttgcattgtttagaaactaggctttcagtatggccccttttaattgcaatattgaaaatcctggtaaacttggacttccaaacttgggtttctctagaaatcaagaagttttaaaacagaatcctgatctttactggtcaggcttgaaatttagtttcaagataattttcccagagactatagaacagctttagtttagaattagacaaggtgattctttttttttcccctcttttcctctttgctgaacctccaatagatgagcagaaaggtttaggtgattttgcaaagtgatttttcaagcacttgactgaaagctgtagccttgagggaccttggaaagagaattgccttactgccttcttcaccaagagttacccactcgccttgtgtggtgaagaagggtttctgatttatggccaggttcattggtgggtcactctggtggagcttgtcctaagcattttaatttggatggtggagctagggaagcctcagcacagctccgcggataaggttgtaaccagccttccatgacctgtcttgtctctgattcccttgagcgagtgttattctttggactgtcaaattggcacctttggatatttctctgaccttgaaaattagaataattaagtttcctcttgcacagtggggtttgatatgcgtaattaacagcagccagcattccccagagatcacattttgtaaaacattaagggaggaaagacacaaaccttcttgaatgaagggatatggacgttagttacatatgactgtggcagtatttggatgttccttttcatgtgactgtagatatttccatgaaatttagtaatgcacattccctttatttatttttggtagctcctatcatgtgaaacagagggaagtgaataattggcaactggataatgagtggggacaagatctgaaaaagtcctttatagtgaagaagaaagttaattgtaggctacattaactttgttgcagtaaaaccaatttttagatcataataattgtgtttgtgcatttctgcatgtcatggtcccaagctatgatggtgccccacatcaactggtcacataggagtagatgcctaaacaagtgcaatgcatgtttttgagtccttgtctttttaaagacttcttcaaataactctgatcctttatggcactattttctctgaaattttctttgggcctttatacatagataggcagatagacagagagaaagaacacaatccattaggaaacagttctgtctgttgattgctcttagaaattaactgtttgctttcagccaatgggagttagaagaactaactgtgggtatactgtcaaccagtgagcattagtgttccatactgtgactgctccctgctgctgagctctcctaattaactctggattctggactctgattctggcctttatttcatggtgtgggaactgatgtcaaaaagtatgcaagtgatagtatcggactgtttataaagattaagaaagagcatcattcttgttgcaaaaacgtggattttacagtaattttagataacttcaaggaaatgatctggtaatccagcagcagagaccaataggcaattagaaattagtggaggtccttcgaaattatgaaggacatcataatgtcttgccactggggaggggttgagcaataacttaagggtggtagttggtagagaatatggcagagaagaaatttctgaagcgcatagaaaggttgttaaagtactacaatgggaccacataccctatagggatggtgctattgtgaccttatataccgtgattcagttaatgataaatggaacaaatgaatactcactcttcgatagaaaagactaaaaggtgagtgggagagtgattaagtgtatcataagcatctgtgacagtgatcctaatttggtatccctattttatttatttatattttttgagacagtgtcttgctctgtcacccaggctagagtgcagtggtgagatcacggctcactgaagccttgaccttctccccacaacctggtctcaagcaaccctcccacctctgcctcctgagtagctgggactataggtgtgtgctgccatacccagctaatttttgtattttttgtagagatggggtttcaccatgttgcccaggctgatcttgaactcctgggctcaagcaattggcccactacagcctcccaaagtgttgggattacaggtgtgaccctctacacctagcctgatatccctgttttaattactgattttcacccaacaccattcatatctttgccgattagctccacttctctcaaaaaataagtccgtattgaaaggatttgaatgttaagaaagtctccaaaagctgttatcagggcctggagtcagtgaatgagtcatagcaagacagattattactcagatgctgctttgcttcctattcaccagtaaaaccaaatgagatcagttaaatgttcatcatgtgctgataccaagctcgctgcactttaagccaagcaaaatggttgattcccctttctttgagtcttttccttgttttagtcagctttccaagttctttggccccaaatagaagattttttttgtacctatccagatttcaaattaagactagaaccattttccaattttttttttttgtaaaaaagaaagaaaagaataaaagtcacgtgggatcaaatgagtctaagaatcaatgaccactttattttttctttgagaatcaaattacatataagcatagtctagctctgagaagtccttcactaaagaaatgtactttatttaaactcaagcttttactaactatattcaacaagataaaataacttttattaagactctatkgtttttggcattattttattgcctacccatcgttttttcccccaagtaacaactgttaattgtctaggtgaaatgcaaaactatcaaataaatgttcatataagaaaaacgcagtgttgtacaaccatatgtgacttgtagacctcatgatctaaatcagtgctatctaataaatatataatgccagccacatatgtaagttttttcaaggaaattcttttatttgtttttttgttaactgaaacacatttagatatacatattttcaggttacagccacatatgtagttttatattttccagtaaaaaagacaaaaaaggtaaaaataattgtaataaaatgttctatttaactccctatatccaaatattatttcaacatgtaatgaaaattaaaagttattggtaagatactttacattatttgcctactaagtcatgaaaatccagtgcaaatttacacttaaagcacacctcaatttagactagttccatttcaagaacttggtagccacacatgactaatggctaccatttgggatgatgcaggtccagagtaagctgcaatgcaaaaagtatgcaagtgatagtatctgactgttcatgaagattaataaaaaagtatcattctagttgcaaaaacatggattttatagtaattcttcttcccacgagtatagtgcaaccagcctgatctggtcccaacaacatcatctggaattaggccagcctctggaaatcatttggtaaaagacatataggaactcaacatttatatttctttaatttttctgtttcatcccactccattgtcaagtgtgcccccatgagaagtgaacacgattggtagaaaccttgattacttaatggaagtcagcaggaagggattcaaaacctcacttaactttatcaggatatattttaattttacttatggtaggcctttgagttgatcttccatgttttagaactctgataggcatttggatgtggctgaaaaatattgagacttattaratggaaccactggattggactttgaagggccagtgaaattttaaatgcagtatcattagagtagacgtgtgtgcatgtgtttattaggtaatagataatgaaagtaatacttaacatttactttttttttccacgtgccaagccctatttaataggcatcatctgttttaatccttacaattccatgaatagcctcattatacagataaagaaaataaggcttaggcagcttagggaaatttgactgaggtcccacagttgttggctatattcaatgccagagcccatatgcttatagaacagggagttcccatgtactgtatttccaataatctgcaacctttgaggatcaaccgagattgagaaatcaggatagtaaggctgtagaccaaccactttgcaagaatgtgtcctctgggggaatatccctgaatatttttgacactagaatggtgttcacataactttcctcaattctatgattgtgaagatcatataatttctattttaaagattgcaatttgtcctggagagtcaagattattctctgggtacagctttagtttatccatgccttgcaattttaaacatgatgactctctctgttcccagamattgtggctctgacaagctcctgctgcagtcacttcattaatcttactctaccagggcacctgttcactattgtgcggtgtcggctgrtatcatatggtaattatgttgttaattcatgggctgatgttttccaggctgaagcatggcttcttacaggtagtgatctgggcaatcaaactgagcagacaagaaaaacactgacaattgtctgcttctactagcttggttgtatgacatgactctgggtggaacaatggccatttgttgaatatggtctttttcatggggctgctactcagcagaaagtcccttagttaagtggtgatataaagcacaaactcttgagcaagattcaacttgacctgaatcctagctccactccttacttttagatcttaaagttacttaacctctcactgtccttatttacatgatgggaataataaaaaagccagtatctgatgcaaactattagcccaataaacacacaataaatgttcatttctattattgttatttggcaaatatgtattgatgcctaacttttacttagcaacatgaaaaagcttcttagagaaaatggtactctagttcagctttccataaataagaccaaataaataggttgagataagatagaaggatgttacagatggcagcttgtgtggtctgttgtggcttgggttgttgaacgctgagaatctgcaatgagatttttgcctttcagtctcatgtgatataatttctgaaggacttagactacaattttggctttactacttcttagcagggtgacttgggcaagttacttgactacttcgtttcttccaaaagtgcaggtaataatggtacctacttcataaggtctctcctaggattaaataagtaaagcctatcaaacacctaaaccagtgtctggtccatggtaaatgttcaggagcaattagctattgtttataatattattacttatggaggttatagtttcactggggaggcagacttagcacatgaaataataagtgacctatgattcattgtcacatgtataacatgtagtcaaagacagtagtttttaaccatttcaccaataagaacctccttatcattccctcttccagtgactctgttaaaaaaatcacgcaaaacagcaccacagaaacttttgttttcttattataaaagcagtgaatggacattgtagacaaattataaaatatagatgaacaaggtgtggtggtgaaaccagaactataatcacatttctcagagataacaattgctaacaccttgatatgttagcttttcatatctttgtgtgcacatatatatatttttaaaaaatagaattatactattcatactatttttgtacttagtaaattatgagtatttgtatctattaataaatatttatcagccatttattaatgattaaatactattccattgatgaatgcactgtcattctttcaagcagtctgtaccgtggcatgtgtaaggtcttccatttttgggcatgtgtgccatggtgaacagcgctaggatgagactgccttatgcctacatgaccatggatgcctgggtaaagaggatgatcatgggtctgtatcttggaggtaagggcctaggcaggcctgttgtccacttctggagcaggagaggacacaggcaaggcagtcccaagtggtgaatccaagactggaggggagacagagtataaaatgtgatttatgagagcatagccaaggtaagccaaaaagggcctgtaggtcctgtggatgaagaccagaaagagcctccagttagcaggagaggccttttctggaacaccagtcccctaagcctctctttaatcgtgattctatgaatttctgccctacgaggtcagagaagggccaacagctccatgagatggggtagttagaaaacctccctgaagcagatgttttgggtaataagtaaaaatgaataggcagagatacaatggaagcatgcttcagaaggaagaattgcaggtctagtgtggtgtggcttggaacctgtgagttctgagaaggtggcagtgcagttgcaggcttgtattcacactggggagcctctggtagctgcccatgagtttctgtgcaaagaaccatgactcatctttgttggcagaaaagtggggaagaaaaacaaaccaatgaacattagtcgatatcctggcttaaaaaaaatctattaaaaaatcaccatatccaaattagcttaatctcccaaaaactgtatttaatataaccatacatgaaagtaaataaactgaaataggctgggtgctgtggctcacacctgtaatcctagcactttgggaggctgaggcgggcggatcgcctgaggtcaggagttccacaccagcctgaccaatatggtgaaacccgtctctactcaagagtacaaaaattagcccggtacggtggcgtgcacctgtagtcccagccactcaggaggctgaggcaggagaattgcttgaacccaggagggggaggttgcagtgagccaaaatcatgccactgcactccagcctgggctacaaagcgagactccatctcaaaaaacaaaataaataaataaataaaaataaactgaaatatcttggaccactgtgtcagaattatgccagcagctctcctgtctgttacctggctggtagctgagcagaaagcatcatcttcttctttaaagcctactgcttatgcccagaagaaaacttctagttttccctaacatattgcctattgttaggttgtttcctttctttcctgctatggtaaacagtgctacgatgagactatggtattccagctcagttattttaaatattttatctaatggaattttactgtatttttgccctggagacttgcagcagtgggcagaaccatgcagggctaactgataaataataaatgtgataatgcccattaatctgtatttggaagcagtgtttcctctgctcttttcaggttttgacatttacttgtactgtttgccctgtatgtggaggtttatatagttacactttccatggaaacatcttctttaaatttccagaacctgtaacatatatttttctctactattaacccagtagggaagaatgttcatattagaatgaggtcaagcttgttttctgtaatttgccatgaaactctgagaaacccagtgttcttatctgcacccccttatttctgctgttccccttcccagccaccagcagagtgacctttctttgtttatatctctgacctgctcagtttccatggtggtgtggagcattgtgactgttttagagataaatggcttttcactggcttttccaatgacatttttacatggtgagcttttayagcctgtaatatactatagagaaaaatgacaagaggcagcacaattttgcttgatcttggccctgagcaggctgtgaggcagggatgggaccagtcctacaaacaccagagtccttgctctctgattttgtgtcagagttttaatccattaactttattcagcagaattcactaaccagcattgtacatgccttccagggaccatgcacaggcacttgataactgtttggtaaatttgaacttaggcaaaatttgcaactacttattataatgtgttaagaaaattgattatatttctccatatcaaaaaaggcattcactgacaactttgagatgcagttatgatcctttacccctactgcatcatggcctgctggggtgcaatcctcatccatcctttggcagtagaaagaccctgtgagtaacacagtccatgaagggtggatgcctgaatggtgcagccctgggcacatgtgagcatggtacgatggccacccttcagtgtgctgtgagagagcatgctgccagagagccttggaatccatttcagacatttagagggcttgatgcatcctcttacctgcggggagttccagttggccattggagctgctcctgtagtgcccaggaggtgagagagcacagagtggtggaaagagtgaaggagcagctttcagtgcctcattacactccttggcagctttgtagcttgggtaaatctcaacgtatctctgagcctaacagtccacttccatattattttaacgggcctacttgtgtacctaccttccaggttattgtcaggttccattaaataaactcctctggttcttcacaactctctccaacttcactgcctatgcctggaagaagaggtgtttggaagtatttgatgatagaatgaaaagtattgcacagataattttggtcaaaccttttcaattttggagcagatggggtctcattcacttcctgctcattggagggtagtgcaaatgcctcaattgcttaattgagggaacagccaactgtggtttgatgtcatgatacattctattgtgccagtcatcaaacccacatttccttggggcccaaaataggaatccggttgttgtaggacatgtatttttgcattgtttcaaatgctagttgatctttaactttgcatgccttatatacattcctggagctctttcaaagtataatattaagcaagagaagctatggtttgtgtatggcacaaaaaaaaaataagaaaaaagaaaatgttttcctttgttttgtctttggcccagggtttattgctgccagggacctatttattagccagctttaaaaagcagctgttctctgtcttcttttttcctccaatgatgcctgccttggatatttgggcatggcttaatgttaggcgatgctctgtaaagcgagttctgggaaatggatttcatacctctttcagagggtagagaaattgaagcataaatattgaatccacgtattaaagagaaggtagataattaagctcttgtctggtccctggcagcttgttgatgtgtttttattttctagtgaatgagtgatattcttcaaagagaggtgccatctgggaaatcaggtctctgctgaagcatagccatgatccctgcattgccatgttctgcacaggtccagctctaacccacaggcgaacggcagggctggactaattacgcagctgtcagaatcacacaaatgaatggactgggagttctgcttccttgtctgtgacagtgtgtattggtttggatttcacttttctaacagtggtattttaacaggcaagagagcatttgtatgaaattgaaaactttctaaaaacagtattaagaagtgtatctgtgcatgcttgcagcccagtgatacagagcttgctaccagcacaaagccaccattgcttgtaagacaaatagatgaaatttagcatcccactgcaagagagtgactttcataccctgcagaaacatactcacatgcacaacacatgcacctagtacctctactcattagatatatgttatggacattgtatagctgaagtataattatgttgtagatatgtaacaggaagctttttgatatagaatgtttctccttgaataggggaggcaactccctctcctgaatgaaccatcaccactgcactacagacatgttgtgaaatcatccagaaaccaaatagaagatcccctttttttctgttctgagctatgtgaaccaggaaaatgtgtgaagggccatgccatgcctagccatattggagtccatggctaaaggaaaaatcactaatactgactttgtctttatacaaaattttgatatttggtttatcatgggttgcattaattttgatttttaaaaaagtttgcattaagatattacttaataggttggaactctttgggcaaccacttaaactttatatccctagtcccagccctgttgagggtccctttgcatttctctgtggatgagaggagagagataagggcttcccatgctttttctgctgcctatcacactctcccctcctccctaccatatctggttatgggatagcaactgaatcaggcatagccttcattcatgaagttaatggtctggaagtaatgatagacaaaatcagattaaacacatttataaatatcagagtaaatacatttataaaaattagagttaacacatttataaatacattttttacaaagggagatggaaaaaaatgaacatcataatgttgaaaacaagggtgggtatggtgatgaagaatcttacttgagcagttagaacagacacacagatgagctgacatttaagttcacacctgatgaaaagaaaccacaagacaaggtgtcgggagagacctccaagtagaggacactgtgtgaagacctaaagttaaaaacagattggctggtgtcagcaagtgtgttaagtaaggcaggaggtgaggcacagggaagagggccagagtcagaggcagggaccagatgacatacagtccttgaaggttaatgttagatgttcaaataggggaatgacggtgtttagaagacatctctgagaaacttcctctcaccctcgcctcgacttgctgtacccacagcagcctctatcatggtacttattgcagtgtagcaaatgctttgttatatgtttgaaggtactcccacccttgatactgcagatagcagtctgctgaaaaagagctttggagatcaggaaagctcttcgcagtatccattgggagtcttaggatcagaatctcrtactctgaatgcatgaatatttttttgtggtatacattttcttcagttacttctctgtctccttaaagaaaatactgcctcatctcagctttaaggaattattattttgctttttgaggttgtttttatttttattttttctttctaatttttattttaggttcagggagtacatgtgcaagtttgtcttatgaataaattgcatgtcatgggggtttgatgtacagattatttcatcatccagggagtaagcatagtatctgataggtagtttttccatcctcactctcctcccaccctccacccttgagtatgtcctggtatctatcgttcccttctctgtgtccatgtgtactcgctgttttgctcccacttstaagtgagaacatgtggtatttggttttctgttcctgcgttaatttgcttaggataatggcctccagcaagctttaaagaaattttatctaaagttttaaggagaatccagtatcctgctgtttcaagaatcacaaaggaaggtaaaaccaaagtgagaaaatagtaaaggaaagagtggaagaccacctagagaacttcttccaaagcagagactcctttgtttcttattatctgctaaaaaccataggatgttttaggccttgttttaccaagatttatttctttgctcatgccgaagaatttcaatatctaatttattaattagctttccatttcaacaacttgttcagtgacagattttcctttgttgatgtgttttaggaattgaaattcctacaatatataagaggttaataaaaaagtgtttgtcttattccctggccaatagaacttccagtacttcttgttctcatctgtctcagagagaaatctcactttcctgcagtcaactctgttgcccattggcattttttaagtcctttatcctctccttctgcaaacacacattagtgtctgctgcatgtgacttggcaattgtgcaaagaaacaagatgcacaagccccatgctcagcgtggagcagcctgcttcttgatggtttatggggtgacagcatcatttgatgtgctttggaagcatgctagagtgagaagtttattttgctttgctattaccttcacagaggagcaaatatttataaccakactcaaaagatgtctaataatgtgtggtattgaccaatttatatmmtgttccttgactataattgctggcatgctctcattttgtatcagtcttgtctgaacaagtgagaggcagatattctttagcaaattattgaatcgttagtgtgtttcttggagataatgtaacatagtgtttagaattgctggttctggaacaagactacctgtctacaaattccaggtctgccagctgacagcgtctgtaaccctgggaaacatcctgaaaccctccaaagttcatatttcttacctgtaaaatggggttgaatactactagaatctacctcatacagtttctgtgaaaataaatgaaataatccttgtaaagcactatttagcatagtgactagcaactaacaaacatccaatcaatggtacctatttttattggcatcagaattgacttggggagtttattaaaaacactggcccttgggtcccactgagactcactggatcagctgttcaaggtaatttttggaatctgtatttctaacaagcactccaggttatttacactggtagtctggcactcatatcttactggggcttgtcaactacagaacttcaaagggtaaatgcctggacattagttagaaaagcctgagcttgaattgcagttctccgacccctttctgtcggtgtgacattggatgttttacctatttttcctgaccttctgtttcttaacttytaaaataggggtgatgtttttctaggtttgtgatgaaaccacgtgaatgtggtaaaataataaatgttggatactaagcacctagcacatggttaagggctttataaagcatggcttctggtctcacgagtgtgtgccagccatggtgtcagatgctggggatccaaagacaatagacaccttgaggtttgcagccagaagtgtaaaggatgagtgttttaatcaagaataacacctaatggttgggagggtccctaaaaatcacctagtccaaactggtggagggattgtcctttaacattccccacaagtggtgatcttctaaatggcacacaactctgtcacaagttagagcaaaccacagtgtgcctccttgtgtattctaattgttggtcctggcatgtaggtccctctgggggcccacagagtaagtttcatccttggatgcagttaccatcttcaaatatctgaaggcagatgtcatatttcccctgcctttaatttttcaaatcactatctccgattacttaaagtgtttctcatatagggtaatttggggcttccccagacccacattctgctcccattagcagggttttcttcagcctgagggaagctcagggaacaactgtcrtggcatggatgcctcagcagaagggcatatagggccccttaaatggtctgcatgggaacagcataggaaataatgctgttgcatgtgataatcgtacattaactagttatgccaaagtgggtggatttgataactgtggaagaacattggaaggataagtcggaaaaataagggcttcttagaatgtacctagaatatcctgagctttcatttaagcccagtgtctgtttgaaagttattcttttggaatgtttaagtatttctagcacattaagcttatctggctttgctgtgcttataacaaataaaaacgytctgggacctgtttgagaggaccatgccatttaaactctgtgagctaatgagaaggccaaagcatacatttgataagctttgtcatctttttgtctgcagatcatagaccttgcattttaatttactatacataatgctttcttaatgagttccagtggatggccattgaaacatgctggagcagctgccgacgtgattatgggggagaaaaagcatttatttgatttacgtgatatgcagttagggtaactaatatttgcagccggggtacaataatggcaaggaaaaaaatttgcagtattactgtggacaggagaaaggtgctgaatcaatttatttttccygtacatgtgaaaactactaattgaaagctaatggaattgcattttaaatgttgagtatcttgctagacattggttagcattgtgccagaaagttcatattaagccaatgcaattatcagaattattttttaagtgaaaattgaattgagtttccagggactgattttggctatgttataaaacattgcccttcacaatggttgaactagtttacagtcccaccaacagtgtaaaagtgttcctgtttctccacatcctctccagcacctgttgtttcctgacttttaatgatcgccattctaactggtgtgagatggtatctcattgtggttttgatttgcatttctctgatggccagtgatgatgagcattttttcatgtgtgaaaccatcattctgagcaaactgccacaaggacagaaaaccaaacaccgcatgttctcactcataggtgggaattgaacaatgagaacacttggacacagggtggggaacatcacacatcagggcctgtcatggggtggggggcaggcagagggatagcattcggagaaatacctgatgtaaatgatgagttaatgggtgcagcacaccaacatggcacatgtatacatatgtaacaaacctgcacgttgtaaaacttaaagtataataaaaaaaaatgcctttaaaagttaattgtggattggtgaaacagggaaaaaaaaagattggagataattcctaagagtaaaacatcaacaaagtcacagatgtaattaccatagtcataaatagtagcatttagtattaataagtgttgaaaagcactttcatgtacatcacctgatttcattatcttaattctatacagcaggtactattgtcctaccttccagatggggaaatggaggctttaaaagcttaattatgtatccaaggtaggaatgataggaagaatggtaggaatgatcaaatatgatgtgagctctgactctttgactctaaattttatttctagggataatatctgttctaataccttcaaacatttttgtctccaaatatatattatgaaagtattagttaaattgtaaattactatctgtatggatgtatgggatgattattactattaacaatctcaaatagttaaaccaggaagtggaaacggaaaatggaaaacaagcaatcaaagacccaaaattgaagggtgtacttaaaaagacaaaaatggcttttagatattgagttattagagttttatgtcttgttttcgaagccatgcttcaaatctatcacttatgcactcagcatccccattgtctctgtccactcgcctggccaggtagccaaaactttgcctccattccgcatatcttttttttttaaattttttaattattttattttattattattatactttaagttttagggtacatgtacacaatgtgcaggttaattacatatgtatacatgtgccatgctggtgtgctgcacccattaactcgtcatttagcattaggtgtatctcctaatgctatccctcccccctccccccaccccacaacagtccccagagtgtgatgttccgcttcctgtgtccatgtgttctcattgttcaattcccacctatgagtgagaacatgcggtgtttggttttttgtctttgctatagtttactgagaatgatgatttccaatttcatccatgtccctacaaaggacatgaactcatcattttgtatggctgcatagtattccatggtgtatatgtgccacattttcttaatccagtctatcattgttggacatttggcttggttccaagtctttgctattgtgaatagtgccgcaataaacacgtgtgcatgtgtctttatagcagcatgatttatagtcttttgggtatatacccagtaatgggatggctgggtcaaatggtatttctagttctagatccctgaggaatctccacactgacttccacaatggttgaactagtttacagtcccaccaacagtgtaaaagtgttcctatttctccacatcctctccagcacctgttgtttcctgactttttaatgattgccattctaactggtgtgagatggtatctcgttgttttgatttgcatttctctgatggacagtgatggtgagcattttttcatgtgttttttggctgcataaatatcttttgacatatttagtaattctcctcttttgtgaacacacaaacacacactggggactctacttattatcttgcctttttttgttagcccttcttcagtccctactttgtgtaaagacagaaacccgtgattagcccacttgtcagtactcaaatgcccttatccttgggcctatacataatttaaatagttttatcatgtctgcatatgtccagggcttattactcacaattttgtttcttggtgttggtctgtcatgcatccccagtcccttaaagctgtgcctgtgccacctgctctgtatagcacccagaacaaaccacttacttgatgatgggtgttgctgagggctgagcttatgccatgttcttctaatatggaggcaatagcatttctgtttttgaacattttttctgaagtgccattgtttctccaatcctaggactgcagcattaacttccttcttctatcctgtaagaagaaagtaaaatacaaatattaacacaggtccatagccctatatcaaaaccactggggycagatgtattttggaattcagaattttagaaaggcaattgggagtgagcatatgacataggagaagtcacatatataacatatgcatgacattctctgtagagcctagggcagtgccttgtaatcaaatactttaagatgtcagcggcaaaacatatggagagtcacaccagtgggctgagtacaatagcctcactttgggccaggtcgggtttaatcattacatggtttctgattagatcaggttttgcagttaaatgagttttcagagcttttgagattttagaattgtggatagagcatggattgtagccctgtaataacagaaaaatcactttatgaagtaactcccctgccatgcatcttgttataagaatttgagattccattctcttagacaaaaggacacattttcatataataaaatgcatcaaattggaatatggttggcctaacatagtgcttaataaacttgatggaagaagcctttgaaagctcccttgtcatatataaccttttgtatagcatctttaatgcactggcttttagtatattttaaagccaggtgtagtgtaattcttcttttttcttcagagaaactgtggtaggatcagtgcaaagccaagcaatgtttggagggtgtattagtccattctcatgctattaataaagacatacccaagactgggtgatttataaaggagagaggtttaactgactcacagttcaacatggctggggaggcctcaggaaacttacagtcatggtggaagaagaagcaaacatgtccttcttcatctggcagcagcaaggagaagtgcagagtgaaggggtggggaaactcccttatataaccatgagatctcttgagaactcactcactatcatgagaacaccatggaggtaagcgcccccatgatgggaactacagttgaagatgagatttgggtggggacacagccatatcatatcagagggtgtggataattttagaagccctgtgccaatctctataaattattatgattttttgctaatgatttctttttcttggatgtgaagccatagccaaactttcaaggtgtcttgtcatctcaaagtcattttcaaatgtattctgaattttgagccaaatcataatttctcagcatgggttcattgtctgtgagggtcataacttaacgaaccatagggctgatcaaggtcattgtatatgttactgatgattaaaaaataaaaggcaggcatgtgggatcttgattgtttcattcaaaaacccaaaattgttcaggaactcataaattagccctgtttaatgtttatgaagacaattagggaaagattgcttcaaagtaataactgttataaaaatgagacctttttaaaaccctgatttataaagcacttatttgccttcaagaattttgggggctgatttataagctgattcgccatctgtctcttcttggcmaaacmaaggagaaatggttagatactattttcacagctacattaagatattaattgtgtattttacatgagaaagaaatagagctaggattggcctcatccttcttttaaagcttattttaaaatgttctaatttgtgattttttttttttgagatggaatctcaccctgtcacccaggctggagtgcagtggtgcgatctcggctcactgcaacctcagtctcctgggttcaaatgattctcgtgcctcagcctcccgagtagctgggattacaggcacctgccaccatgcctagctaatttttttttatttttagtagagatggggtttcatcatgttggtcaggctggtctcaaactcctgacctcatgatctgcccacctcagcctcccaaagtgctgggattacaggcatgagccaccgcacctggcctaatttgtgattattaaagataaaaaatatacactaaacagaaaaagtaaagcttgaagccaaataaattgtgttcctattagacttttaatcaagactttagagttttgtttcatttacatgttgtaacagttaaatatctggaacatattatccaatcatgctccaattccaagtgcagaaggaacactatattcccatgattaatattttmatgtcacatatagtatttattttcattatctctaacggtccagtggtcatgccacactgatactgtgtgattatctccattctcatgagaaagaatttgagccctgagagatttattgcccgaggcagaacccagacctctcttactctgaaggaaattctctcttccatacttgaccttgattctttcaaaattttggataattataagcaaacgtttcataaactaaagacaattattctagtggactaggccatcagactttggggtcaaggtgtttttgaatctgttttctcattctgagttggatgtcttccaccatcagttatataatgtatactttttattttgtaactcttacatccagtttcagctatattttctatttagatctggcttaaatcttcttaaacctgtcttgaaatgtaaatatgaacatagaaaccatatccccattccatgactggggtacaaattgcctttcccatctcttgtctgttgatcttaattgtctcatctgtctttcttagattgtaagtcctttgggaaacaccaagccctgctgtacatggaactcacagaacttcttgggttattatttttcattaggttagacagcagtgatccaagggtgatcattttctgtgggtttggctgaaatgcctggctttggaaacccaagtcctgcacacatgtacacactggtcctatttgtagctttcagtgctacttgtaatctggtacttttcaaaattctgtctcttagatgcattttatcctgatagtccaattcttaaagagtcatcccattatttttatatgacgactttaaaaaaattatttcatatccttcatagaaattttagaaaaaataagaataaaaggaaggaaacatacttgtaatcccataaactagcaatagctacatttagtatcatatttttccttgagaattttttgcaacctgcttttttcatttgatatatttttaacattcttctgtaacattagttttaatgtctgcgtagcagtctatttgatagatatgtccatccctttgtgttggagaatttcatatatttactttttatgactattatttaagatcagtgcttttaatattttcctattataagcaatgctttgataagtatccgaagcctaaatcttttagcacacttttattacttccttagtttaagttaaatgaagtgtaattattggggcaaagggtgagagcatctttaagggtcttaatacatagcactaatttgtttcctataaaaactcttaacaaaatattagtgttaacatataaaaaagaaatcctacaataaagcaaatagcttaacagaaaaatggcaaatgtcttaactaagcattttacggaagagtaaaccaaaatgatcagtaaacatgaaaagatgctcaccttcatgtaatcagggagacaaattaaaatgacaagagccatttgatacccttcacgttggcaaaaattaaatttggctataaataaatggttttgaggctgtgaagcaatagaaactcatacatagatggggatggtgtaaattgtttcagcaactttggaggacaacttagccatatgcaaaggacagttgaaaatgcatttacgctaatcagtatccaagaaaactcatctacaaatgcaggaaagtttattctagcattccttctaatggcaggaaactgggaacaacttaaaagtccatctctgaaaatatagtgtgatacattcatgcagttgaatattatacatctgtgaaatgaataaaccagagctacatttagtagcataaataaatctcaaaaaacatattattgaaaggtaaaagtcttcaaaagaccctacttttcatatgctatatatatatatatatatatatatatatatatatatattctgtaagttacatacataatttatgtatgtatatttatgtatgtaatttatagactatttttaaaatgcaaaagattattaggtattattttgggagttcacatggaataaacatatcaaaaagtgtgcataacagtgagaaatatagtgacactgtgtggagcagctttacaagagtttctgttatatctgagttttaactcttaagctaaatgagcagtgtgtgggtgtatattttttctctactcttttgaatgttctgaaatgctatatttaataacaatcatatgaacaacttttactttyagcagtactgtaagtggctatcagttccccataccctgaccaacactgactgccccacttctgatggctctttggtaacctggtttctgcagctttattttgaatatttttttctaccagtcatcataggtttgacctggtggactgatcaacactctctagtttagtctgtcttgtgacaaccagcaagcattttgagaatacagacaagagataagggtatatactgaggcattgggacgtagtatttgcagtcaaaaagaaaaataaaactgcctagctctgtggacaccaaagatgtttccagctaagataataattcaagtcgacacatgtttttgactgtcttgtgtatatagcatacagtaccatgagctctaagtacaatggaatattctacataaaaactgaactactaacaccctctccatgtctgaattcacttgtcagtgtaaacacgacatagctgtcatggcctccagagtgcccaccaccctgctttgcttcccctttatccagcttattagtatcctgcgattaaacccttctggagacagtaggcaatgttcagcacttagcttggcagaagaggccttttatgatctaagccccctctgcccccttgcccaggaaccactcttataggccagtttttggttctaagaaggctgcttgctcttcgtttatctgtgacttccagtttgttcctccacatttttggaattttcttctgccctgtatctgctttgcaaacctgcttatcctttaagctttagcttaaatgtaaacttctgggaaaagtctccactgagctgcagcctcccgtatgctcctgtgcctctgtacatatcactatctacacatggcagccttcacttgtgactctgggttcacgtatctatctctctaattaggcttataagtttcttagagtcagaaactatgttcttcatgtttgtatacttaattggcgcagtacttaccatagagcaggcactcagtaaatgtttgttaatttaattggaattagcagtgttctcacttgtgtgtgtgtgttgggtggggttgtgcagagagagatgaagggatagagagagatatcaaatccatcagccaccatcttattatattttcacaccttctatctgtctttagcatttcatcttttttctttgagacccttttttagttgattacaattattttgaaattttatcatcattgagagtatttggaacatcacctcatttaacttcacctgcaaatgtagtaagtacatccttgattatctcatcttaaggcgtcaatacagactgaaatagattggattttaggacatattcctgtgtgaatgtttgataaatctctcccaatgtttgtgagacatttgctytctctgcttttggacttaagttaaataccaactcttaaagccagggtcccaatcaccatgtacagaagaggactttggtcagcaaaccctctcacagagaaaaagaccttgtgwacacagggactagcaagaaactcagaatgcttttatttttcacatagttaaatgaagatactattcctacactgctagcccagaatgattttggcacttcatgggccttatgtgtggaaagatgactaaagtgacctcctccggcattcctaagatctgctgtcactcaaggctctttgtcaggacacgtctgctgccagccttcctatggagctgagaattacaaacaccacatagatgccttgtcattaggtaatgtcaaatccaactggagaacgtaacttttgattgtcagaagataaaggagcagcctgatcttcctttgagaggaaagagattcccttgcactgctccaacagcttcttataaaccctgtgctgaggctcactcctctggtggttcccatttcagatgcagtgccattttgcttaatggcagctcctagaccagctaataagaaagagtaatccatctgctaatgaagagtggttgtgccaaggacatatttcttcatgagaaatttattaccaggagtatatacattagaggtgatatacaaatatgttgcctggcctgaaaagagtacatatgaaatacaaagggtaatgatgaactcctataaaaagcctcaagccactgcacctaaaataattctgggcttgggagkggtaggaagggcacagactctaccttaactggttgtaattcatgtatcaaatgtgttcagtgtgctgggcatacaggaaggggaaggggatggatgtcattccagccctcaagatgctcagggtgcagtgtaggtgtcaaaaggccttagacaagggaccacagggagatgaggatctcaatgagaacaggagactccaggagctcagagcctggggtgactaatggaaccagggtcctgggaaagctccctggagatggaaatcagaaactagaaggtggagtgggagttaccaagtaaagaggtgaagggaagagtgtttctttggatttaggtaatgccaggggtataggctgatgtcacrttactcccaggccagtgataaaagagaattaagaaggtggacagtggggaaaatactagagatggctaaaaatgtgcttggctatctttctaatctcttttccttcctgattgtattcatggcttgttctatttagaaaaatgcaagcaataatggctttctgatgatctgcacctggcaggcctcatgggcacattgcccttcccacatgcccactggttttaaatatttctcctttcttcgtacccaccttgacacaatggcggttttggtcttatcatcctgggtcttgattaaaggctatttttgcatatgtgtgcctctttttccgtctttttcatgggaaggtctttgagggtggggattgtgtctcctctagtttctagggtaactgtcttctttagttctcttgtctgggaaattctgggattctctgcatctttttaaaaaatccttatgctgtttttaatgatctcttccaagacatgtttcttatctcctggcagagaacttcatccacataccagtaatgatctgctgaccattttgtttgggctgtctatttttttgtccttgggtcactgatgaacaatagatgtggatatactytaggatgctaccctggctttttttcattgtgggatcctagggtcagagggaaggtgaaacagttcaaaagaacctacatatgctgtgaaaagctggctgtggtttcatggcccccacagagacaaagccttgaaactctcactcttatgtatggaaggcttcagtttctaacattagaaactactgacattctttgttagttcttcagcaattacttgtttaccagaggaagactggaaaaaaaagaaatgcaaaataacaaaaagcaaagaaccaaacaaaaaatttcagctgattgaggaatatttgagaatattccaaatttttaaaaagttttaattatcattggttcacatatttatgagtatgaatttggagtgtgatattttaaatctaaagttatagactagaatcatgatcaaatataaatttaaatttatttgtagggagtcacttccatacaaatcctcataaaaaggctttatggagagagcaggtcataaaatcaagtgaaaaggaagaaattaaagaccgaaggttaatgtggagcaaaggaagaaggtttagtgatttatgagacagctcaagtgagagatcacctccctttcaaggttcacatgtctaatggagacactgggctggccagcagtgagtgtgtgagwgtgtgtgtgtgtgcgtgtgtgtgtgtatacaagtgtgtgcaggggaagggagagagtgtcagggctgggtgggtggacagtaaagaggtctaccaaatactgagaaaatgacttgggatacgcatatcaagaaagcatcctttaacttattttggatttggctagatcaccatctttttgttgaagccacctgaaagcaattgaccagatggaaatgtcagactgacaataatatctattatttgtataacctagtttcaaaaccatttatataagccatctaagtacatttgggttgtaaggaaaattacagcaagtcaggtttgcttctgcccatcctaggttactatctcttatcttggaggcagaaagagagtttagaatttccttggtcttatcagcagaccagtacacacaccaccaccttgtacacatacacatgcagaaagcacaaaatgaggcaataacatgagatgctgcagaaagcagagagcaaatgaatacagccgtacttgggggtgaatggaagacacataaatgcattgactcttatcaaaacctaataaatgggctgtgtgaaaagtcctgatctctgcaagaacaaaaagctttataaackaagacactcagagtgcttggggaaagaaatcaacatggagagaaaagggagcctcacatttacttaaatgcagtgggtactatgaatactctgtattagaggatcaagttgaagacagtggtactgaggaactaaaaattaaccacattttttctggaaaattacaagaagttgcccatatcaggtatatttcctgtgactttctcctctacttgcatatttgttcttccaccatgaccaccacgtgaagctttgatttgtgtagacagttrtttaattccgtccagactgccagaagccaatggtggtaatggaaaacataaatagtgtcttttaattgtgttggaaattcctccatatgctaccttttagcttctgaatacctgatggtaagttcgttaatgaactttagtagtgaatccaacgggaccataaatggtcttttgtttattatttttaattgagactgtctgacagctttatttaaaatactttcccacagaaaagaatggagatttctatggtaatgtgagactgcttgttttatagaacagatgacaatgtagatttcactattttggagtttctggtgtgaagtgtatttttgtccacggcctcctgctttgtgtaggtggcaaacagggcattttaaaaatacaaactgtcagacttctaatttagggaatcaagtaataggtacaaaatgatatatgcaatctaaacacaaaaattgaatatgtctttcctttctttttggataattattgtttctgtccttttataagtacttgttcttataggcatgtctttaaatgttctccagtgttctttctctgaccttatctattatctcactggaatcaactgctcactcacattttatgtctacatctattctagcacctaatgtttgctagtgtacttatttattttactgtctgtgttctggcttgagtgtgagcttctcaaagacagaaaatgtgttatttctttttatagctcttatacttaacaacagctggtacctgaccctagagcaggtgccgagtaaatatctaaggttgaatgtattcaaggttcactgattttttctatgtctgtattagaacacaagaccagttagacagctcaggctatgcaagtcataatcagacttgaccttgcttaacttacacaagagtgtgctgcaggagttctgtcaacatggcagcatggcacggggctaggaaactgtgtgcatgttagaagtcagtaatactgtcccaggtgatagccttcagtgtagaagccagaaggccttgtatacctgtgagcaagctagagaggcatattactttcctgacgtgtccttggggaaaagattccagcatagagaagttatttaagacagctagctataggttaaacactggctatgtgaggccaggcaaatattttccaaataaaatgttttcctaggccttgaaaacacagtttcaaagatcaagatatttatttcaaagaaactgtcttcagctggtaaccgaattcatcacyttgcccctcttgtaagccagttttgctcttgaatttaatcttactacggatgacaacatcattttcccagtcacccagacttaacatattagagtcattttgttccctttttgtaaaacttcctcctggactttgaaattctgtaggtttaacttcaacatgaagcttggtgtccatctctttcttccagttttaccatcactgcccttcagctcatttggccttggcgactaccaattattgcttccaacgagttcctcactcaggagatgatatagggtcttctaagactctcaaaggacttgggcattgtcctcatatattaacaattttatttccccaaacaacctgacaacctcctgagataaacagaaacgatgcactttctatctgatacatttttttttttctgagacagagtctcgctctgtccccgaggctagagtgcagtggcgtgatctacgctcactgccacctctgcctcctgggttcaagtgattctcctgcctcagcctcctgagtagctgggattataggttcccaccaccacacttggctactaaaaattttttgtatttttagtagagatggggtttcaccatgttggccaggctggtcttgaactcaagtgatccacccaccttggcctcccaaagtgcagggactacaggcatgagctactgcgcctggctggctttctttctttccttctctttctttctttctttctttctttctttctttcttttcttttcttttcttttcttttctttgttgttgttttttgtttttttttagagacagggtcttgcacttttgcccaggctggagtgcagcggggttatctkggttcattgcaacctctgcctcccaggctcaaacaatccacccatctcagcctctctagtagctgagaacacaggtgtgtatcaccacggccagctattttttttttttttgtatttttttgtagcgacaggatttttccatgttgttcaggctggtctcgaactcctgggcccaagcatcctgccctcctcagcctcccaaagtgctgggattrcaggtatgagccactgcacccagacttaaacattttttaattgactgaaatacaactaaaatgttcagtgacttgcctaaggtcatgggccaaatacagcgactccaaagttttaaaatgcttccattttcacaacatttattcaatgactcatttagcaagtatttgtaagtatttactatgtgcctagggtgtaggaactaaaattaaggctcaatattacgtgctgccttaaaatctgataaaatcatgcaggccttgaatggcctaaatacaagctgtccttcccattctgcctctgtagataaggtcccttggtcaaacactcttctttatcaaagggactaagtaaaatttctgcttattcctcattagtatgcttcagttccctgccctcctgcaaaattattcaaacaagccaatcacattgtctcatgagaaccaggggacactctaccctcttggaactacaaagctggcctttcatagtagttatttgctttactcccaagtgtaactcctatatggccctgtgtggtatccttctcccctggactttgtgtatacatgactaataaactgctgtccatctcgtctatccagtgtgggtgtcatgtggtcagccaaccctacagtgcyacggtgggaatccctccctcaccaacagggtgaataagaagcaattaaaacagtgccaaggctgggcgcggttgctctcacctgtaatcccagcactttgggaggctgaggcaggcggatcacaaggtcagaagatcgagaccatcctggctaacacggtgaaaccccatctctactaaaaatacaaaaaattagccgggcgtggtggcgggcgcctgtagtcccagctactcrggaggctgaggcaggagaatggcatgaacccaagaggcagagcttaccgcgagccgagatggcaccactgcactccagcctgggcgacagagtgagactctgtctcaaaaaacaaaacaaaacaaaacagtgccaagcatgcaaactttaaattggagtaagttcaaagacagtatattttggagtcaaaggcagtatattttggagtcggccacctctgtgtacctcaaattatggaagaaacatataccagagcttttacccatgaattaaggaaagcattggcatcaaggttctcccagtaccacaactgcattggtgagtttttttctggaatgcaactcatagggtgaaaggcaagaggaacagctgactttgtgttccactaccctagtgagcttacrtgaaacaaatcttctagttctctctgacattagtagcaaaatgtaatatgtccattctcagcagcattctatgatgcatgtggcttttcctgggagatcagagaggctccagggttatgaaagtggaagcaatgcacattttttttgtgtgactgtaagtgaacatcartgcttagttataagcattggggagttgtccagttgctgattttggctttagtggaatacttccattggatgctgcatgaccagaaatgtctaaatgaatcaatcgtatggagtgaagttatgatttcatgaatgggacagtaagagaagatacctaagggggtgcccagcaaacgtttgttgtgtgagtgaagctttagctgaggaaaactactaatgttatgtccagccccttttactcattcatataaatgaaaaggtatcgttgcaaacttagaagtttctgcctccaaaaagatgattaagagtgtacttcatttaagagaaactgaactgatggtcaggaaggcagaattgaattgtcaatataatcattgtgttaattcagtatttgtccaatctatgtctcatatgtgagtatgcattgcaaggaaaatgctaaatcatttcaatcagttaaaaggaattgtgctgtttccacctcttgcctattcaaatagaaatatctgggcaatgatgatatttaaattatatataatttgaaaaatatgtttctaaagaatatctacctctttatattatttattgggatgctagagtgatattyctagctttgcattattcccaaaatcaaattccaaagcttttggaaaaaaaaactattcaggataagctatatggttataggaaacataaattcaagaaaatagagtattacctatatcagtgaatatatgcattaatctagtttattttgtgtaggaattgttttgaagaggatttctaattgaaggtggatttggatttattctcttggtattattcaacaaaaactaatattgcattggttcagataatttctcaggatattaaaaaggaaactaatgaaataaattgagtcaacatctaaaacataaatgctttgtacttggtgttctagttctcttaattactgtactttatttattctctcctttgtgagatttcagagcagtgaggctttaagttgctgtctagaaattagaaaaacaccagatatttgagttgtgtggccagtgggacactgcagcaaaaagactattcggaataagtttatttttaaaaagcactgctatcttaaaatctgcatctttaaaatggtaataaaaattattgttataaaatggatcgatttttgtgaaagcacacataaagtataatttagaaaattaaagtttcctttaattttactccatagagataatcattttaattacttcatatgtatattttttagatttttaaaaaataacatttaacttgcttacctagagaaattgggtaagactatatatatgttcttaaacgtggtcttttttttacttaaccatacatttagacatcttcaatgtcagtacacatagatttcattcattttaatatagtaagaatgctctataccataaaccctgcttttgttagtgaacactatcagattgttttccatttatcatcatttccaacattattacaatgaatagtctttttcacttatgagaacacttctgtgaattaaaattcttggcatggatattatagatttaatagtaatagcagtagccattggtaactcttgggtccttatcacagtgccaggtttgctgctgagcacatgcagtgctcagcactttttaatccttacaacagtcctgttaggaggtgtattttttatgtttctccattttaccactgaagaaaataaggcttaaaaagattaaattgctccccaaagtcatctagcaggtgagaaactaaatccagactccaacacaggtcgttctgactttccagcctatcactgtcctggccccatcacatgccagcaccacaattagaattgctccatccacatgctttctcttttctcagctccgcatccctctcagctctgcagttctggcagcccaatacagtaacctctcaaaacctcttcctttgccctcatgcctagagtcaggcctgagcagccagtctctctctctcttttgtgccgacacccttcctcaactacatattcgcctccgttcctgacactgcattcctggcaaacagtgcagcatccctaagtctgagaaagcgagagggaaagttccttctaggtttctgggatttataacacctttgctgtcagccagcagattccagctgaccagcagtctcagaagcagtcacaaagagcagttatcatcgtaaatcaagaagggaaaggcaagaaaaattactgcatgtacaatatgaaaagagtcataggtgctctttggtgttttgaattacactggcacagctagttattgggagcagctaaataaataaactgagagatgttggcattgtcatttggtaaaatgcatcacagaaaaccaccatagtgctgatgcttggacaagctaagtgaactagagtgtacaggtaacacagtatttgcacaggccctgggcaatctggaaggagtgcatttgtctggaattttgcacatgtccatcataccctgactgctttcataatctttctgtacttcacctatcaaacacatctttttttatctgttatttcttttttttttcttttctttttcttttattttttgaggcagagtctcgctctgtctcccaggctggagtgcaatggcgcgatctcrgctcactgcaacctctgcctcctgggttcaagtgattctactgcctcagcctcctgagtagctgggattacaggtttttctgttatttctaagcaaagctgttttctaacatatttttgtgtagctctctgtctactagactgtgagatctctgtgggtatgtatcctatctcatttatcttttatcctcacctatattttcctctatccttttttccatcctttcttttatccctgtttattaaacacctcttctatgccaagcactgccaaacacatcatatccctggaggtacaatgatatgcgtgtaaggtacaaactctctctcactaggtttacagtctaatgaaagtgtcagataacctagatcattgcatagtatctggcacagagaagacactcagtaaatgcccatttattgcatttatgtattaaattcttcaaaataagcaaactgattcttaggattattaactgacttgctcagtcactggtagaactcaagttgcaattaccaggwctgccataatgccatttcccactagattgcccactagttattatgattgtggtacactcacatgagggtgctatgtcacatgtcacaatcagtgttaatgatgataagaattagcctgtgacacaagtaagtggtcaagggctgagtcccttcagttttccaatgtgagcatctgcatgaattttctaatccattatcctttgtccaaaggtatgtcttcttcttggcataggatccgcaaattggccttctgtctatgctatctatgtaaattatgaaaataattattcctatttcacaaattccatggtgctgttttcctccttagcagttttatgttttctcttattttatattttatttactttcttatgctagaattgttaccataaagcaaatttttcagtttaggcacatttaaattatatttagactatttcctagtgtttgactatattataagtaaaagaaaaacctctgggagatactgcttaaagaatgtcattgataagagtgcccatttgcacgaggtggataaatgcaggtacagcgtgcaactcaaaatcgttctgggaaagggcgatgatgaaaaactacttcagaacaatggaatatagccttcattaggcctcctcagggaaggcaaaacagagctttaaaacattggatgatggaagatgataatgacgatgcatcagttttatcttatgtaaattactgaaaaaaatcaaatcatttaatcttaaacccacagcttattgtttgtaagttagatgagaaggactgagtcactcttgctttctctccacagagtaataactgtaaatctcactctatatgttcgcttctacgctgcatcttcagctaataaccaccattaataatattctgcaatcaggctgcagggttgttagatggttactgtagtgggtctgtaggtgaactgaatttattttttcataaagaagttaattggacaagtaatttttgggcgatgtctttggaaatgtgtgcattctcagagtgtgtgaatgtatgtggcacacatatgtatttgtatagcctagcagtttactcagtacacactttttagaaaacaagatttttgggttaaagaatattgagttaagcttatgtgtgggaacctctaaggaaaaacaggtcattttaaatattttgttgacttcaaatcaaacagttctacaaattaaaaagaagcttggcatgtgccgtggtagacaataatgtaatgaaaacaggccattatttaatttaaacccctgggaattctagtattggtttatatatgtgtccaatactttctctctgaaaatggtggcacagtataggtgttaaataaatgctgaagattaaagacttctgcatatgtgccstccgcctcatttgcttattgacagatttcattttaaaagaccttagggagactgaagtgccccaagcgccctgaacaaagtctggaagacagttgtctgcaaagtcatgcttctctagagacaggaaaggaccagactatagctgtatttagactattggaataattggactgcatattgatagaatggcttattttaatcatcttaatgagggtaccaaatccaatagattacacagaaacgaaagggcctaaataccaagttagtgtctgaacagctaattctatggggatgtatacattatgtgaatgaaaatatttgtctgcatctttctcatcacacacacaaacaaatacagttacaaattcatatacactaaataccataagtcccatgggaattatatcagctgctagaacaaaccagaaaggcatggaaacagtgctcaattgcaaagaatgaaacaccagcttttatgcagcctaagaattgtagtatgttaaaacaacccctaatgatttgatgacaggacttctgattgggcaactgggtaatttgcaaccttatcaaaactctgtgaatctttttctagattaatgctgctcatgaatagataattctgagcatattctgcatgcaggaaatagaaaagggtaaagccatgaacctagatttcatacagagagctatacatgaacaaaggaatttttaggttggcactgtacactataggtaggagatatgggaaaratatgaataatttccatgaattcctctaaggactcatatgtgaaatagaggagaggctgctggggttttttttttttttttttttttttttttggtagactcatctttgttttgctttaatttgctctcagaataaaacacagcagaattgtcctttagggggcttttactatggattggttagttactttattgactgtgtattaacactctctgaactacgtgttctgcctgtwtttttactaaattatactttccaatctaggcagatggtggtgtctgctttggaggcacattttgttgtcctttttttttacacgtgtctgctatttcctggggtcatgtccatctcatattttagtagtcaacaatgaaagattaaattacaaagtacagggaaaagaatgtaggatttcatttcgttcatttattaatcccttagttaattctataaagcatttatttgtgtcagatactgtaattaagtgcaattttaaaaaatcccagattttttatgctctctcttagacytgcccaaatgattccatccgtatctccagaattagttactgcaakaaatttggtttcctccagacatttcctcatgtttttctctattgtatcttccactctattctctaagtctttgtctggctttgcatggctaaaagcccattcaaatgatttttctgaacacaacagctttcttttcacagaggtgaactctgatccttacctttctgggcaccaagaattagaggagggtttgaaattatttttcccctatatcctgccaagatcttgctcagtgtcccactctcatctggttcctactagcaatcatttcattaaatggaaagcttttctcaaatattggggagcctaaccctgattggataagggagaaagaggcatgaaagaacaagggagaggaaaaggcagagtttaaaagggtcattgtctttttgcagaagaaacatcttctgccccttattcaggacagctaagagcactggttcctccagaatggggtccccacttagtaatcgtttagaagcaatcctgagggtgttgctgtagcttggtttaatctgtttcatattatttttttcaaagtaggcagatataggaactgggtctctggagggtaatccatgccttccaagagggccatgcaggtgatgtttttctatcaaaccaaggaggttggtagctgctcacttctagcagcacaggaaataaaacatttgcaggctggatgttgctattactattctagatatcagagaaaaagttataatcttctgaaaagcataattttttatctattacatttgaattctataactgagtgccttacatattgtctgatctaatctcattttacggaaagaactgaatcccacagatgttagcagtagcctgtattattgagcacgtccttagcgtcagacatacagatataatgtactctagagatcttttaactctcgcaacaaccctaaactctaaaaagtaggttccttgggattgccataatatattgatagataaagaggcaaaagcataaggttaagtaacttgcacaaagtcgtacaatctagaaaatggcagagacttgaacctagatcttaatggctccaaagcccatgctcttaacctcaatgttaaactgtataatctaatagggttattatagctcccagttcttatgaccctaccttctaattctctctcaaatccatagtctggactagtgattctcaaacatgagcatgcaccacagtcatctggaagacttgccaaacacagggtactgggtctgtggtggacagactctaaggtggcccccacgatccctgtcccttggtgtgcacaccttggtataatccccttctcttgtgcaagggatctgtgtcttgtttctaagcaatagaaaatagcaaaggtgatggggtgtcacccttacgattacaatagcttatataagactctgacttgctagcagatttatttcagagagtctttgctggatggatggagtaagtagccatgctgagcaagctcatgcagcaaggacctgcagggcagcctccagatgacagccagcaagaagccagggatcacagtcctataaccacaagtgaattaattctaccggcagcctgaataagcttgtaagtgattcttcccatgttgaacttccagaagagaacacagcctgtctgacactttgattgcagccctatagaaccctgaggagaggacttagctaagtggtacccagactcctggcccatgggaactatgaaatgataaatattttctgttttaagctgctaattttgtagcaatttgttacacagaaataaataactagcaccgcccccccccccgccccccaaccagccctgagtttcttactcagtagacctggcacaataatttgtacttataagaagattccagaggtcagtgatgctactggtccagggaccgcactttaagaatcagttcctagatgtagagaatcccattatatcctacttgtcctccctatactttcaagtttccctcctctgcctagaaccatcccccaggctccttttggattaacttctgatctctctttagataaactcatacttacctttcagtttaagtgttatttgctcagcaaagccttctcccacctcagcctggatgaggagtctttgttacacactgactaaaagcacgggcactgaaatccacctgcctgggtttgaatttcagctctgccacttactagctgtaaaatcatgggcaaatttattaacctttctatgtctccatttcctcaacactaaagtgataagcacaggttacttcataaaactaggaaagttaatatcttccatattaaaattgggtgatagtagtagcttactccatccacctaggagagtcaaataaggtaagtgcatagtactatgcctggtgagtaagttctcagtaaatggtgttggtggtggttgcattttgtgttgatgttactcttgtgatctctcatagacgcatttacttcactgcttagaattctgcatttgttaatgtgaatgcttatctcactttctagatgataaattccatgagaatgagaaccatgcccactcttgcttctcatgttagccctagcacttagggcagtacctggcagaacaggaatagtaaaaaattacaatatatatttgatgaatgaatgaatactctcagggctagagccacactctggaggcctattcccgatcattatgcattttttccatctggttggaatgcactttcctctgtatttagyccccgaatgtacttatcctttcgccctgctcttcactcaattgtggtgagatcttatggagagtctgttaggttggtccttggtctgggattgcagtggcctctatacgatagtttgtttttgccatggaacatagaggagagttggtcatggataattgtacttgggtacaaatttttaaaaaagtacaaaaaaaagcaaaacatctttgctttttgagattttccttcttactttaatatctttccaaatttataacacctaccagatgctaataggacatcattgctctatatcaaactatattagttcctctctgagatgaagaagggtgtatccagaactcagctactgtttgtcgggctggacggagtaggggaaaatacattatgacacagctctctgcagaaggctgaaaagtagctcagttccattcttgattccaaaaagttaaatgagttttcgtagtttttttctttttctttttttttttttttactttctcccatgagcagcgaaagaggcagctcagaaaactagtctgcagggttctctggagatgttttccctccctaccccatttcattaacctttcttctgaaactacttttgaatgtctgggtttaattaagagattctgcatgcagtatggaaagagcccatctctccttttggcttattccttcatctgatttgggttgaaaatatacttttttaagaattagttataattgtttttgacaaaagaaatagctcttttttatgtctgcaaatccttaatgctggcttatatgcagctaatgatgatagccatcggcataatcagttctaatggtctctactgtctttctagctttgcatataggaatgtaattcaaatttcagaaaggctggggctgaatggctctttgttctgcatttaaaatattactacagtgttcactggaaagaggtctgttattacaaactggatttgagtctcaactttactttgtagctctgggaacctgggtagattcttgagttctcttaggctgtctcctctcctttcagataacttcctgagaagtggagactatcaaaaaacattgtgtatgaaaggattttgtatgctgtaaagtggtggggtttttgtttgtttgttttgtttgtctgcttgttttttgctgttgttgttgcttttacctagaagtgattattatttctaattcaaatcatcctcccaaagattttttttgaatttctttggatgttgcattgaaggaaaaaagctcaatttttatcctgagttttaaaaaattagacagtaaaaccttaaattggttagcagttgcagtttataaagcattcatagaattcataaaacattttctcacacattagcctgttcccagtcttctggaggaaaggggctgctgatcttgctaggcagcttgatgtatatatttcatttaatccagaaaccttacaagatagctaaaattagcttcactttttagataggaaaacttaggatcaaggtccaaggtcataaggtttgaactcccatctttataattcatcatttccttgacctcggtggcataattctcttctgtgaagaggattgtaaataaaacagttaggggccttgagtttgcctagaggaccattattgaaattcttctttcaaatcttaacgtttccctatgttagcagagaaaaatgggattaggaaggacctttaatgattgattcctctacttagatgtcaagaaaggccattgtaaccacagcaaagatttagcactcaagtactctagcttagtgactctcagctggtgccaattctcccttcctcctgtccctaagggacattggcctatatctggagccatttatttgccacaactggccaggtactatgggtatctaatggatagagaccagagatgctgcaaaacctactgcaatacacaggagagccctacctttcacacaaagaattgtaagtcccaacatattaatagtgctcagctgagaaaccttgtgggaagaatcaggaaggcttcctggagaatggggatactacaactgggattttgaagataatttaaaattctccaagcagacaatggaaggaaaggcattccagacaaagagtatggcatttgaaaaagtatagaggcctgaaatagtgctgtatatgtaggaatttctgggctctttggcattgctgtagcatttctgggaggagcagtagggggatgacattagagcaatgtgttgagtttcttttctccaacagtaattcacattaagagtagaattgtaaattcgttttgttcctgaggataattctttctgctagacaacctgtgaccattgtcaccagttcttaagagagtcatgcagagactactcttgatcgatgatacaggtgggtagcctggccatggctcttgacagacctgtgcttattttctttcagtgggcacctataaggattgaaccacaggaaggtgatgtaccaccctgagctgaatacttcctcactagcttttttgtatccacagcccctgtatccatctgcgtggtctatattccaaagtagtttgatggggcagcatgcagaagtgtgttcttaygcagtaatatagtggtactcagtgtgttcttatgcagtaattgctctccagccaaagcaatttgctagacctaggtgattctgaactaatttgtaattatatatgtactcctattacagaagattgccctcctttgtgttttaacacagcttcaatttggttaaaataatcctatttaatgaatgctattcatcaactatatatatatttccatccatccatccatccatccatccatccatccatccatccatccattcatccatccatccatccatgctcactaaccttggtttgagtttgagtcctggctttagcatttgcttgctgtgtgactactggcaaatgctttaacctctctaagatgcaatttccacatctttaaaatggagatcataataattagcaaggttgtattctgtaccagagataatacgtgaataatctraaacagtgatgtattagtagtagtagatttgctaaataaatggtagctttattattattgctactatgacaatgatgatgacagtgtccagagcactttaatctatggtttggaagataggaaggttgataaatcccttcctatcttttggagttcatactgggagcttcccctctccagcccaacataattgataccacatggtcccaacatctaaatctggtaccaaccctgtggcagcaacagaaagcctgagctttgtgaccttgggtaggttatttaacttctctgagcatcacttggtaatttgcaagaattaaatgaaataaaacatttaaaattcttggcactcagtagatgctgaacaaatgctggttcccttctccctgaggcagtcatcatcaagatgttctgtgggtttcactgctggcaaaaacaaatgaggttaaataaaagtcagaggtgaaaataagaggagttaacagagtttctgttttgttttttctttacattttctacaatttacagagattcttctctccctcaaacttaagtagatttcaaacgacttgtcattctcaaggtgaaatttatttttatgytttcttctctaagtctagtcaagaygtttctcatagatgggtttgacctttgatggagatgtctcaaacctgcctgcaccattctccagaaatgaatattttttccccaatcctagcttgaattctcagaatttctcctccagataagtcacttctgccctggcctcttggtttgtttgcattagaccctcagataatgggcagaagtttcctccctatgcccagagctcttgccctttggctgttggccttactctgagctgcagacactggctccttactggtggtgttcctgccttaagtacttagagttcccctggcctggactgaactctgcctagaactcagatctcttaaataagcttcctctcaatcttttgttattttcacagacacctgcacggcttgctgtgctttgaatacactaacacttcactcatgctgactggatgggtcttccacactcaaggatgggcttgaatgttccttctaggcctcaactgggaggactctgcttcttcccatgtgtcacatagcacttgtaatacttacagtgtrtgtccccagcaagatttttgagttcctaggtgacaggagctatgaagagtcaatctgctctgaatcctttaggatgtggcctagtgcttataattaaggagacagagaaggaagcaaaagggactaacagacgtgctgaaggctagtggtaacaatgcagcatgagttgatggctcaaacttcattctattagtacccctgggratgaaccacatgggaagtgaagacaccaggagatacmggagtttytgaggctgaacaggaatcagcagtgggctgcaagaatgacctagtggaatgagcagaagctacacagacctgagagaagtyttaattctgtcatttaacagctgtatgatctcatgcmaattgtgtaagttatctgattctatttttttttttttggtaaaaatgtgatgttttggtttgttttcacactgctataaagaaatacctgagaatggcaggagagagagagtgagtgcaggggaaaacttatattttaaaccattagatctcattgagaactccctcactatcacgagaacaacatggaggaaactgcccccatgatccaaccacctcacaccagggtccctccctcaacatgtggggattataattccagatgagatttggttggggacacagagccaaaccrtatcatgtggctactatcatctacttagggataatgcatttggcccataatagtcactcaataaaatatcattattgttaattttggaatggaggatgtacatacccaaatatatgagtgaatttcatgttgtctccagcatataagtattacattgtctgagtacactgtagcttctacttttataactgtgatcaccatgtataaactacatgtaacaaacatgtagtgtgtcaatcactgtgtgggtacttttatgcatcttcttatttaatttttaataactgtagcataagagtttccgttatcatacatattatagagatgaggaaattattacaatatttaggcaacttgcccaatatttctcataattaataattgggatttatagccaagccatcctattgcagaacctgccctccttgccagtatcctaaatgctgcttccagtgttgtcaggaaacacttaacagaacatgtggaaaatgtgattcctaccttataaaatcttatatttcaaggctcccaatattgaccatcaggaacggttcataggaccaggtaatcccaacacattaataaccctaatacatgaattatttgtttgaataatgagaccacgaaacattatatagggacagcatgaaaactgatttaggaaatgaatttttgatattcttctttaaaatgctcaggttagcagatatacatactgatttgcaatagaaagaaaatcaacaaccatgtagcgtggttttttttctttcctgctagtccataaccttctcaagcatatgcagcatcttctgtttaataataaattattgtatttgcctagcaaattatacatttcaaagaggttttgtaaacttgtcttatttgatccacatagcaaagcagcgaggtagacagaacaagggacagtattctttatgagtagatgaaatggctgaggttcttagcaagggttagttatccaaggtcacacagttaattagtgacagagctggggctggaatccaggtttctctgcccagcgcgcatctcccaaatgcctagttcagtgggattggacagctgcaacaatttgtgtacaatgaagtgttcaacaaatgttgactggcttgtttggctcaaaacaattgaagatatttttcactatgattttcattgtttctctaaagtagcttaggagcacattatctctagtttgctggtgtggaggagagaagcagaaagcaaccattgatcagctttgaaagttgtttactgagacacctagaaagttttcagaggagagaagtttgctgtttcaatcattgacacatggactatcctgtcttcagtcatagctgggtataatctccctgtacctagtaaaatggagttcagctttacattgcagagaacacccatccaactccagtgatttctgagacataacatccaaaacaagatcctcagagagtaataacactatgtacacagtgtactgttttttcagacccttgatagagtaatttaacagagctgtgtagtgtgagctacatgggctggagatgattttgattcttaattctcagctatttgaacccaaatcagctggtttaaatcagagttgaagagacacttccaagtgttagctatttattttggtaacctgcaaaatctttactagacatgcattttctgtagtgttgatccatccaaaagatgagcacaaccaattttcagtgtgtaaatttggagactgttgattgattaaatctgttgtgcgcatttgggtgaggtcttcagttagggtcacttggccagcacataaccaccctttcaaccgtcttacctaccgaatggacaattaatacaagctgctgggtttcgtaacgtatgtagccttttgcttaaagagtgttcaggctaaatcgagattttgctcaattctaccctcagtgcctaatgcataagagtcagtaaatatttgttgcatgaatacaatatagtgtcataaaccttctccatctgtgccccctgcctctccaccgcaccctctgctgttccccctccctacttctaacctgggaccacactttttattgcttcttagaaaatatcttcttccatagccccatctcttgcctggtgatcttattcatcctgggaacccagattacatttccttcctccgtgggacattcacacatgcccaaatcagagttcacagtgacccccatgtgcctcttctccccctgcacttattgtcacctatctgggatggggttgctctatgtgctgctaggttgtaaccgtgactgcggtgagcctctgttttattctcacttgtaattctgtctctagggcagtggtggggacactgtggacacttactaattccttgttgggttgaaggaaggaaggaatgatgcctgcagccccacggtgttagatttgcaaatcactttaggaaaggaggaaaggggttatgttttataatatgagagttgagttttaagagactctctggtttkattggagagtgccagaagaggcactgaaggcaacaccccagacctgggaaaggttaaagattytggttttcattcactgcaatgatcctaaacatgactcccgtgctatttccactttacaagcttcacaatgatgacttcaacactcagtgcaccccaggctggcccttgtttggcctcctcacttggatcaagtgtatttcgaatggaacctgacttaggtgatgcgattcagtagcatttgtctggagtttgtctggaattctatagcctagattaggtttctctagtactagtttccatagacgcctgggcttccccttccatacctaatttagtgcccagctagtgtcacatttctgtccccttagccttccatggcaccagaaaagggaccacaaccccctttctgctgcctggcactcacattctgagcccttttgttagataatgagtttgtatcaagagggttacttctacagagaagatacaaattcaagttaatgtctgtgcattttaaatgccaccaacagatgcgtaatgaagagctcttggttggaaaaaataatattttttatggaaaactctacacaaatagaagctgaagttgatgcagctcttgcacatacatttttctcttttaattttcttgactcccttgtgaggtgtcattctcatctccatcttataaagagggaaactgaggctgtgagaaatgtaatagttggctggaggtcacacagctacttaatgacagagtcacaacttgacccaagcctgtctccagatttatgatatgacatcatctgataattattgaggtgacacagtttaaattagtcagaagctatctatcaataggacaaggatactatatgaaggaatccagcttgtggtcagttttgtaaggtctcacttaaaagcaaatttggaggagagagggcttttctaagtctcttctctctacagcccagcmattagatggagcctcggatgaggtggtttgtaatctttaatatcggtagcatacttctgggggagacttttctgcmagcgaaacmggcataaacacaagagaatctggttttcagatcccttttatgttgactcaacagatatttatgatagtctttgttgttccaaattcacatgctgaggcctgggggtagagtggtgtggcagggacagatggacctgctcctactctcaaagaactgaccatctaacattttactcactgttactctcttgctcttattttttttttccacaaatgggactttttatctaccactattaaaagtctgaactttaaaaagattttkgggctggtgatccatatccatcagctcattcaacttagcaccactttcattcccagtagcttttccagaacttctgccttctccatgaagctccatgagttttcccaattcaaacttgggcttcttcagcatttttacttttctaacaaaaacatcatgaagaggataaatagatcggcaagccttttctttgtcttttccgatgctgtctggaatctatttattgaccatttctttcaaattatttgtctgtacctctcaggtcatgacttccttcaaatttggtggacctgttggtgctgagtgtaagaggtcctctgtctctggtatctgaccattgcacatttttagtaaaactgacacagaacagacaaagcaaataaccatctatagttttaacagcaacatgagcttcaataatgatctgccactttttgaccatgaaacacattttgtcatgggcaagattcatgtcatggaagttttcaggcagtttttgccctgaacatctttagtaattggcttgaattttctgaatgcaatttcatcattctgcacatcaccaagactcacctcaatcagtccacccttgaagccatcagatacaaaatcggttccatgagtccctatgaccagtgcctttccaatatttcttatactgaacatagcaggtgcttttacattataccaatatatcttagaaaatgaagcaaccactttcttctcggttccctttttgccaccttttgtatggcacttgttcttgctaaccgtcatggtgctgctcagagagccaaaaggctatctttctcttaaaagtaactttaaccttcatgtgtttatagagatgtaaactgctattccttttattttttcaattttatattttgttatgtgttattttggtatcattcatttagcaagcatttattgaagacctactctgcaccctaccttgtgctgggtgctgttgatacagaggcagttactacacaacctctgaccttgagtaggtatgtcaaaagggaagagaatggtaagtgctttattaatcgtacacaaaatttgttttggaaatacagtggatgaagttactaattctgctaaggagagacaggaaaggaattgggaaagtctctatatggtgtgggctggcccaattgtctaagttcatttcctgagtgctggcttggaatcatgtattttattatataaagtgcaactgccatttactatttaaagattaattaaaagtgattacctaatgaaatcttaataaatagtacccagtagagtatgcctttagtattcattgatttaatatcaacggttttgattattcaagaactactttgtaggtgtttgacataggcagtcctgattttgctgagaatctaatttttatcacctggttttgggatgctgatagcaaaaaaatttgcagagaccctgaccctagctgactgcccagcatccacatctgagcttggctatgttgttcacagtgtcatcttgagtcatctatgtgaacaaagtcttgatcttgtgtgtgtgtatgtgtgtgtatgtgtgtgtgtgtatgtgtgtgtgtgtgtgtgtgaaaagtcaccatgattagaaagaataaaccctcagaaacttacaaagtcagttagctggtgttggaagtggatacacaagaagtgtgacttccctcaggaaagtgatagaatagagctagaagagactgtaacagcatcagagcttggagtattaattctcagggtatccattccctttacaaatgtcaggggtctgatagctatagaaatttctgatgttcagattgggactgaaatctaagcaatatgctagtgatagtaagggtaaataatgtaaaatttaaaatgttttcattcctccttgaggttttacattctccactggatctgtagactgagaaaatgcctgtcatgtaggagatgcttaatgaatatttgttgactaaaatttagaaggctaggctcattgacattaaaatgctaagacctgtcacacatatcatatatttatttttccctttaaggatgaattccaaaagattgtattggaccatacagtattaaattagactatgttattatgtaatttaatttaatttaatttcagatatggtcatagataatctatcaagtacttttatgatctataaggtatttttttcttctaggaatggttttgtgttggagattaaaaatacctgtatttatcaggacaagattgatgccmtaaaatgctggctaacgtaattaggctgattgtaaaagaaatttgaaggaggaaaaatatgatgaaatgtttcaaaatagtgacatctgttacatcagtgcctaatgtgcatttttcctttatatatttctatctctctccctggaaacatccttcttggaagttttcccattatcagaacaaagtgcgaagaggtaattttttcaagtcagatgtgacagaacacacatcagcattcaggaatgaggcttttgcaataggtaatagtgtaatcggttttgccagcagcagaatgtacaatcctattagagttgtggaaaaggaaaagtatcaccttaatttacctccaggcaatacagcaataacttgaggtgcctagggctgctgtgtaaagatactttaatcacatagtaaaaacagttttagtctactgcctactttagatgagggaagactctcctaagttaataaatgaattttatccagcatacagtctggcaatcatgatatgctatttttaatctttttcaacattaaatctgttaaagaaatttatcaggttacaatgagatcgatttcccccttacattccctatgttcattgcaggaaaattggatgacagcttttggatgagactgatagtgcacaagaaggaattgctccaaaattaagggaagtcagagtttcattccacaagcttcaaatagaagccgctttctattgtcttgtacctttgggactgaactcattatagtaaccatcaaactagaaagtcttcagctgggggtatttctcatgtttgctttctggctgtatggggaatgtgatctttaattagttcaggttgtaaaatattgcagagaatttcccaggcacactttgctttgtggtctaggtcagcaaatgcaattctgttttaattgtggctgagctattgtcttaractggtattcctagagtgccttttaccaattaatggtaatatactactgggaaatcatgttgccttgtggaagcctgtraatagcaaagccctaataggctgtctattaatagcaatacagagtcagagacctaatgccattaaatggcggtattcatgtgtgaaagccgtctagtaactactttaaggaatttcaacagtcatttgtgtgtgtgggaagtgcgtgtgtgtgggaagtgtatgcatgtgcgcatgcctgttttcctcctgtctttctctcttctttgtctttttgttgggcttttttctaatatgaatttccattttctgtcaactctttatgatggattgggttcagggaagcaacatgtgccagtcgttgcctttgaacctgtacttcagatatgtggcattttattttctctcctscctcttggcttatcatcaattctagcagtgaattttgacatgtgcaaattaataatcattcagtccaaatgaatacagtgacctctgtgcccacatgatgtactaaaaggagaggatgccatgctyatgaactcgaggagttcacaacttaatgagaggagcaaaaatgcacgcgcgcgtgtgtgtgtatttccacctgtctctaataggctgtcaagttataatagtttaatgtaatcacatgctttttacatttgtacgtgatagactcctgagaataatagttaattttgtgaaagaattaaaaattgaagtgacctgtctagtttggaaagctgggccggcagcaaggcaagaaaaaattacagggataaacataaatctttcaccatagaaatcagtgtggagagatggtctaagagttcatttaaaaaatgccttgatgttttaggtgaccataacctggagatgaagcagaggatagggtagtttgttcctatgaagtctaatgcagtctctgaggacagtgatagacaagtgtgggttttagatgaaccagttctcagaatctagttctttgttctgagcaggccaatgcatcaggagtattgcattagaagatattttcactctgaataacatctaggagaagatgaacagcactggggaagggatgagtaacaggcatcttataagagtgatgtccaaagacaactagcaatattgaatccagaggaggaaaagcagagagaagatagattcacttagtgttttaagacatgtgaagcagaagaggctgaatctctattctgcgctgtttcaatgggtggaaagtgtaggcaggcaaatatatggacaggatatgaaaaaatatcttcctaacaattgcaactactgctggaatggcaaggcttgggaagtagtgagctcaagactattggcctttcacccagaccaaaaggatgctaaccattgaggctttccatagatgggcatttgtatttgatcatcatgatgtacttattgtgctgaggttctcaagatgtgyggaatgatcatgaatgcaaatcctgcttctatcatttgcgtgatgtaaccttgaaaaggttactaaaactttaaaatctgtttcctcatttctaaaatgggtttaatataatgcctgtacgtacagtgaagtaaacactcaaaggtagcctattgctctaatcttattaaagcacctatttggccttgttggctttagtctgagaagtgaacttaattaagactagctggtgaagtcctgatgtaaggttcagttcacagtcccttggtgttagggttccatttttcagctgagtgtgaagaggctgctagcagtttcagagtgtggcaacaagaaaatttccatcgactttgcttacttgtgtccatagattttggaaaataatgtttgattcttgcattttaataaaatacctgattataatatgcatattgccttaccaaaaaaagtagtagtcattttaaaatagtaatattagcagctatgattagtaatatttaaagagtccttattatgtgccaggcactgtgctaagcagtttacatagtaaatagtgtttactatcattagtattgtaacaggtggattaaatgcattatattctttaagtctgaagcaactttatgagatagtattcctattttataggtaaggaaacaggtacctagaagaagttgttacttccacaagggcatatcactaataaatgaaataaataaaattaggatctttcagctgaactctcattgtgccacctgactctagaatcaatctctcaacctctctctttcttttgttctcacacaaacataagttttaaaaattgctatttattctcattacagacaacacactctgatttttttcattttactaaaaaatacacatgtctggtctattacattgattccctatcttaagttgatcattactaaatataatttaaaaaataatgcacacttgtttcattttgttcttgtggtaatacaaagttctctataccttagatggattacagttctcacatatgtaaagggatttgctttgtgctcttttgagatggtcccttgaagcagtgtcattttatagtggcagaggttatggtgaaggagaggcacattttatgaatcacattgtccaaataaattactgctgtcatctgaattcaaagagatacattgttccaaatcagagccctaagtgacttgaacatttccatcacagattgtgaattattatgtaatggaagctaactagttgtagtttttcattttagagcagccataactgtcaggtccacatcatatgccaaaaacaagttgtgccatggaaaacacaatgtgagagccagaagaccacacagattccatgaatgagccagacttcttgggaggtcagtactcagacctgggcattaaaggagcagctctaatttgttttagtaatttttccacccatctttttttcaatggttcctagctactactatgcctgtttgtttaagtagcatttgaaacctctctggtctctgctcagcactcaactttgatagcagaaacagaaggaagggtttccaaaagactgttggtcctgaacaactattacttaggggtttaatattggttctctgcaggaaacatgcaaatgactgattacccactaaaaataaagccttttatagctgattttaaaatcctatgttgcctatgtctttgaaacactctttaattgcttatgaatatattatacttttgcctccttttccttgttataatttctctttctacaagaatagctatcttggtggaatttattgatttccccaacaagatttacctgttagcattttctctggcaggacgttcttgtgactggctgcagttcaggaatgtttccctttcatttggtacacatttgcctagtgatatgtgtatcaggtactgggaggacagaagacgaataagacattgctctcctgtaaaacactcattcaatagtcagacatagaaaactgcagaattgtgtattaaatgccaaaataagggtaggttataagtatggtggtgaaatgagtgcatgtctgttttggaattaatgacatgacttcataaagaaggaagtgttcagtttgtgtcttaaagtgtgtgtattattgaggggtggggaggtaggtggttatttcaggcagaacaatgcaatgcactttagaaacattcagatggttctgaggtatctggagtagacaggtggatggagcagtgagtggagggagatgaggtaggacagaagagaggaaagttcctggaggtggttgtgtgtgcctactagagactgtccaggcctgcctgctacctccgttgaaccaattcctgatgctgatgcaaccatcagatcatgtatgggccagctttttctgattaagggctcttgaacttctgctggggagaatggttctgactgatgctgcttccacaactgttgttgggcttctttgaactttcctggacgactagatattacacttgattcctggctgtgggtgtctgtttccctggtctgagagtctggctgtgcagcagatgcattttggaggagctgaagctgaaagtgccagtgtggtgctggtgtgcatcactgccctctctgggatatctctgcagcagagcaaggttacagagctacatctgccgcagctttctgtgagttgtgtaaaaagactgtgccaaccagtggggagcttacattttcttatatgggattcctactattttaattaaatattgcttttagcagctcttcctatttctaccctcctgggactaactaggtgtttgtttgtttgtttgttttgccttacaactcatcaccacatataggacattgttaatagatgtgataaatgataataattctctgctggactcttcctgcacagtcaggagtcaaagccccactggaagaagaaacattattcactcattcaacaaatatttattgttcgtgtactatgtgcaataactgtcaggcactctgtaggcgctggactccatgttgagtaagacaggaaggatcctctctgccctgggggatattacagtctgtctagttgcggggtgggggataactataaacaccataattaaggtcacgtgcaatgacatctactcctcagaaaggcaggacagcatatctgtggctacagagcatgcctaagattttgggcaggtagctggtcagaactgacctcaaaaccaaaaattccccataaaacacacagtccagaatggtctccttgaactctagggctgttcctaatttctcttttaacagcacattttgcatttttgcaaacctttctgttgcaacctcacataggtaactgaaatttcacttctgttgaactcaaactcyagatatgtgaagagaagaaaggtggttgtagaatggccccaagatcctcctttctggacgcctttcctcttttctctttgctgctagcttttccttattgtctgacctaaattgagccaaaagctacaaatattgaggaatacctccacaataccattctcatgcatttttgcttcagtgagccagctttcctttggatattggatatgttatcagtaatgtacatacaatataactataactagcatcagaatccttcatttgagccattcacacaatttttaaatagtatgttaatataaggtcagaatatttttcatattatcttgaattttcacagaagtccagatttcacactattattgcctttttccaagttcctaatatagttgtttctgattatatgcatgttatctgcttcacattatgagcagtgcttaaataaatgttcttacaaaggggaaaaattatcatgatttttcttccccggcttgaagaaactgcrtatcaatttgtttgcaaatctcaataatttgttctaaaactaacattgacctgtattggtatttacacagcttacgatcactaagcacatttaaatatagaaatttttaaagaactagtctatctgcaacataaaggcagcatggtgacaacaggctaatattaaaaacagccttctcttttctcctcttcttttcccttctcactgtgagtcaacatccatgcatttaacagatattcaagctgtgtgcatatgcacactgaattctgttttaaggaatatagaggagaattcttctgttttcttgtcaaagctggtctaacacagtgagttagtatttatcgaagtcttgtcagtgcctctggtgctgtcgacagagcaagtgggcacatttcatctcaattaccaaaagaagatgaatacaaggcgggatgtgtgtgtcagaggttagagccatttaatgggatgaaatgtgaatgaaaattggagaacaatccaagaaatctatagaagatgagaactggagaaactcaattagagaaaaccatacacttccctccttctggaccctggtttctttgtgctattgtagttgcttatttggttataaataggaaagcaaagagtttattgtttccattgtgaagaaaaggcaaggtagttttgaggatttcactcatgtactctgatgcttttatatgtatatatatgtgtgggggtgtgtgtatatacacacatatatgtacacatatatatacacatgtatatatacacacatacatatatagggtgtatatatatacacacacatatcctatatctgtacaccctatataacatatatgtgtgtatatacgtataggaaaattggaggagatgtggaatatatacatatatacacatatatgtacacatatgcacacatgtgtacatatacatgtatatatacaacatatacatgtatatgtacatatataggatacatacacaccctatatatatacacacatatacacacatcctatataacatatgtgtatatgtgtgcatgtgtatatgccccttataacacacacgcacaccctgtgtgtgtttgcatgtgcgtgtataccccctataaccgaatcaaccaaacctaattactgtaccaaagtatgacattggctatgtgatwgtgtcaacactggtcaaaggaaaaggcagtttggtgagatttaacctaaaaggatgaaagaaaatagacattctgtagggcacttttcccatcgtaggcttttataaacttgtcataataaatgtagttataagtttttaagtcacacaacatacatagttgaaggaagaaacaataatacaaaactaagaccccaatctgtcttcctttgcttgttttgtgtttcacttccattacctagaatgtgttttccaggggattaaattttgctattttggtcaaagttgtctctgtgtcatatgtgcagttatctttgcaaccccagtaaaaatgttttcttggtaaacataaaatcacctgtgaaagagtgcattcattcacttgagaaaagaataagtgagctatatgctttcattattttattgagaaattactgaaggctgttactttataaggggtagcaagtatgagatttgtatcagggttgatgtagctttacttacgtttttcagattctgatacagaaaaaatgaaaaaaagtgttctttttgccttggagaaaaagttatctgaaaaggaaaatttccacaaagtttcagcgtaaaaggagagaagttcaagtccattcattacatttttaagagtatattttgtcctgtctggcatatctcacggaggaaatagttgggcttttgagaatatgtgggtgtgggcatatgcaccaaggatttgcccaagtcatttcactttagggaaccttttttccaagtgtaacttcgtgaaagagaaaaggcttttctaagcaaaactcaaattctcagcccaaatgcttagagactccagatactctttgtgctaagttagagagtcggtattaaataagtctaaaaattggattaaagtatggctaatatctgacagcacatccacctgaaaatgttcttgcttgaagagctgaaggttatgttctgacattttatttaaaaatcccacaacacttttcaaggctgaagaattcaaagttttgtggacaaattttaatttaaattatgcctcatgcaaaatcttctcagcagaattttcagcactatctttctatcaacatcaacatcaatgatgttttatcttactaaacatcatggaattttgtccttgagtaaaattatcaaaatacaaaaaggagcagtttaaggatgttaatttatgaaatcagttattatctctctacatggtaaatgatagtatttttaatttttgtgttttttcccaacaaataatgcaaatcttataacgatttaatcaaaatgtgatctgaaactgctggttaaaatataattgacacaatctttctggaaggcaatttagtcaaatgcatttaaaaatgtgtatctcctttgacctgtcaattctacttttgtgaacttatcctaaagagtaattgaaaaaagatagggatacaagtttattcatctaaacatgagttataatagtgaaaaattttaaaatgacctaataagtgacctagcaagagtggacttcattaagtaaatggtaaacatcacatgaatatttcagccaatatttattgagcacctcatgtgtgtgtgctagacactcttctagggtatatggcagtgatggaggagagaacattcttacacatagtttacattttagtgtgttattggactagtgggcaagtggacatcactacagtcattaaaaatgagtcatagaactaaagttattaatgcggaaagatgttccatgtacaatggtgagaatatattaaggaatggtaaaaactgcagttacttttgcacctaaataaaactacrgataaatatactgctttggggtgaaaataatatagaacaaaggcaatgcaacaaagacaccaacagttattatctctggatcatgacataatcagcactttaaaaacatatttatatttcatattttcttctacagtgaagtgttgattttttaaatgcagagatttgcctagtaattagtttgaatgctccaaaagtttctgctgttcaaaagattcatctatcttctacctatctgcttgtctgtttatctatgtatctatctctgaagcaagaatagaaataaacttcagcttccttcagatagctatttctgtgttcactgaccattatcgtcagaaaatatttctagatatctaactgaaatctgttgtgctgaagtttatgtccatttcttcttctcaagaaatagaatccagtgaccacacttcatgttacaacctccacgttttcagtcacttcacacaagccatgtctcgacttcatttcatatattctctgagggtgttttttccattgctctaggtttcaaccttcctttctttctgtgtgtatgaatctataccattgtgctgtgtatggtggttatgcaaattagcacccaccagagaaaggatttgaggctgggaatcatctaagttataggagagaaaaacagagtgcaagctgtacatgtcactcccagcttggtactcttttggcttcctgtcttcaagctgttggtgcctggtgccaactacacagacaagagtttttatagagagaagaggtgtgcatttggaatcctataaaaatgggtcctgaaaagtttatcttgaaaacttcaagaagcaagtatgtgttttctgaacctacagaacatcatggccaaggaggcttttgagcatgcagctaagttttagaattcctgagtcccaaacagacaaggagagctgtccattttcattaactccaaataaaagcttgaattcagcctgaagccctttgccttaatcttccttgcagctctccaacttacagccttgagaagtaacaggcactgaaggcggcttgcatttcagtgcataattgctctcaacaactgtgttgtgggtttttcttctccttctgcaaagatgaaagatgcctaatcaatgggcatcctcatgaggaggagggaacagagtagaacaaaagtgtccagggtggaggcaaatctgtggatgagagcccayctagagcgccttgctggcgctttatctggggcctgaaggcactgattctggcagcctgcagtgtgtacctgtgggcagggcaccatttaagtgcatgataaaatcagctaatgccttcatcaaactatgtctttgcttctaggcttgaggatattatcatgactccatttgcgttctaggtagcaaagggaaaacccaaaactgggcataattttaagaaaattgtcttattacttaggataattcacagatggagagttgaaattcagagcttgaattatcacttcttcatatgcgttaaagaagtctgaaattgactataagcttattctatccacattttattttgtccggtgatcacaggataacaaaatatctggttgactcttcttttttttttgtttccaaatgctcttattcatagggggagcttgtctttaaagaaccagacattccaacttggctaaatttaccaaatgttatgatgttatccttcatttacttattccacatttttatagtgttccaaatttctagccaccatcataggatagagaaaagcaaatcaaaatgtttcttactagtggggagctcacagtaggatggtagagggacagaaataaagtgctaagataaaaggcaggaggggtcagcccccaccctggatggctggctgggtgacagtgctctttgaatcctccttgagggttgaggagcaaaggaggccatttgtggagatggattgaaggagcagcctgagcagatgtgcacaaaagcaaaggagtgatggatattaaaggaagagttggccctccaatttgcctggttccagaccaatccaacatctgaaaatcttcagagaacatataatattgaattcaaaataatacatttcagcaaattttagaaattgaggaaagtaataaaatcattgaatttcctattaccaaagagctgatactaacccactgtgaggagcacaagaacttggaattgccttctttttcatgataatggacacacgtggatagatcagcagcatacctcatgtaatgaaaagaatgtgtgacttctattcagtgtgccacattccaggcctgactttgccacttgattagctgggcaattcacttaaaatccccaatttaaaaaaagtgcattgaagtatacatttaagtatgttatatatcttaatatgtgacatataaagtatataaaaatatatgcacatataatatagacagagttgccaaaagacaaaatcacaacaaatttaaagatcttaactgccttttatttgtgattctagaatcaggcaccacctcattctctaaaatagaatgggtgctttgatgagctgagcagaggagggtggctttatagacagaaaagggctaaggagaacagaactggaacaaaaagcagattgattgtttcaaaatgactttcctagtaaaggttaaagcaaaggggactttcttatcatgctagctaaaactgccctgttttatatctcaaaaaaatatatatataaatatatataaattatattttaaatttatatatataaatatatataaattatattttaaatttttatatattaaatatgttttaatgtataatattaaaatatatatatttaaaatatatatatatcttgatttcttggaaggtcagataaacaacttagtgttggcttggtggcatggaacttaacatgagtgactccattttggtttgatcttttgggcctggtgcaggaactcagtccaaaccagtgactttctgcaaattgtatttaacacactaaaatgtatttgaagcattataaacatctaagttaagattatctccacccacaatttctctactaatctctgttcatgccatttcaatttgtttcagctgtgtccatatatttcagactgacagcaattacagatatgactataggagtgagtggagtgaccctggttgggcctatgaggataaaatgcccattcttccttaactgttaccacacactgtgctgaacaatgatttctgtgaaggcattaagaatcttatacaggtccaaggatgaatagaacaagaaagaaaaatagtatctgtatgatcttgctagaggcaggcatggggttggctaaaagtggttatggagcccatgaaagaatttcatgtgctctcagaaataaatctagtttaaagagtttgactcttgaagaaataagcaatttaaaaatgcactgagatgttaatattaggaaagattaggtaaacagtgcagggaactctctatatatttctttgcaccttcctatgaatttataattatttcagaataagaagctaaaaaatctttaatgcactgaaaattgagaatttacattttcaataattagaaataagcgttaaatgaatcatgcacaagtgaacagactctgttagaagcatatacaacagatatgccatcaaggtattttttaagattgtttttaatggcctcagagtctctaataattatcccagcaggatgatttttaccatgttataaacacatgacccccaaagcattccctgatccatacgctgataggttgtttggagctgttgtgtttgggtgtcattcttttggagcaagatgtcattttagacttggcatgtggcatatggggatatggctagaaagtagataaggtaaacaacctagcatgtaatatttatctaattatgaacagctttatatatttcccctttcatctcaaatatttaggactgattcagtgagcacaatgtacacatttttttctaatacttgtttgtgaataaaaattaattaaaacaaatatgtgtttcatgctggaattaaataattaaagttcagtctgtgcacagttctgccaaaacaaacatacaaataaataaatactttctgtgtatctacttattcatttaaatattaagatgcccagagaattttgggtctgctcctgcctttattatacagcaaataaagataaaaacagaaaagaacaattttgtaaacataagcatacctcaaaaacaaagaacataaaaaatccaaactgtatttctaatgaattttgaaaatgacatttttataaacatcagggtaaaatttgagcatctcaacataatccaccttgagcatttcagtgataggtaaaaatgtgagggataggatacattgctgtctgggatattcacttgagtccttttcactgagcagtactacctgaaacatgctagaagctcattgtagatggtttattttttaaatgaggtgttcttaatcactcatttctactcccactcagcatgcacttatgaatggacagaggtcctatcctattgaatcagagacagagatcagagtgaasaaagaacctatatggcacacgaggaaggaattcttagactggagaagaaaagcccagcaaagaaatcgttatcttttgatactgaaagagctgtcacagaagaaagattgtttgcaaagttgttctgttttattctgaaatgtgaatgggaatataggtataaatcgcttttgaaattacagagaccaaatttttgtctcagtgtgaagaagtttgtgttagctaaaactgcccagtaaatggtgaggatcctatcacctgatttggaacagagtctgggttctgggtcagagatgttgtggaagggatgctttcattaggagaattgtatctagtgttctttgaggtctcttccaggtctgagggaggctaatgaatcgcttcattgatataaactagcctactgctgaatcagtgtcatggacatacacttattgagtgcctactatatgtcaggcagccagaaactctgccattatagaacccactatgaacagatagatggaaggagacccctttctggggatgaatactccaggactgtgttgggtaatgggttatgaatatgtcacagacatttatattctgcctatctttataaataaaaacagactctctttgaagagagtcagtaatgctttttaaaaatatttatattctacaaagatataccaagatgtaccaaaaagtatctttttatgatttctacattcggtatggaaaacatgagtaagaaagtaaaatattaattaaataatgtttgcttagtaatgacacttctctatcagaggggaaaaatgtctttggatatgatactgtatctgggttttgtataaatattgattaaatagacaatatggtttttgttaacaactggtcttgagtctgacaaactaaagtttgagaagagaattttatatttactggatgagtgatcactggcaagttgcttaacctatatctgtttctttatctgtcaaatggggataaatacagtaactgcctcatgagtgcttacagtaataaatatttgttgaatgaatgagggattttaaagaattaatgaagactgaatttattgtacctgtcaaaataccaggtgcacaatgattaaatagtgatgtgtgtgaaagtcatgatagtgatgatagtggttgtaatactgtctctgtttggagatgatatgatcatctatgtacaaaactatggaatttataaaaaattggttagaagactaaaccaggaagaagttgaatccctgaatagacaaataacaagttctgaaattgaggcagtaattaatagcctaccaacccaaaaaagcccaggatcagacagattcacagtcaaattctaccaaaggtacaaagagaagctggtaccattccttctgaaattattccaaacaatagaaaaagagggactcttccctaactcatgttatgaggccagcataatcctgataccaaaacctggcagagacacaacaaaaaaagaaaatttcaggccaatatccctgatgaacatcaatgtgaaaatcctcaataaaatactggcaaactgaatccagcagcacatcaaaaagtgtatccaccatgatcaagtcggcttcatccctgggatgcaaggctggttcaacatatgcaaatcaataaacataagccatcacataaacagaacctacgacaaaaaccacatggttatctcaatagatgcagaaaaggccttcaataaaattaaacaccccttcatgctaaaaacacccaataaactaggtattgagggaacatatctcaaaataataagagctatttatgacaagcccatagccaatatcatactgaatgggcaaaagctagaagcattccctttgaaaacccacacaagacaaggatgccctctctcaccactcctattcaacatagtattggaagttctggccagagcaatcaggcaaaagaaagaagtaaaggatattcaaataggaagagaggaagtcaaattgtctctgtttgcaaatgacatgattgtatatttagaaaaccccgtcgtctcagccccaaatttccttaagctgataagcaacttcagcaaagtctcaggatacaaagccaatgtgcaaaaatcacaagcattcctatacaccaatagtagacaaacagagagccaaatcatgagtgaacattcattcacaattactacaaagagaataaaatacacaactgacaagggatgtgaaggccctcttcaaggagaagtacacaccactgcccaaggaaataagagaggatacaaacaaatggaaaaacattccatgctcatggataggaagaataaatatcgtgaaaacggccatactgcccaaagaaatttatagattcaatgctatccccatcaagctaccattgactttcttcaaagaattggaaaaaactactttaaatttcatatggaaccaaaagagagcccatatagccaagacaaccctaagcaaaaagaacaaagctggaggcatcacgctacctgacttcaaactatactacaaggctacagtaaccaaaacagcatggtactgataccaaaacaaatatatagaccaaagggacagaacagaggcccccgaaataaccacacatttacaaccatctgatctttgataaaccagacaaaaacaagtcatagattccctatgtaataaatggtgttgggaaaactggctagccatatgcagaaaactgaaactggacccctttcttacatcttgtacaaaaattaactcaagatggattaaagatttaaatataagacctaaaaccataaaaaccctagaagaaaacctaggcaataccattcaggacataggcatgggcaaagtcttcatgactaaaacaccaaaaacagtggcaacaaaagccaaaattgacaaatgggatctaattaaactaaagagcttctgcacagcaaaagaaactgtcgtcagagtgaacaggcaacctatagaatgggagaaactttttgccatctatccatctgacaaagagctaatatccagaatctacaaggaacttaaatttacaaggaaaaaaacaaacagccccatcaaaaagtgggtgaaggatatgaacagacacttctcaaaagaagacatttatatggcaaacaaacatatgaaaacaagctcatcatcactggtcattagagaaatgcaaattaaaaccacaatgagatacagtctcacaccagttagaatgacaatcattaaaaagtcaggaaataacagatgctggagaggatatggagaaataggagtgcttttacactgttggtgggagtgtaaattagttcaaccattgtggaagacagtgtggtgattcctcaaggwtctagatccagtgagccaaataatgctagaaatattactaagaaatttactagacatatacattttacccagcaatcccattactgtgtatatacccaaaggattataaataattctggtataaatactcatgcacacgtatgtttactgcagcactattcacaatagcaaagatttgcaaccaacccaaatgcccatcaatgatagactggttaaagaacgtgtgacacatatacaccatggaatactatgcagccataaaaaggatgagttcctgtcttttgcagagataggatgaagctggaaaccatcattctcagcaaactaacacagaacagraaaccagaccctgcacgttctcactcataagtgggaattgaacaatgagaacacatggacacagggagggtaacatcacacaccagggcctgtcaaggagtggggggctaggggagagatagcattaggtgaaatacctaatgtagatgacaggttaatgggtgcagcaaatcaccatggcacatgtatacctatgtaacaaacctgcacgttttgcacatgtatcccagaacttaaagtataacaataaaaaaaaaaattggttagaactaataagtaagtttaacaatgttgtaggatacaagattaacatacaaaaatcaacagtaacttatatactaaaattaaacaattgacaytaaaataaaaataatgcattttataatatgtcaaaaacatgaaatgtttagggataaatttgacaaaagatatgtaagctttgtataccgaaactataaagcattccttagagaaatgaaagaagacaaatacataaagataaataccatttttatggatcagtagactcaaagctgtcaagatgccagttcttaccaaattgatttataggttaaatctaatyccaatcaaaatcctagtgggtttcctaagtgtcttatggattttaaagatgattctataatttatatagaaatgcaaatcacctgggttagcctaaacaattgtgaaaagagcaaagttggaagacttacacttcctgatttcaagatttataaagctacattaatcaagacaatgtgatattggcataaaggtagtcaaacagattaatgggacagaatggagagtccagaaatagacccatacatgtagcaattgatttttgacacaggtgcaaaggcagttcagtggaaaaagaagagtcttttcaacacatggggctggaacaatgaacatctacatacaaaaaataaacttagatctatatctttcaccataaagaaaactcaaaatggatcatagatataaatacaacacctaagactattagaccagaagaaaacacagracaaaatttttatgactttggattaggcaaggatttctaagatacaataccaaaacatgacctataaaagaaaaattgataaattgtatatgaaaatataagatttttaccttcaaacattactattataagagtgaaaagccacagactgggggggaagttagcaaatcacttatctgataaagactcttatccagaatatataaagaactcttgaaattcaagaaaacaacccaaatttaaaaataggcmaaacatttgaacacttaacctacgataacttctttatcttagagaagatattcaggtgaaaaataagcacttttaaagatgcttaacatcataaagatgcaaatgaaaacttcaatgagataccattgtatacccattagaatatctacatttgagacactgaccatgccaagtcagccacaagtggggatgtggagcaactggaaccctccacattcactgccagtgggaatgtgaaatggtgcaaatatatgtctatcctatgatatagtcattcttacccctaagttattattcaagagtaatggaagtattcttccatataaaacttttagatgcatgttcttagcagctttatttgtaatggttaaaaactgaaagcaactcaaatattcaccaattggtcartggttaaaaaaataatgctgtaccgacacaatggaatattactaagaaatgaaaaggaattaactattgttatacacaaaataacatggatcaatctcaaaataattactgtgagtgaacgaaaacagaaaaacagtacagactatattatttaagttctataaaattctagaaaatacaaagttatttataatgacagaaaggtaatctgtggttacctgggggtagaaagagttgagagyaagggattgaaaatgagaaagaggctactttggaggatgatggatatgtttgttgttttgattgtggtgatggtttcatgaaaatcaaaacttaccaattgtttgttttagacatggacaggttattgtattccaaatacctcaatttttwaaaaaagtaataaagaatgcattgtggttgtcacaatgttaagggccctcaagatgtgattttggcattccttggtcaatcttaaaagtgagatttgattgataaaagaggtaatgtggatttacattcttagytgtgactatgttgactatcattagctataagaggataggtatgcagaaatgctatcactggacatcagtggtgttagcatgattaatattgagtcttggatgaaactcagtaattaacacatttcagactcagtccttttaaaatttgtcctcaaatttttggatcataaaattgacatctgaacattgtgttccaagatactcattcacacttctagttacttggtaaatatagccatatacatcttttattttaacaggagagaattctaatttttaaggaaaatgtctgatccttcattaagagtaaaataaggtaaaatcccacccttgtattttgatttgtattagtgaaggcatttcatctaaggacttctcaaaatcctttaatgtccaaaggctgtgatataccatcttcctgtttgacaagtggaagaaaataatttagtgacttccaggaatcgcaaagcaattttgtgactgcaaatctctatatgaaagtgctttggtgtgtgtgtgtgtgcgtgcacacacacatacgtggaaatgtaggcatggcaggtagtcaggcaaggtgacaaataaaactgaaaaacttccttgattttattgcttattgaattatgttctctttttagtgaccttactttgatgttccccaaaaaggccagatactttcacacacaaaaaaattatgtaatgggcaaatcacaaagactgtgagaatggcacatgaccagagaagaaaaaacatctggcatgacaattcatccccaacttcttacctttcaagattatcccctgctttagggtgtgattaccatttagaatgcctatggtattgcttttggttcacatagatttaacacgtactcagcatgtgctatgccacacgcattttgccaaacttttggtgtacatttaatgattaccacaacactgagagatgggtatgaaaacaagattcgcttgggttgaacatcttctctatggtcaattgggtagaaagtgaaggattccagatttgaaactgggttattcaaggcagacagtctagggttcttctacatttagctgtggagccttgggcaagttaccaacatggtgtccttatctttaagagataattataaagtttatattatagagaatttgaattacagatctcacagcacattatggatcctcagtaaatgctatttcccctgcctcccatccccttctggttctagagtctttggtcttcctagtatatcggtctaaaccagattagcccttctggctgttgggtatgcatttatcccctcagtacagatctccttaataaagatctgtgttctccaaaggactgggagtcttttgaggacagagaccctctcattatctctgttcctccaatggcagcacagggtccagtggatgcctgtaaactgaatggacaggtctcatggcagtgaagaggtgccttgcagagactgcagaacatttattttgtgttacattacctgtatccctcaccccagctcacacctttctactcttagtttccatcccagagacagcttagttccctgtcacttgtctgttctatgacttgcagagctccagcctacctgggtggcacctcatggcactgactgctatgagagttccacaaaactgtccatggtgtctgtgatgtgctggtgtcctgtactcacagatgtgctcacacctgttcaggtatccaaccctcagagccctccttctctggttcttaatgtcatrttgacaattgactctgtctgagagaccaaaatagatggtcctttatcaactaagatgaatcctaaggttaaaaaacagagtagcttctgggttgacggttcagggcccagctggcatggcagatttctaaattcctacaggaaaaaccacactcctactagactctctaacartaagtgctaccaggcaaattgtcctaactttgatttacaacccagaccactaaaactctggttggacagaggatttgtctcacaaacattactttctgataagctactgcagacctaagccagtatcagctggcttatgaagcctgtgcacaaactgtctttgtgtcctatagttcatcttttgatgtaaagagccaaattccacctcattttaatgctaaaatcctgccccaaagtgaacatagaatgtatgttgcatgtatgtttgcccactgcgaatatggtcttctcataaatatgtatgatgtttctcccaaatctgctgaatatgtatgactgcattgtgtgctatgggccctatgaggcataaaaccaacctggccttcccctcttggaaaagagagcaccttcggcacacactggacaacatctcttcccagtttgcaaaccgatattggctgccaataaagttctcctttccactatttagtcatcctggtggtcttatagatggcagtgtcaacccagtttataaagctgtctttattcattcaatcagtgaacacacatcactgcgtttataatagcttttgttgttgttgttgcttttacttctcattttcttcctattctattgtctagtacctattcctctaatgacagattggcatttctcttctaactaccagatatcagccatattctataggaacccattgttttacatatttccatttagattatttgagattaacttttgtcccatggcctaccactatgcagagttctttggtgaataacatagcagctgaaatttcaacatcaatcmggttatcaccctttaaatattttatctgtcttgagtttgaggaaattttgagtattccagcctaactgtttctggacagatgccctcctctctccccgttgctgtacttggcagtttgcttatgcagggtctataggctaagttatatgcctaatttagacaaaagtttaacaggaatacagaggatagagaaytcagggcagaactggagaactgtttcttgactcttttcacaatgtcttttatagtataaggatttacatgaatttcacgctttctatgagcctcctgactacttttacagtttttatacactgagcccagagttttcccatcacgatgggctcatgatcctgtccctgtggtaagtttctgcagcctagtgattgggtaagtgttgtaaagatagacaagagcactgtgttttctctggctttttaggcagacatctgatttcctggttggcacttgtttcaaccatgaaatgggaaagactgggcattttgtgctcctaatttaaaatgattgtccatgagcatctctcaaagtggctcagagtttattagggccctctgtagagttcttaagggggatggaactcgtttggaacgtgtttatatgacctcttctctgattatgttggaatagctgtgacatttcattttcggggaaaaagtaagaaggagggttacacctttgcaggcaaaatattttccactctaacaggcaaaaaaagaatatttgaaaggtttttcttctttctgtaaatgaacagataaaataatttaccctaggagagcttttcattgcataagaagtcaattcaatatcaggtcaaatggagatattgacctgatactatactgatttcccatgaaacatgggaagtgctttgacccctggcccaacctcttctcattcctctatatcatctattctgtgtgtgtgcatctgagctcaggtttgtttgagagatatctatctccaaaattcaaataaagtatttgtaaatgtaattatactctataaacagtagaagaactatttaatctggtcctgctgaaaatcattttcttatgtaaagagtgacatcttaatttaaccttatgttatggattkgggtgtttttcatakgccaagattatttagtgtagtcctttggaatttgagattatttatttaatgtcttccctttctctgtgacagtaacacttctcttttttgtctcaggggtcatcactgccgcagacattcttgatcgggagacaatggggtcatactggctaacagtgtatgccacagacaggggcgttgttccactctactccaccattgaggtctacattgaagttgaagatgtgaatgacaatgccccgctgacctcagaacctatatattatcctgttgtcatggaaaactctccaaaggacgtatctgtcattcagatccaggctgaagatcctgactccagttccaatgaaaaactgacatacaggattacaagtggaaatcctcagaatttttttgccatcaatatcaaaacaggtaagggaatgcttatatgacttctttttagtttgtagtccagcctttaaattcatcagcctgacactttctgtactcatttactttattttctaaagaatagcatcttcctttctgagaatggtttctgaaaaggtgagtgccacttctgcctatgtggtatgttttaatttcacttgacactgagtgggagtgatctaatcaaaatcagaggttttcacaaaaggccttagatttgctttactcataataataaaatgtggttcccaggccactcagagagccagctgcttccttctctttcttgaaaagagtaacctggcctctgctggattctatgagcaagctggctttgtgatgcctctacctctagacacttctcccttgctgatctccttaaagccttcacctcaaactccagatgtttttgcgattcctgtactacccatcaaggaagcatccatgtttaaaagaacttccagtgtctcaatttttacataaaatatgtataacttcaattttctggtcttttgctcaaaacgtttttagagattgtaatgaaaacttaattggttgagtaagggtaagaaaggtctaaggatcgggagcaggtgtgcatttggctgaatgcattctgagacaggtatgtacgttggaaaagttttttgcagatctgagaggttcattgctttcttgtgatttgcctcttttaggtctgaacaaaggagtaaaatagagttgtgatggatggggttttaattctttgaaatttagaataatttaaattaatttcaccctgggcaagtgagttgatattggttcaaaaagttaggcttagttgagatttgttggtgtgaacaaactcagctctcctaatgaactactaatctagttgatggtcgtttctcctgcctatgtttgttaaacagaaacatgtagctgacctcaagtattttataaatgtcagaytcccattaatataatgaaagagaatgtcagggtttaagaaagaaaattattgattttctctaattatgagtggatcaatcattttgttaagcagacttttgcattctaacagtgttgaatcgggatttgacttgtattttattgtaagacaaagagagtagtaattatcagtatctgttgaggcctgcttgtacttgcagaagaggrctcagatttggagccttggcccaacctttcagagccccattaagtagataaaattctccatgcttctgcggaacaggcctccaactttcctgggaagccctcctgatttactttttggtatggcaaagagctccttagaacatagccacagagaaatgaattcaatcactttgcaaatttaagagtgagggttgtggtggagggagagagagaacaaaaacaaaaacaaacaatgtcacagtaaagaagttgaggccacagrtatcttcacatttcacaacccagtggagcctgaaataccccagtcagattctgcttcttccatcttgatcccattgctacttgagtcattaatggtaggcccagcaccctttttttaaagaatttaataaaaagctgcaaaagggaagttttctctgttctcatcctttacttaggaatgaatagaaaaaataactgtcacagggaagagggaagaatttgggttggatgtgaagttcagagaagaacatgctcattcatgtaactaaagctttcttttatatggcttttaaaagtttgaacataatttttcagaaagccctgttttatcactatttggcctacgttgctaataagatccttaagcatgttcataatttctctcttcttgccatagatttttaaaaagcatttttgccaggaatgacatttttgtccaactgatctaattgtctaaagaaatatatagcataccttgtagtttccagacacatgataagaaaatactgcttttttatccatttattcaatcaccaaccacttattgtacytattacttttcaagtaagatctaataaagagggttataaacttaagatatggtcccagccttagggacccaaacttatatgaacttaacaaatacttatgatatagctaaagatataaatgattccagcaggggagcttcactcaatatagggttggtgggagtgatggtcagggagggcttcatggaggaagtcacatttggagttagaagtcctgagtttcaaatgcttgctctgtgctttctaactacgaaacaccatagaacacagtgggggaaacagactgtattgcacagttttcaccagcttcatgaacttaccagcttcatgaccttggggaaattattgaacctctcttaaatgtagtttttagtgagtaaaaatagttgcaaggartataggagtcctcaccagaaatcctttgcacagtgcctggtgcattgaaatcccacaaaaaaagctgataccccattctaactactttactgtagttacagtcatttaatctctttggacctcacttacttatctggaaaatgaaaatgaccttgcttactctgcaagggttgctcatgaagtctgaatgtcatcatgatgtgtttgaaggctgttggtaaactacagagttctgtaagagtcatgttatgcctatttctaatgagattcacagaactccaagtctggtgaaattcttgttaatggtgttgctctaagtatcatgctgcctagggggcaaccttcagccagctcaaggaactctctaatagaagtcttaatttttggcatttcttcctgactctaaagtcatttgtctgaaatagttacatcaatataacatttttcagtaatgaagctggatgtgtagctaaccagtgtgtagatagatagatagatacayagatagatacatagatacatagacagaggcatactaaccagtatwtttaggaaagatttatgctttagatttttttctcaaatggatgttgactctagtaaactaagctttcatttcctcctctgctgtacagttggaatttttagaatttggttttgttttggcaatgtgctacataataaagattaaaatgattaacgccaacgcaaataatgccaagatgtatgatatacagcttgtagcagataacagatgttcccaaccccaaaatggagagagatttctttatcgaacatctgttctctacacaaataactgggtttttttctaccacatctagaatcacgtagaatcagtagtctgtggactttctttagtaattcctgtggcttaaggaaaacaaaagctgtaatgctgtgtggttttttctggccggtacagagaactcttgcttaattccaggccaagcagttaaattcaatcaaatgcagcctacccccatgtctgaggtggagataccatcaggccggtgttcacttgcctctttgggtgagcaggaatgttgcttccttccagttcgctcagtcgcccaggctggagtgcattggcacgatctcggctcackgcaagctccgcctcccgagttcacgccattctcctgcctcagcctcccgagtagctgggactacaggcgcctgccaccacacccggctaattttttgtatttttagtagaaacggggtttcatcgtgttagccaggatggtctcgatttcctgacctcatgatccgcccgccttggcctcccaaagtgctggattacaggcgtgagccaccgtgcccggcctccagttcttttgagggagtccagggtggccctcattggtcatccaggctgaagtggggagcaggggtggaaatttcttctagggctttggaaggtttattttagtcatgtttacaccatggaaaccccatagtacagggctgacatgccagtgtttagtagagaactcaataaatgttaactattacgatcatcatcatcatcccgtatttcccmctagaaaaaaagtctgtgtaagctacaagcacactgctcctggaccccactatcttgaggaagacatttctgaaaggcagccatgtcttgccttagcaattgctaggtagcactgaaatcttcaactcagttttatgaagtgcatgacgtaccgttgatctagaccccaggtgtcagcagggtgggagacataacagaaatacattggaagatactttctgcactcagggaatttagtctcataggaaaaacagaaccatcatacttaccatttaaggcagcttatttaaaacaaaaacaaaacaaaacaaaaaaagagtggagctttgtggattataagctatgaacagtgtaacatgtcagagcagagctgagtaacaggggatctttgcggacctgaagggggcctgaagaatgggctgacctgcagagacagaggccagataactatacagggaatataaacaagtgaagcttaccagatagcttgagaggcatgatattattagaaagcgaattttaagagtcataaatgtcaggaaagtggtaagatattagaagtagcaaatacatacatctcttttcatttgtttctgagtttgataatagttaaattttaaagggccttgttttttttgttttgttttttttgtttgtttgttttttccaatcttccttctgagagacctacttcttaaaggaattattttaaagggaaaaacacatacataaaagagaccccttcattctttcttttgtgtctgtaaaacatagatccaggattagcatatgctgcattgagagtctgcctgtgaaagtgatttttgcttaatccagatctttcaatggttcactgtccagggcatggaatttctaagtttatttctgcagttgctctgtctccctttgacccatgctccattcactggcatctccacttgtatttgagtagaggtgaagttcagctttcttttgctttctgtgagcatcttgaaataaacctgagtaaaacatagtttatgtgttggtagactggctacccccactttaggcgacttaggaggaagaaatcctcttcaaaagtgtgtgtgctgtaagaatacctcaaattytacctttaagtattgattactcctaggatagacatttcctttctctattaaaattggaggagatagcttattaaaatattggatgtctttagttttttaatcagctgcatataacatcagcatgccttttggtatatggtatacaacatagtggataagagagggggtaacagggagagaaatccagaccacacttcaacctgaaaattattacctggtgagcttgctagactatagagtcttaggccagagcttgattatttgcatttttaacaagtttctaggtgatgatgatgttgctctctcctgagagcctgattagcaaggttctatatgaaacaaatgagggaggtaacaaggtgcccagagacacctgaggacaagacmgcaaactttatgagttaccccaacatcttacggggctgaggtttgagagttaattcagtcacccactcccaaaatcaactcccatatccttacttatactttctcttttatcaagtggagaaaaatgaaaatcctgtctctaactatccatgagcaaaatatcacatggattcctaagacttgtagttaataaaaaacctgggtcacgtaatgtttggatacacttgtattatttccaaataggtagaatcaagcagaatttgttattaagtggagttcagacctactttaatgaatcaacaaacattattgtattttaatatatgattataaaaaagtgttagttcataagatatggatgttcaaaaataatttgttatcttaggtaagttaagccttgtgtttatgcacagttccatgtggtggtaatctgcttagaaaaccaccttttctaggaaaagaggaggaaaccttactttatttacaaatatagggatttaaagaaaaaaaaaaaaggtgaggtacaagggtccaaatatkggtgcttgtttttcagtgaacatkgcggaaatctatkgtkgtttttkgttctttgtttctttcgggatggcagagcccctcctaataaaaagctaaattctcctgaatgggtagaaatggctgccggatgatgagttgatattcataactacaggcacaaggcagataatgtagcgaatgagtatgtgtgaaactgtaaatcacccttgctccttctttcagccatgaaaggagcccttgtcctatagaacattaaattgtgttcatttaatccaacaagtccagtagaacaaatcgggcttatgcagatttatcacrggggttatttaaattcagcggtgacctttgcatccacgtgaatgtgctccacatgaacaaggacaaagggaacttttctgcattgtcattatgtccccagggaagctgtgcagttccccacttgatcagctcacaactgtgggttgagggtgggggtcatggggttccaaggatgtggagggctgggtcagggtgggccatcaggcatgggagagtgtggtgtattatatagcataagaaaaatgatgctcttgccctggctgggaccttatcctgggcagaggcagctcagaggtacttcctggaactacagttcattctgggggaataatcgtgttgctctgtgttccatgctgcttcatgtcttgctaacccactgagaacaggtagcgatggtgtggtattcccagataaccagccttcctctggggctcagctgcattgtgtagctgctgttggaaattaagtccagagtgtggactcgctctgccttcatatagcttcattttttttttcatatacttattgtgaatgtaagtaccaacttcagagtttctcaacctcgatactgtggatgtttttggtcacataattcttcgtcgtggggagctgttctatrtgttatataagatgttcagcagtatccctggcctctgctagatgccagggtcaccccttgcttcagttgtgacaaccaaaatatcaccagacattatcatacattctagggatgggaggaactgcccccattgagaaccattgcactaacgtggaatactttacagaaccccattccatatggcccctagcaaagcaccctgtgcaaaatgaaatgactgacaattgagatgtgatggcatataactataactattatatgtaatacgtgtgtatgtatgtgtayatatatatgtacacataaatattattaataataaaatgaaatacctagagggaaggaatgttacacaaagaggccttgctaagtttctcccagtttattaccattaggatgtaccctctttgtccagtcatacttctacacaactgaccattcttcatcaaacctaaacacaaaaatacacagttttcccttggctttgggttttcttttctgaagaatcttctgtcttatgtaacttcagttaaatacatttgtatgtttttctattgttaacccgccttttgttacaagtttttaaaaatttaaaagagaagaaatccaaagctgcctctcacttccctctgactccaggttctttgtattttaaaggctctatgaatacttgaaatagaatccattagagaaaaaataataataataacaaaacttcaaacagaatacatgtgaattaagttatcattttctcaactcttaatatttggagaggatttggctggtaacgaaattctcctcagagcccattttgaacagccttctccagaaaacatcatgaagggattaatttcagagtttcagggtttcttcccttgaaatgcttaagcagctccaaatcctgttcctgcttaatgccagccttctgacggatcaatatgtggattgtttcatcattggaatgaaacaatccacattagatgaatcctagatgaaaaggggggaagaaaaatccttgtgacctcaggtagggattctgcagtcatgtatctagattaaggctctctgaggtgttggcatccatattaagtattcagtgcccatttacaagccccagggaactgcagatgcatagggacttagaccagtgtcccagaccactatctgtttgttttttaagagacagagtctcccgctgttgcccaggctggagtgcagtagcatgatcatagcttactacagcttcaaactcctggactcaagcaattctcttagcctcccaagtagctgggactacaggtatgtaccaccgtatccagttattattattattattttagaaatggggtctcactctgttgcccaggctattattgaactcctggcttcaagcaatcctcccatcttcccatgtgctgggattgcaggcataagccactacacatagcccctgagccacgtgctggatccccatcttccagtacgtcataggattttgaagccttgggctaagtgcgaactagtgccaccatccatgataggaagtaatttgactccccaattaagttagattccaatggacagggcaacagcatgtgttttaccccatttatgagaagcagatttggatcttcgagttaacaggattgttacttggaaaatgattgctcgatgctgtttctttataaaactgaattacaggcagggatagggagctttaataaaaggaagagaggaatcagcagtcatgaactaaatgataagagcataagagaaatgatgctcttgacctggctgggaccttccccaacgcaggggcagctcacaggcacttccaagagctatagttcattctaggaggagaattgtgttgttccttgttccatgctgcttcatgtcctgctaacccactgagaaaaggtagtgatggaggtggtagttcctatagccagccttaccctggggctcagctgcatggtgtagctgctgttggaaattactgagaattatttgggagggtgatagagtcatgtaaatagagcagatgatggagctgtatttatgtgttaaaaaaaagagagattgattaargtcataaatttctcttttatttcttctatctgggcattatttccacagcagtaatttactacattgctttattactttcttctgttctgtgggaaacagtgaattttaattgaaaccactgcccgcctctctccattcttggatgccattgttagggagactcctagatactgctgggctgtgtgtcccttgtctatcaagtatgaagggatggtggaaagaggagccttaacccagagcacaggtctactcactgtctcgagccatgccaacatgttcatgtattagctcattcagcaataaccacagtcctggggggggaggggaacaaaactctgggctctgggcacaaaagtggtttgaccagggtcacccagctggtcagtgccgagctaggattggtctgattgatggacttaatgctaaaaataaatgctattgaatttgaaaaacatgagcaaactaaataaataattaatgatcctagaactttgtggggaaagtctttcagatgattaagcacacattctttgttttataggtgtgttaggggttgaattgttmcccaaaaagacacacaactcccagcccacacttgtgaatgtgaccttatttggtaaggaagrtctttgtagatgttaccaagttaaaataaattcatattggatgtgtgtgggccctaattcagtgactggtgtcctcataaacagagagaaatttggacacagagacacagacccagaaggaagacaacgtgcagagaaaaagtaacattttcgtcacckaagacaagattcatgcctgaagtacctgtaacaaaaggcaggctaacaagagaaaaacatacaaatgtatttaactgaagccacataagacagaggagtcttcagaaatgaaaacccaaagccaagagaaaaccgtgttatttttacgtttaggtttgatgaaaaatggacagttgtgtagaagtatgcttggaccaagagcgtatatcctaatggtaataaggggcaatgtagcaaggcctctttgtgtagattcctcttggcatttttgtgtaacattccttccctctaggtataaggcaggacacctgtcacatgagggtctttaaaagaaataagagggtaaggtcagagatacctttatgcttctgtagttttctcagtttcctttagcttaaaatactccgtatgccaaggtgctgtayttgaggttattgtgttggaggccccaacaacagccctgagaagatggaagcagagactggagttagaagcagagattggagtgatggtgccacaagccaaggaattccaaggaytgccagaagctaggaaaaaacagggaaggatgcttccctagggtcctgatagggaccatgaatctgccaacaacctgattgtgaactttcagccttcagaactctatgagaataaatatctgttcttttaagctacccagtttgtggtgcttggttacagcagccctaggaagctaacatgagtgcaattcagagaatagctgtgaagggtgaggttctcctaaaggagggaggaagaccccatggcagaatgaaggaccactgactcctagtgcagtactcttttcactagacaaaatggtaagaactttagcagtttttgaaccactcaagcttggttttagctagatagtttttttgtttgttgttgtagtacttatgatctagttgaatttaactatctgggttgttctaaaagggtagaagttggatgagagacttctaagtctctcattgtttctaagtcattgcattactatagtcatttcaagacttctgaaagataacccatggataacaccatcatttcttacaggagtgtttttacagaaggccatgaggtcacgtagaagttaatattgactggcattcagtgtgcttcataaatcaggatctcatcagtttaattcattttgtcatttctcagtcttttaaagcaattttctgaaagcacttttttaaaaaagcattgaagttgctatctgaatagtttctatagtttgaacagtagtttatccattgattgtgagaacttaaagtccagttttagtattgttaccactttatattctgatcttgtccttttttgtcayctttgagtgattttgttcttagcttcttgacrttcttataaaagtgtgtaagtgttttaaaaatccataaactttattaatattgaggtagattattctgggaaagcatatggaactttaacaataaaattataaaaccaacacatgttgagttattgatagcagtcctgttgctctgtagtagaaagacacatttgctttctactttgctgtacatagtcatagttaggcttcataataaccttgagagggaaagaagctagatggagtagtaatcatgagcttggacatgagaaataaatgtctttgcattttgatcccagcttcttggccatgtgatgttgggcaagtgacttctctgagcttcagtttactctgtgaagtgaataattatagcaactaatgaactggcttgctattaacattaaatgagttaagatatgtaaagtattttaaagggtattttgcatgtagtatactctcagtaaacgttcaatattatctgcatatggacggaatttgttttagctaattcaatgtccacattgtatgattaaggccttagacagttcgtcttttcaaattatgaagaacattttacctgggttcattacatttcatcttgtaagattgtgatcatctgttgatttctatatatgtggttctctaaattaagttgtgcctgataagtggactgtgatggggctaaacaaaggaccctctctcaaactcctagaaacctctctccttgtcttcaatatttcaacttcccaagagtaaaattatatgacaccttggaaagttcactggtagtcatagcttatccagattttagtccagaccctatcactattattaacagtggacaagtttacttcatttctataggccacagaatcctcacctataaatcaaggagtttgagcaacaataaaaccatcaatacctgctgtgtgtactgctacagcatttcctactcccacgtagacatcattaatcaattataatggcctttcatacatgctcatgctttgcatccatttcaacctaaccctgagcgggagctggttttgcraaatgacatttatttgccattgagggccctgagaccgtctctatctctgacagtctttgagtctatatatgagaatggtattgaagtgaagggaaaaaggagactggtgggagagatgatagaaatgcagttaatcaggtcttggtgacttggagaagagctgaacatgagaggagaagacagtctcaagggtgtagtgaaaaggagcagcaggtttgaaacctcacagagaagataccttgctgtaaataactctggtgatatctgtataccccttagcagcctcctttcctgtgtgtactgacccccagtctttccctccttgtctcagccagttagattggggtagacactagttccaggattctctcttccaggaatttattattgggattcagagataatttctgggtgtggtggaattgtggagttataaacctgagaactgtagggtgcctatgtgcatgaagcaactgacagacrgacagacaacagacaaactctgataggcattactgaaactcagctatgctccttgcatttaaattccctaatatacccttgtaataatratacgtaattttgctgtcaacgtttgaaatagatttccctttatttaagaaaaatatcttaacagactctaactggatccccagtcaggagagaggctcaggaaagaagagctattccctgatgtcagttgctgcacaattttgttaaagagtggaagaaggaagcctttaggttkggtaagtrggggagatatcagggaaagatatttrtctttataagtcatgttattgctgggagttttcatcgatgctatttggatgttggccatcactttttatctttcatttgtgaaattttgtggatcaaaatctaaaatgtcatgatctccagcatgtatgtgaattaagccctgtctctctttattaatagttcttagatggatatttgctggtttaaatgttatctatagtgttctataaaaattgccaacaattctattaagtgtattattctattttagacaattctkcttatctttaacctgttgaacaagatctgcatgataaacacctgttttctcagaattttaccctgtgaaattcaccagtacacccacaagaaggatggaatcctctcagttggaagcccatttcattcacatactacccataaggcaatagccaagtttcttaacttggtatagctcaggttccctatcaagaaaatgggtatactaactgagatgctgaggaaattaggcgggctactgtattttataaagcacttagcttagccttgcacatacaaagtgctcaacaaatgttaactgttatagctattattaaatgcattgcttgtaaagaatcttttcttgaaaatcgatgaataatcaatctgattaaatgccttgaaagtctctgatatatactacatactcatgttttgtgagtgcctgctrtaaaccaggtacaatgctaggcacagggtgtacaaggatgaataaaacaaggactttacccctttaagacctcacagttcagaataatttcaccatgcactgacatttattgctactgccacacagctttaaaatgaagagattaagtaaataatattaaggttcttatgggacctttttttctggcaataatgaatggttataatatttattggttgttttaggaaggaaagcctctgagaacatgagtgaggasatgtaaaataaatccatcacattagaaacagactattaaargcagaaaacgctcagcctctgccaatgaccatttttaaatgtgtggcctttgcagatacatcagttaaccaagacaaatccaattttacctcccaccacttaagtaaatttctcttctttgtaaaatttcctattttataaagacatgcttcatcttgactatgtacatactaaattgttcattttttactgagttaaattgttttctgtcatagtgagaaatgcattcttctgaagaaatgatattcatgcccgggaaatggggatatttattaaaatgttttattaggaaactagatttagacatatttctataattttcatatttaagtatttttattgcccaatgaaatgactttcagtttaaaatggactcagataatcagtctccaaattctcacttttatacttaatcaaatatagttggtggatttatatttgcctgcatatgtttagaaatattagagatgttttcagtagaactctatcaatcttttgctgggttgtaatagctagtaaatgacttaaattattttgtgcttkcatccaactctgatttaataagcctttacggatttgggattgtgtacataggtgtgggaggaacacaaaaaacaggaaacttctcaggcctaaagaacgaacaggctgtttacaagacaaaagcacctcacagtaaaagaaaaacctgtgtgtaaatgtgaatttttggacttgttatttaagttgcctcttggaattttagtcatrtctattatttccaaagtcagaagaattatctgtgcccagggttattccagataactgatgtttaacattttgagtggcatataacacacacaaaaaagattatatttctggaccactttttaaagtgtattaatgtgtctttcagttttcaaacataatcttttgaacaaagtgataaaagcagggctggcttcatgggcctgccatctatgtcatcgcatagggccctgtgcttagaagggccacatgcttggtgtccttctgtcactgtctggaaattcttcacaatttttgaacaaagggcttgacatttttattttgcgctgagccctgcaaatcatgtagcccatcatgcatacaaggttttcacttggactgttcattattgtctaggatatctagtgcagtaatatttgggtctcctcccttgagctcagcttgccagcatacacttctgttctcaggacgcctctttcttccagggctctgccttctaatttgctgcttctcatctgcggagccatcccataaataaggtattagaatagtaagtaggctgagaatcactaggctctgaagggtgaccttgaagactcctcccatagagtgaaagtacctccacgtcagtagccaagctttactgcatttatttccgggatcagaggctcctctcctggattgattgcactggtgaagtggccatctctgtataaacaccaggtgggaccacaccattctggcccacttttattaaaggaagattgttgtaaaaaagctattttaaaagcctacttttttggaaattaatcatagagggtaagaaagtaagtgaggcttcttttcatgagactcctgttggagaaatcttacaaattacgaatgtttcactattgaccatgacagatctcttggatttcagtaatttctgtgtcttcaagttgttcatataccttcaaagtagtgttcatgcaagttgttcatataccttcaaagtagtgttcatgcttggtgcccttgtgccttgagtcctaaagtgaactatggcatgtttttgttttgttttgttttgttttgttttgttttgttttgacacagatcccagttgctaagctttccatataattacagaactatgtttttcacaatctccagagaccactaccagctaaaggaaagtgggtggattctctgtgcaatgatttctagttttcttctggtgcatttttctagtttstaatattcaagctacaggaaaaggaaataaaaaggggaagcaaagccaactgttctgttgttattttaggccatccatagcataagaaatatattggcaattatgttacaagaaaataagatttacccaaatagagaaaagagtacttcttactcatttacttactcactcattcatttattcgctcaacattcagtgttatttattgaacacctactgtgtgctaggcactgtggtgtgtaccagggtgcaatgaaggataagaaaattattatccattccaaggatggaagcatgtgtgtactttatactcaacagatgctctaaggtaatacagaatgaatgaatgaataaataaatgaatacatgctttgaataatatgcatcactgatactgagcagggatttctcaactcatttttgtagcaaaagattcttatacctttctgaaattgaatgatggcagaaattctcctaactgcttttgtttaaactcctgtttgacatttgaactgttttcaaaatgtcatctctggattcacttgcctctgaggaattgaaggaaattttatrttgacatagtctgcaagttgtcagaattcacatagtactagaaatttcataagtattcataaaagaaaattaagagatcattaatctctttttaaactggtttaccccacattctcaaagtgctttgggaattgcagtatcaagtttgtgccaggtcttaaacattarctgaaatggttaaagacttgggcatggttaacacagtgccatggtgccctcctacctctgtgaaactgtcattttattatgtttgattttaatgcgatttgatatgtggggggagaaagcaggtaattatttggaaaatgyccgttacttttataaataggagaaatacgggagttggtctttgctaatagaaatcataatagtaattgcagtcatgattattatatggtgcttcacactattaaaacactttatctatgataggtttagaatcacctgttttacatgatgaaagtctacctagggaaactacagaaaagttctctaaagttagaattttgtacctcagaatgaaaagcaacagacattataaccaactaaaatttcaacgaaaatgccaagaacacacaatggagaaaggacaccctcttaagtacatggcacttggaaaactgaatatccacatgcaaaagaatgaagctagacccctgtctctcaccatatacaaaaataaactcaggatggattaaagacttaaatgtaagacccaaaatgataaaaatactaaaagaaaacatagggaaaatgttcatggcattggtttgggcaaagaatttttggataagaccctaaaacacaggcaacaaaaacaaaactagacacattggattatgtcaaactaaaagcttctgcmcagaaaaggagacaacagagtaaaaagaaaacttaaagaatgtgagaaaatatttgtaagctatgcatctaataaggggctaataaatagggtatattaggaactcaaataattcaacagcaaaaaaaaaagacatacataactctgattagaaaatggacaaaagacctgaaaagacatttctccaaagaagacatacgaatggccaacaggtatatgaaaaaatactcaacattacttatcatcagagaaatgcaaattgagatatcaccccaccccaattaaaatggctattatcaaaaagacaaaaataacaaatgctggcatggatgtggagaaaggggaactattatgcactgttgatgagaatataaattattatagccattatggaaaacagtatgaagattcctgaaaaaaaaataaagttaccatatgatccagctatcctactactggatagatatccaagagaaatgaaatcggtatattgaagagatatttacactctcatgtttaatgcagcacttttcacaatagccaagatatggaaccaacctaagtgtccatccgtgggtaaataggtaaagaaaatgtggtgtgtatacaaaaaggaataccattcagctgtaaaaaagaatgaaatcctgtcatttgcagcaacgtggatggacctggaggatattatgttaagtgaaataagccaggaacagaaagacaaataccgcatgatctcactcacatggtgaatctaaaaaagttgatcccatagaaatagagagtagaatagtggttgycagaggcttaggataatagaggaaaggagaggatagrwagagattaatcaacatgtataaagttacacttagatagaagcaataagttctagtgttttattgcacattggggtgactttggttgccagtattgcattatatatttcaaaatagctagaagacaggattttgagtgttctcaccacacaaaaaaggtaagtatattatgtgatagatatgccaattgctcrattttatttttacacaatgtattcttgtatcaacacatcatactgttcccactaaataggtacaattaatgtatgtaagtttctttttaagcagcagagaaatctaggtgactaaaccacctgatgtagatcctttatttttgatggcagccaatcattgttttaatagttaaagggagaggagtggtggtaaaactagggctagatgtctgtaaaccttattataagcaaaatatttgtaaagctatgcaaatagtgcacatagtgcactgtatgccttatgggtttgatctgtaacatgaactcatcagaagtaagctaaattcaacactctccgacctttaatgagttgatgatattgttctgccttgatttgtatattaattatggatgaattaatttaacaaatggatatgaaaaacctactctatgtcaggcactgtgttaggccctggaagcacaaaatgagtaacacatcttccctcaagataggtaaggtctgtctgtcagagcacacttctgctgacttatgttctgtttttgcagtccttcatttcasttttattgatcactactgaacaatagtttcttaccctttatagctttaattttccctgcattctaggttatttgtcaagacagtaatgattgtaaaacaatacttctacgtactagggaagctattttgtgtgagatccctgtagtcagcccttgtgtagagaagaatctcaaattattggttctgttttggggcatatagtacccagttaaatattaaaatgtttaaatttctaaagtgatgttaactgggagaagctgatatcttttcagagatatatattgaagagagattgattaatggttacaartatgcacttagatagaagaaataagacctggtgttcgatagattgtagggtaactatagttaacagtaatcaattgtacatttcaaaatagctagaagggaataagtcaaatgtttctagtataaagaaaagacaaatatttcaggtgatggatatcctaattacctttacttgattatatgaatgcttcamattatctcatgtactctgaaaatatgtacatctaataagtatcaataaatataaataaacaaacagaagcaagtgttgaactaccagtttgttataactgccaatcaaatgtgccctgggacaaactgtgtctgccatcacctgccacccccattccaagtactaaattgcactataaaagcaggacttttaacagggtcagctgtagcatgggtgccccagagccctgcccccagtcaggaaagctctcaggattcacaaagactccagatgcttccagggttcagcattctcctctgggaacagggaaggtatcgccaaccgcttcagccctcagggagctcctggttgagagggaacagcctttcctatggttaggtgcaatcacaaagaagatactagtgctctaacaggttttgagacttatgtgtgccagaccctgtgctaaagtcttattgactcttcatagctgttggaggcatgtgttgataatgctcactgttttacagatgcttaaagaaatttggtgtctgtcaaagcctctaaggataggtcttatctgctgccttccttcctcctccgtgcaaccattcattacctctctgtcctcttgctcactcctctttgccctcctcatgtccccaagcactcaggcacactcttgccccaaggctgttgctgttcctgctgcctgaacctctcttcttcttgatrtccatgtaactggtcccctagttctcttcaaggccttcctcagtgtcacctctaacaagatcttccttggttacccaatccaacattgcaattctcatttcttcatgtgccccttccctgctttatttctttttatcgctcatcactatctaacaaggtatatatgtgacctatttattttgttgatctyttattttttcacagactggaagagccagggatacagagtttttgtccttttgttcaccattggatatagtttcttgaactgtgactagccaatagtaggtatttactaaatatttgttgaatgaataaatgaatgaatagctaaattagtgatagaataaatttgctagaattttctctctcaaagataacaagtaatgtggttcaaatgtatagtcagtctacaggctatgcattaatcttccaagccaagggccaggtagtmggtaagatttgcacttgctctttaaacatgataggtgttggtaaattgctcaagggtagaaaaggcaaggcactcatgagggcatggaagcagagagacagccaggcacatccttttctctactgtcctggtttgcttgggaatttgccttgccaagcatctatttaagacagcgttatcccatatccagtcatgggtgttttatgctatacagcaaagccctttcagagccacctctggacatgtagttgcctagcaaataacctttccatcttgagttcataactgatatttgaatgtgactgggcatttctaaaattaagcttttgatcctggaaacattcacagctctactagagaaattgtcattctttctctactcctctctccacgtgcttgttagatttttccatacgttgtttataataacttttccttgtggttgaagataacagatttttgcttttaattcaagaaatgtcgtctgctgtaatgttttgcaacatgatactttccaagtttcaaagcgagcttgtgttgtgggattgtgtttttgcatctgaaactgtaggggtggtgataatatcccgatctacagagtgcagatcctctgcccttccatccctgtcagtgtgtttaagggaacgtaaaggatttttctgtcattgtaatttaaattcagaaggagtctatttgtatggtaatcatgagctaaggaaaacagtgtttcatttctctctgggatttgttttctgacatcttcacattctctactactttaacctggcaacagcatattaacagcaattcatactctgtattttaacatgtagaacagtacccagaagattaatacatgatgaggagaaagaagtaagaagggaggttgaggccataattaattttgctttcatgcaccatatgctggtgttttctgatcttaactgaaattagggtcaccactgagttttcaatatttaaaaaaatgaccgtacatagtgaagcacaaataaaattgcccttcttttgaatattaagcttccaacttggggatgcaaattatattcttgttgtttggattcattatttttcaatsaggctcttttagtgggtggggaacgggggctaccagtgagaacaatcagaaagaactccgctaactaactgcttgttggcctgccctgaacagtggaaagatgaatagttaagaggcttctctcccaatctaagtaattactgcatgttcttgttttaaatgagagagttgtgaggctaggggttatatcttcartcaccccaaatgacacctccttgttcacaaaacgaattcaattagattaatttccccagatgatcctattaggtgagacgattcacataatacgtaaggtctctttagatcaagggtcttatgctcagaccttatgctgcctacatgagcagataggtaacattagggagtgaaatgtggctggtcatcgagctgcttctcccaagaaagcagggcattggctttgaagttctggctggaagctttactgtaaaccaataaaggtggccaaatagccagtctcaccctgcctaaaagggggcagccgctatttaatcccaacagatgattgactctggaaggttgccctgaagttgccatattgcattcttcaagagactctacaaagtactgttttcttgtgaaatcccctgattattatacatgttagttcaaattgaaaagaagcaatattttgtgccagccaagcaaaacatgcctatagccttaaaattggcaggtctgggatcaaaaagagaataaagggaggctacatacggcaagtgtaaaactgtaaaatgtaataaataaaactaataaaatatgttctgtcttccaactttgacagatgttcaaacctgaaagaccaggtttgaaatttttagttgtttcagccctctgagtaccagcacgaggtagagggaggagagcaggccctacctcccctgcttctgccctctccccttctcacccccagctgtgtaccacatgcatgtatgtagagaccccaggcccacactctgctctgtccctcatcaacagccatccttctgccaaccttctgccctgggtaktatgaggcacgggctgccctagagataatggatcatgtgaagagacccacttggccctgaaacagagtaggtgggcatttgagcagataatttcagaattcctggaactagagtttggtctagaatctagatttagctgatgtgtggagggctgtgcagaggctctggggggcacatctccttggcttcttgggctcctggccctgtgtggagaggcatggtaaaggagacaggtagacatcttcggccttggctggaatctacaagcagtactagcttgagcacttgatttatagaatatttgttccagatgagaccttagagtgttttattaatcccaaggcctcagtatacgcagaasgatcctgtctgatgagaaatagaagaattacaggctttttagtcagatatatctgaacttaatccatagtccagtcatttaccatgttggtgacttgttacttagcttccctaagccttgttgtgcccctcaggaaaatggagatgaagtggattttatactgtcgtatcaagggcttttatcacccgttatgctcttgagacctttgaacagtgggtcatcctgacagaataccctccctagggaaggtctattccatgtgactctctctcaggcacagttgtttgcttaagctcttctgattaaatacaaggacattcttaggcttccctttcagtccttgaattatctttttatttttcataagaaaagggagcagcaaagaaaggaaattcrcaaaatgatgttgcttaaacctcaaaaagttcatgccttttccctgaactgatgatgataacttttcaamttttagggcacttataacaattttcaaagcattttgtaattttaaaaattaatttrtacaaagtacttggcacatagattattggctaagtttccctagaaacctatagcagtgtaacttttatgaatcacctcagtaaaagatctttctgaaaaagtcttttgttttgctttgtttttgacttgggaaggtagggaagaagtgagagagggggtattttccttactaagtgaaaaacatattttaaatgtaatttaaaccaaagcttatctgaagtgataagactggttatttgtgtggaatttaaaatttaataaagaagtgagagaagttggcatttgcagtttttattrgccaacagtgtcaaccatgtattgttggcatcaagcttatattctcttatttagtatattaagtcaattgattaaaagcagaaarcctggctaattagactgccaagatcttaatgttaactgtcagattctaaagctrtataagcctgaaaacacmtttatagattacttcttctgggtgccaaatggttctaaatgctgaaaaatgtcataattgtccccccttcttctgagaaaggtaatagatactattggatatccacttccttacagactcattcacattttttcttgtcctggatagtatccccactatcagggcrttttcatttagggccagcaataatccgtattttgrttcaagcagaactagttgtagattacaatatttcaagccaaggttcccattcaaactgttttctgctgctttaatcrtaaaggaaycatttactcttacaatgctggaaattaaggatttatttttcacttaccaccattttcactggtatttcagcagtcattgaagtacctttctctcctcttcggttacatggccccattgagctggaagatggattatgcagtgagactcagtttatggtagaggaagacatatgacaatgttatgactttggcatttacttaaggtacaggttgatgatgatgatgataacttatatcttggtttatctttgccaaacatacttagcattcattatttaatgctcacaataacacactgaagtgatattatataatgtggcattatataatcactccaagtttgtcattgaagaaattaatgtttagaaatctaacttgccagagtcagttagtaaatagaagaatcaggacccaaggccagattcattgactcaagatcctgtttttttgtacaatacaccgtggatagagagattaatgatacccaacattttttagtaataggaaygctttacatatatactstcatttcatttcattccaataagccagaggagggcattatgattagctgcattttataaacaagggtactgaagctcagagagttttagaaatgggccataatcacacagcctgtaaatggaagagttaggattaatcccacttctgatatactctagagcttgtagagtctgcattgtctcttgacctgaaaagggaaaaactttcaagaattaaaagccaatttttgttttaaatcactttaaatggtatttcacagataatgctaagaaattaggctgtaaaagaaatgtcaaggtgtatgtatttgagttccccaagcaaaatttccaaaagggktctttttttcacatatatgagcattgtgtactgtattaccactcagtttaaagaaatagaacaccagccaagagagaagagccagsaagctgctcactgtgatgttgtaaatgttcagtgattagagtggataattattgatattattttgtaatttattttgcagaggatatatctatctgcagatttaaatatatatactggctcaagatgcagaatcttttccagggaaattttcatagttgtcctcattctaaaactgctgtcttgtgacttcattgcattagactatgatgaccactgggagtattggccaaatcctcctccctgctgacctgagtagcctctctgcagagtcccctgctaagacagtcattcacaaacaataggtggccattgccagcaatttgagcacagcagtcctcatacttggcagcagttaccagcaattggcaagctattacccaaatctcctgccaagtgaaagctaggacttttagaattaccttgttcctttcacctggttgccacatttatctttttttttttttttttttaaaagagagtgttttgtgtgcaagtgtacttctttataggcttcatgctaaaatgtccctggcatgggtatatttgggtctttaaagtgcttagcaaaaggagtgcccttccatattgaaatgcaaatctttccttgggtattaaatttgatttggaagccctcttcttcttgatttattgatatcaccttgaaatcacaccatcctcagtctttaagcatcgcccagtccccgtattctgaactatctggccaagatgaggctgagtctcagacagagtgttgatacctgtccacccattattcttcacagccctgatctgatccctgtgaggcagggctgagctccaaaggttagttagagaccaattggaggtgagcaaatacctcaattacagcaggtatctggatcctgtctgaatttcaccttctgaaagaacctgtagtagaaatacaaggttcaaacttgcattctctagggctttctaaatctctctactctgggaaaactattctgtaaatgtctatccatcttggttgcatttaaaatatggggcctcattctcctctgccttccatctgattgcaacttgggcctaggtgatcttggtcccatgttttttttgttttgttttgtgtgtgtgtgtgtgtgtgtgtgtgtgtgtgtgtgtgtgtgtgttttctcatcaataaacttttcttcaagccttctgctgaaatttggattaactcaattttcatagaccctgcagttcaaccttctgtattttacaatgactcctgctattgtagaaatagaagacaagtgaggaatctttccttttacaattctgtattatcttaaaacattcaaagaaaccatttcttactgaaacagctgtacttggttatgttattagaggagacacactatggacttattttgacagtgaaatatatttagactaaaattttaaattactcatctagctaaggtgtgttgctattccataatacttctcaagtgttttgtgtttcaactttcgggtttctttaagaaaacaaaaacaaaaacaaagaaaactccatcargttagaatagaatgtgagaaatttggtgtataagataaatctgtctttatgtttctccaggcaaataatgttttatactagagcaggcttcctgcctttggtatgctcagataaattaatttgactgtttatgatgttatttaattttcaataattattcaagcatatataaccacagacatctatgtagtaggcagatggatcagcaattgtgcatgtaattagaaataatccttgaaatacaaaagtagattttaatattcagcatctaaaaaattgctaacattacaaattgcccataccccgtggttgcagccagtgatgtaaaaatttaaatacaagaattcaaatgaaaatttctgccttctcagcatcaagcagttattgaataacagtagaaaatcatggacaagtcacttaaagagacacattctttctctcttaaaataaagatttgatgtgtttttaatgaattacaatgtgaataaataaattgtaaataatttagattggagtgctctttgtaaaagtcacatactcacatggaaaatattaaatgggaattatattagtaaatacaagctcacttttcaaaatcttatagagaaagaaacaaaaaatattctatttttggttcttaaaatgtatgctagaacttatatttactattgccaataaaatagggaatgtactttattcattttctgttgagagagagggaaagatgaaaatgagttcatatggtaaaatgagttatgatttttagattactgagttctgaattcaagttcatggtctgctatttacaagataaataacaaagcctttaatcttaaagtctcaggatttgttgacatttttgctgtaatgcctactgtttatgtttagcactatctaacatggtccctgacactttcataatatcttaaaaacttacagtaaaaagaaaaaaaaaaagaattgttagccaggcatgatggcacgtgcctgtaatcccagctacaggggagtctgaggcaggagaatygcttgaaccccagaggtggaagttgcagtgagccgagatcgtgccactgcactccagcctgggtgacagagtgagacacgttcaaacaaaaaaaaataaaagaaaagaaaaaagaattggaaatatggaaggaaatagaggaaatatggaaggaaatagaggaakatagagacagaaagaaaaaaaagaaattgagagacagaaaaacaagagcacttttcagcttcttctcattcctaagccaaaaaaacaaaacaggtttttcmaggagtaatatcaccaccttatggccttttacaataatgctgsgaaaaattaatattccagttgtatttttgcaactataaacatcaattctttactcttagatcaaaggtcacatcttgttcatatataagatattttctatcttttctttttgaagtaataataagcccaatatyaggtatcacaaatgtttgcagagttcctgcttagtgccaaaagatgtatctcacatctctacttcattagatacaaagatgaataaggcacaagtattagcttcaaagagcttagagtttggagggctgtttcttccagaaagaaggaattcatggctagtgtgttctgacattgggttctgtaggttaccgggcatctgttcaactttagaatgtgagaaggctggtagtacacattaaaaccagatgtttctgtgcaaaacaatgaaggaacctgggccttgggcccttggccacactgggagcagacctaaactctagggagcattgatgggaaaattgtagacataaattctagaatctccstyccttccttccttccttccttccttcctttttcgttgtttctttctttctccctttctctctctctttctctctttctttctccttccttccttccttctttcttttttctttctttctcttttttttgagacagagtatcactcttgttgcccaggctggagtgcagtggtgcaatttcggctcactgcaagctctgcctaccaggttcaagtggttctcctgcctcagcctcccaagtagctggaattacaggagcccacttttatgcctggataatgtttgtatctttagtagagacgggatttcaccatgttggccaggctggtctggaactcctgacctcaggtgatctgcccacctyagactcccaaagtgctgggattacaggtgtgagccaccgtgtccagctccctgtttctttgttattgtgagatgcagggcaggataggatttggttcagggaagaaagaaaatgaatggaggaggccgggcgcagtggctcatgcctgtaatcccagcactrtgggaggccgaggcgggcagatcacaaagtcaggagatccacaccatcctggctaacacggtgaaaccctgtctctactaaaaatagaaaaaattagccaggcgtggtggcgggtgcctgtagtcacagctacttgggaggctaaggcaggagaatggcgtgaacctgggaggcggagcttgcagtgagccgagattgcgccactgcactccaacctgggcgaaagagtgagactccatctcaaaaaaaaaaaaaaaaaaaaaaaaaaaaaaaaaaaaagaatggaggagttggcagcattaactgtctrtttcaaagccattactagaggggatactgtagaagtagggagcaacccctggcttagtgcatgagatcaatgctggtagcagttatagcctaactctaataccaattttkatctcacttcttctaaacataatgtaaaagtcaggagtatattctctgccccgcttttgtgccaggccttatattgtctattgcccatacatgctggttacaggcaaagtctcctttccttatgaagaaccgtgtgctatctgtgtcatggtgcgttgttgccagtctctttgatggccatgtgcactgctgcgcttgtcactacagaagtgtgaagcatcttctctgcagcttctgatcctgccgtgtctgctgcactgaagctcataatctgcgagagaagatgccactggggattaaagcgccagcagcatcattttattcatttgtctgactgtgctaatttgccagtatcttaggaagaaaatactactacagagcaatggttttcaatcctatggtcatgacaaaagctttgagaccacacacacccactatacacaccaatcaactcttgtttcaattttttcccattatatctaggactagttggtgctttcaattgaaaatttgcaggtactgcaaacccagagaaaaatgttctcttcctggaatatgagataacttgatgagatgatgctgcgattctgtgattgtcactacaataatgtaatagggattgtattgcagcattaacgatttcaatagctgagtgggaaatgagaaaatatgtttcctttggttacggttagtagtaatattatgtaactttgcattggaaataacttaaactgtgtgccttaaaattagttttaaattgaaatgggaagctgtggttatttgaagatgtttttcttttttattaagccaagtgmcctctgggataacagtttgcgtacctctaactcctgggccaaatctagtttttctttaaggcttgtattggtttgttcattcaggtgtgtctaggccaccttctggtcatttccttttcagctaacacccagagccaagctcagcagagaacttgctctcttatcactgcccctttgtgccttgtgtctgagcagacaaggaaagcagtggcctgtgttgactaatcctggcagctactcttcttcctcaagactgggtcagagccctgctcagtcattggcagaatcagcaggattcacagactcattccaaggcttttatgcagttctgtgtttttaatgaaaaacacacaaacacacataaaattaccacactcaccacagaccttacattatgtcgttcctttctatagcctattggttaagagtgtgattttgcatttatatcccagctctgccactagtggcttgtgaccaggcaaggtaagcataaaccttaacagcctcggtctgctcggtttaaaaataggactgataatagtactgtttattgtggattacggtgagtgttatatgaggtcatgaaggaaacagtgcttaattcagcacctgggacataataagtgctcaacaaatgttggctatgatgattgttttatgagtttgctcatagccaactcagtttactgtagagggctgcacttttctggaaaccatatcaagtaaaggctattctcctgttctgcataacctggaggaagaggattcaaggtgacttatatccaggctcttcttttaaatttttgctattcttttagctgttatctaccagactcctggatgttttcccaccagtcacgtgccctgtgccttgcttgccgtcatcctctctgtccttgccctcaccatttgtctcagtgcctacaatgcctccatgggtcatttccatctaagtcatttctattcttcagcccatttccttggcaaagatggtatgtttttatcaagtcctattcctgacactgaattctcataatcctttggttctctttttctgtttacatgcctccctacccattgaaaagctgtggtgatttgttaattaattcatgtrttcatcttctgatatcagaaatatctgtgaggccctacactgagcgyggtactctccaaggtgctggaatactacaaggaacctttgtttcatgaacatgcttaagtttccacacgcaatttatcatgctgtaactctgggtccctgcagtccttggttgtaactgctctttttaggctgccaagcccaccacaggagagaaaaaggtcacagaattgctaatcagctccattacatattattcctcgaaaatgctccatgattgcccaattacaacactcataacaccctaaaatgtaaygtaccatttacrtatctgtctcccagctctgccctgagctcctgacactgcctcatttgtttatgcccctgatctaaacctggcttagagtagggattcaatgaatatttgttgaattcatatcaactcattcatatcttgttttcagctttgtaactggtctctaacttctgcttggcaaacccatttttcatagttttcatctttctttcgctatctattgcattcttccctgtttctacttgaaacttttctactttcctgtacagyccctcctccatcttcaccttctgcagaataacttggttcggattttatggaggatgttgactccatctgacrtaagtttcctggccttaccattatgctgcttattaccttcacggtacctcactaccaccctgttataggagccagagaagtgacctcaggtctttccgtctcccaggattcccctscacctgtgactcccactgtgcccgggctgatgacytgtaataaagcraagacttaaagagagtttgttgaatccctttccaaggagctgttcagattacttaccttagactgacaagatttcgtggtgcagtggctccatacattgtatcgccatgtccccactgctgtgaccaactctcaagccagaagtcagccagatttctctccagttgaaccccaggccactgatctccttagctctgaccttcccaagatgaggttggtccattcttgataaattctgtatcagattctgtgccccacctgaatccagccatgctgcaggtatagactgcagctctctgcccmagtcagactgtaggatgcctttaaattcctgagcattagtggaggtgataaaacttgcacttttgtcctgatgtggaagggaggaaaatgaaatcctgtgatgtcttaaaatgtcctgaaatcttggcctatgatatactaggaacctagaaatgttctgaatttaataaggaaaataaaagagccaatcctctattcctgagggctaacttatttgragtgaagattcaccaggattgcctttgacaaaatgtgagcctgaagkctcttgccacatattatatgagccttattttggagtggcttcttttatttggccaggctagatatctcctgttatcacattcaggcatttgctgctgccccctggtttgtgagacatgcttagagatatgaatcagcctataaagcgcatctttctttaggaaagtcctgggcttgccaggcatgcaaaagactgtgatccccaggagagcagagggtactttctgtcctcacagaggcacttagttgtcaggatgcttattccaggaagcttaattacaaaccactgataggaatttattttagtaactatagaaaatgtttatttaggtaagarggaattttccattcctgaagataagctcttgcttaactagcattcaattacttttcaartggtctcagaagccaaagtgtgagtgtggtatgtgatagattcatatgtgcacgtgttgtgtttatgtgtgtgtgtgtgtgtgtgtgtgtgtatgcacgtgtgtgtttaagctgctgagtacttaaaacctgctttwgtattgtgatggttatttctagtaggaaataaggctgtccaattyatctctggcactgagcaagccctatttgtctctggcatgaagcaggcttagctcatctggtgctgtctctggttatcatactactcagcaggggtaatttgttttgttttatttctgtcccgaaaggtaattaataatacaaggacaaaattgtttgtgtagtgtytttatatttttgattacccaaagaagtatttttcaggagcctttccaaatagctgctttgcacctggctggaaaactgtactcctcggcgacaaagagctaacttttggaacccttccaggggtccaattctttaccttcatkcacctctgagccccattcaatgtgggtcaaggaggatttttagagggtattaatatcagtgaaaagtctttggtgcatagtaacactgagccagaatgattttctggcttctggcagtgatttaaagaaatcctttggaacgctgttacatgctaggtgtcctgctaagttccttctatacatcttacttaattgtcacaacaaccaataaggttgctattactattctccatttaagaggtgaggaaattgagatttatgataatatagtatttaaaacatgctttttgttatttgtgtgtgcrtgtatttttttggtaacagtttaattagatgtcattcacataccatacaattcacctattcagattgttcagttcaatggtttttmgatatattcagttgtgcaaccttcaccacaatgtattttagaacacttatatcacctcaaaaagaaccttataccctttagctctcttatgccctgagccccaagcaacaactaacctactttctctttatatatatttcttatgctgggtgmttgtttacttattttcctttttttttttttttttttgaaacagggtcttgctctgttgcccaggctggaatgcagtggcatgatcrtagctcactgcaatctcgaactcctggattcaagggatacccctgcctcagcctcttgagtagctgggactataggcatgcaccgccatgcccagctacttttttaaatagttgagagtctcactatgttgcccaagctggtcttgatctcctggtcccaaatgatcctcttcctctgcctcccaagcactggaattacaggcatgagccactgtgcccagcccttatgctggacatttcatatgaatttcatgtaagtggaatcacgtaacatatagtattttgtgactggtttctttcacttagcataatgtttttaaggatcatttgtgttgtgtgtatcagtatttcatttctttttatggctgaatgttgtatgcatacatcaccttttgtttatccattcatcagctgatggacgtttggattgtttctgtcttttgactattagaaacaaggatatgaatatatataagttttgtatagatatatattttcacttttcttacaaatatatcaaggaacagaattgttggagcatatggttactactccgtgtttaattttttgaggaacctccctactggtttccaaagtggctgcaccattatacatcccactatcagtctatgagcatttcagtttttccacacactccttaaaactcatctgactttttgtttttagccatcatactggatgttaagtggtatcttattgtgatttcgatttacatttgcctaatggccaatgatgttgaacatttcatgttcttcttaggtcattggtatgtcttctttggagaaatgtctgtttaagtacttcaaaattgagctatttttcttcttattagtgagttgtaatagttatttatatgtactagatagaagacccgtgtcagatatatgatttacaaatatttggcttgtcttttactttcttgataggggcatttgaagaacaatgggttttcattttaattttaataaagtctaggttttttttttatttgtattgcttgtgattttgcttttgcgtctaacagcccattgccaaatccaaggtcacaaaaatttacccctgtgttttccttcttacttttgttgttctaagatatatttttctttatatgggcatattctctggttgtagaatcttggaatttgatcacatggctatttaaaacaataaaaagaaaaagactctgtttatgctgtgtatgatcacaaaaacttgtgtcattcagttttagtgttgggctttctaaatacctcattctgctcatcagacatcatttttgttcactgtaggtgctggcagatctctggttggaactttgttgttattcattggtcagtttatgaatgagtcagatatttcagcttctgtgttttatctgatcctatacttcttttctgttattccattgttccctctaattggccttataaaagtatttctgcagaaataccagagtatttactgcaaaaacttttcatactttaaaaatgccaaaagaagcttttagaaaaggaagaatacctgtcaatgtggtactctcttatattaacaacttttttgacagaatgtttaaaaagtgatttaaggctgggtaggcagcacttatctgtgggaaagaaaattttcagttacttaatagcctgtctgaggcacttgcaaggaaaattctccaaatttcagacatttttgtcaccacagtaccctagtgaatatagcatggctgatacttttacagctattccttcagtattgacagtctctcagatccttctacttcgtgtgtgtgtgtgtgtgtgtgtgtgtttacccaaaatgcttccattatgatgcttacctaccttatgtattaataatgttctgagagctgtttgaaggaaagtgtgacatttatacaaagaaaagtcaattacttgtttaatattcataaaatttccataaaagtctaagcatttgaaaatacttgagagtactgaaatatatttctttacatataggactttgttcccataaaaaatcttgtctttcgtacttcttgtgacttccttctttcgttttctcagagggagtattggtttgtttcaaactggcatcaacattttgattcttttattatctatttatttatttatcatttatttatttatttatttatttttgagacggagtctcgctctgtcccccaggctggagtgcagtggcacaatcttggctcactgcagcctccacctccagggttcaagcaattctcctgcctcagcctcccaagtatctgggattgcaggcgtgcaccaccacacccagctaatttttgtatttttagtagagacagggtttcatcatgttggccacgctgatctcgaacacctggcctcaagtgatccacccatctcagcctcccaaagtgctgggattacaggcgtgaaccaccatgcctggcctaccatttggataattttaaacaataaataagaacgtctcctgctcatgaagtaggagtatttgtgtctacatttattcattaaagtgggtaattaaattccctgcctagggtcattgttactttctacctctttgctgttttctggatggtttcacctccccacaggcagtattcactaatccctttcctgactttccttaactctgattatcacttttaagcccttcagtaacaaacattcagtttttacatatatgaatcagtacttgggtgtttatattcatatgcaatttatatttatattcatatacaatacctcctatttgtatcatatacaatacttcctaccatatagaatgggaaattccttatggaagctatcctatcttctctctctctttctctacattctgtttctcacgtattttcccttgcatatagaaggccaagataaatacgtacggattttatttcatgttctcccagttactctgatgtaaatttcttaaccttgctgagcctcagtcttcttacctgtaaagtggatatactatctcacaatgtgtataggtcagggttctccagagaaacagaatgaatagtatatatatgaggagatttattatgggaattggctcacacaatgatggaggataagaagtcccatgatatgctatctgcaagctggaaaaccaggaaagctgatggtgcaattcagttagagtcagaaggcctaagaactagagggtgaagggcaggggcataagggactctgttataattcctggagtttgaaggcccaagaaccataaactctgatgtctaaggataggagaagatgttgatgtttcagttaaagaaaatagagtgagagaaaatttgcctggatttttcttatatctggccctcaacagattggatgctgtccactcacacaggtgagggtggattattattcagtctactaattaaaacgctaatctcttctagaaacaccctcacagacacacctagaaataatgtttttaccagctatctgggcaccctttagcccactcaagttgatgcataaaattaaccatcatatagtgctatagtacatatgaattgaaaaaaattttttgaacagctttgaatttggggccaaatttagaaagagctggagaatgtggcttctgcctgttatttctttgttacgttgtacccatggattctcctcttccaagtccagtatcatcttttgagtaattgctcagaaaatattttctaattggcttctgggtagctacttcattatctgaatataaaaataattctctgtgcataatatggactatatataagcaacagcaaatatgtgagtaagagggagggactgtaagtaatgctagtgattgactaacacagtggccttccaactttttgatcatgtactcttataagtaaaacattttgagcaggcattcccccaatattttgtgattgactgaaacatagatttatattagtcaacttcagacactaccaggttattcaaatatattattgtaattactactaacagtaataaaaattatcagtgttctttaagtttcagtcaagagatatgaatgaggataggctcatgataacttactcattttcactgagaaattcaagaaattcttgagactgaatttctctcgacttatcctacttcgaaacccagcttaaaattcataccctcaaagggaagcccatcagactaacagcagatctctcggcagaaactctacaagccagaagagagtgggggccaaaattcaacattcttaaggaaaagaattttcaacccagaatttcatatccagccaaaataagcttcataaatgaaggagaaataaaatactttacagacaagcaatgctgagagattttgtcaccaccaggcctgccctaaaagagctcctaaaggaagcactaaacatggaaaggaacaaccggtaccagccgctgcaaaatcatgccaaaatgtaaagaccatcgagactaggaagaaactgcatcaactaacgagcaaaataaccagctaacatcataatgacaagatcaaattcacacataacaatattaaatttaaatgtaaatggactaaatgctccaattaaaagacacagactggcaagttggataaagagtcaagacccatcagtgtgctgtattcagtaaacccatctcacatgcagagacacatataggctcaaaataaaaggatgaaggaagatctatcaaacaaatggaaaacaaaaaaaggcaggggttgcaatcctagtctctgataaaacagactttaaaccaacaaagatcaaaagagacaaagaaggccattacataatggtaaagggatcaattcaacaagaagagctaactatcctaaatatatatgcacccaatacaggagcacccagattcataaagcaagtcctgagtgacctacaaagagacttagactcccacacattaataatgggagactttaacaccccactgtcaacattagacacatcaacaagacagaaagtcaacaaggatacccaggaattgaactcagctctgcaccaagttgacctaatagacatctgcagaactctccaccccaaatcaacagaatatacatttttttcagcaccacaccatacctattccaaaattgaccacatagttgaagtaaagctctcctcagtaaatgtaaaagaacagaagttataacaaactatctctcagaccacagtgcaatcaaactagaactcaggattaaggaactcactcaaaaccgctcaactacatggaaactgaacaacctgctcctgaatgactactgggtacataacgaaatgaaggcagaaataaagatgttctttgaaaccaacgagaacaaagacacaacataccagaatctctgggacacattcaaagcagtgtgtacagggaaatttatagcactaaatgcccacaagagaaagcaggaaagatccaaaattgacaccctaacatcacaattaaaagaactagagaagcaagagcgaacacattcaaaagctagcagaaggcaagaaataactaaaatcagagcagaactgaaggaaatagagacacaataaacccttcaaaaaattaatgaatccaggagctggttttttgaaaggatcaacaaaattgatagactgctagcaagactaataaagaaaaaaagagagaagaatcaaatagacacaataaaaaatgataaaggggatatcaccaccgatcccacggaaatacaaactaccatcagagattactacaaacacctctacgcaaataaactagaaaatctagaagaaacggataaattcctcgacacatacactctcccaagactaaaccaggaagaagttgcatctctgaatagaccaataacaggatctgaaattgtggcaataatcaatagcttaccaaccaaaaagagtccaggaccagatggattcacagccgaattctaccagaggtacaaggaggaactggtaccattccttctgaaactattccaatcaatagaaaaagagggaatcctccctaactcattttatgaggccagcatcatcctgataccaaagctgggcagagaaacaac

SEQ ID NO: 96284 - DNA, 12810 bp, Homo sapiens
taccaatcctactgaaactattgcaaaagataaagatggaatcctccctaaatcattctatgaaaacatcattaccctaataccaaaaccaggaaaggacataacaaaaaaagaaaactacagaccaatatccctgatgaacatagatgcaaaaatcttctatagctaactgaattcaacacaatatcaaaaagataatcgaccatgatcaagtgggtttcataccagggatgcagggttggtttaacatacacaagtaaataaacgtaatgatataccacacaaacagaaatgaaaacaaaaatcatatgatcatctcaacagatgcagaaaaagcatttgacaaaatctaacattcctttatgattaaaacccttaggaaaattagcatagaagggatatatcttatggtaataaaagccatctatgacaaacccacaggcaacattatactgcatggggaaaggttgaaagcatttcctctgagaactggaataagacaaggatacccactttcaccaattctattcaacataatactggaagccctggccagagcaatcagacaagagaaagaaataaagggcatccaaattggtaatgaggaagtcaaactgttgctctttggcaatgatatgatcacatacctagaaaacccaaagattcatccaaaaaggtcctagatctaataaatgaattctgtaaagtttcagatacaaaatcaatgtacataaatcagtagcactgctatacaccaatagcaatcaagctgagaatcaaatcaagaactcaaccccttttacaacagctgcaataaaataaaatgcttaggaatatacctaaccaaagaggtgaaagagctctacaaggaaaacgttgaaatactgctgaaggaaatcatagatgacacaaacaaatggaaacacatcccatgttcatgaatgggtagaatcaatattgtaaaaatgaccatactgccaaaagcaatctataaattcaatgcaattcccatcaaaataccaccaacactcttcacagaactagaaaaaacaatcctaaaattcatatgtaagaaaaaaaaagcccacatagccaaagcaagactaggcaaaaagaacaaatctggaggcatcacactacccagcttcaaactatactacaaggttataattaccaaaacagcacagtactagtataaaaacaggcacgtagtacaatggaaaggaatagagaacccagaaataaagcttaatacttacagccaactgatcttcaagaaagcaaacaaaatcataaagtgaggaaaggacaccctattcaacaaatgatgctgggataattggcaagccacatatagaataacgaaactggatcctcatctctcaccttatacaaaaatcaactcaagattgatcaaagacttaaatctgagacctcaaacctaaaaattctaggagataacatcagaaaaattctcctagatactggcctaggcaaagaattcatgagcaagtgcccaaaagcaaatgcaatgaaaaccaagacaaatagatgggacttaattaaactaaaaagtgcctgcacagcaaaaacaataatcagcagagtaaacagacaactcacagtatggaagaaaatcttcagaatctatatacctgacaaaggactaatatccagaatctacaaagaactcaaacaaatcagcaagaaaaaagcaatcaatcccatcaaaaagtgggctaaggacatgaatagacaattctcaaaagaagatatacaaacggccaacaagcacatggaaaaatgctcaatattactaattatcagctaaatgcaaatcaaaaccacaatgtgataccaccttactcctgcaagaatggccataatttaaaaatcaaaaagtaatagatgttggcatggatgtggtgagaaggaacagttttacactgctggtaggaatgtaaactagtacaaccactatggaaaacactatgaagattccttaaagaattaaaagtagaatgaccattcgatccagcaatcccactactgggtatttgcccagaggaaaataagtcattatatgaaaaagatatgtagacacacatgtttatagcagcacaattcacaattgcaaaaatatggaaccagcctaaatgcccatcaaccaagtgggtaaagaaagtgtggcatatataccatggaatactactcagccataaaagggaattaaataatggcattcacagcaacctggatgaagttggagaccactattctaagtgaagtaacttatgaatgggaaaatcaaacatagtatgttctcacaagtgggaactaagcaacgaagacacaatggcataagaatgatagaatggactctggggacttggggaaatgggtgtgaggcgggtgatggagaaaaaaaagaaaagtaagagaaattgagaagaaaaaatcagctctctgaggataggaaaaaaatgtaggagttcttaacttgggtttattaacttgtgaaactgtatacagttttgagaatgcatatacgcatttttcaagatagaagatccacattttaatcaaaggaaatagtgaccacacccttcctcatcaaaaagtgttaagaactctgaggacaagacttaatacacttatagaaacaaagttaggcacattaacatatctaaagaaagaatatgttcccttgaagggtggaaactttaaaaaagaagctctactgggaaaactctggccttgtgttttaaagaactgcccaagtcaattggcactatggcacaggccagcaatgtgttgcccaaggaacacgtgtgtcccatactggagatggatctttgggtaatgatagcttgattaccctagccaatgaggtgctttaatgaactccctttgctctgattccatacccatcaagctatcttacttaataatttggcttcccaattaaatctgcctgcaagtagagactatgttaatcagtgaagaaaagtagttgatactccttatcattccatgtacatataagatatgtgtgtgtcagggaggggagggtgtttttgactgtgtgcaagagcatgcacttgtgtgcatgcaaacacacacacacacacacacgttaatgttagtctataaaacattttcctaacttggcttccagcatgttaccacttcctcctcatcttttacctatctggataatactatcttgtctggttctcatcatcccaacctcttaatgttggaatgttcacaggcttagtacttgaaccacccctcccctccctccttcccctcctctcctctcttctcttctttctaaacctactgcacagataattacaccctatctcaaggctttcagcacagtctatactgagaactctcaaatgtacatctccatctatacctctctcctgagctttggtctcacatatctaactgcctacctgacatttccacttatatgttcacgaagcatctaaactcaatttgcctaaaacttaactcctgataacccctgatcttccctcccaaaatcgtgttactgttgcattattttgtgtctcagtaaattgcaaattcattcttccagttgctctggccagaaactttggaatcatcattgactcttttgtttctttcatcctccatctaattagtcagaaaatcttatttgctctacctttaaaataaatatccatggccaggtatggtggctcatgcctgtaatcccaacactttgggaggccaaggtgggcagatcacttgagctcaggatttcgagaccagcctgaccaacatagtgaaaccctgtctctactaaaaatacaaaaattagccaggtatggtgtgcgcctgtagtcccagctacttggaatgctgaggcaggagaatcgcttgaacccaggaagtggaggttgcagtgagccgagatagtgccactgcactccagcctgggtgacagagtgaggctctgtctcaaaaattggaatgaaatgaaatgaaatgaaatgacatgaaataaaatataaaaataaaataaatatccagaacctgatcatgcctcatgaaaccatcttcaccactcaccgtagtccaagccaccatcatctcttgcttgaatcctgtagcctcttacttggtctccttgcttctattcttgttcctctatattctatttttaacatgataaccagagtgagactttaaaacttacatcagatcaggttattctcccacacaaaaccttcccatgacttcccagtttaatcccagaaaaagccaaagtctttacaatttattctaaggtactatacaactgacctccccacgtccaccctcctgttagccatgtgacttcgtatactattactataataaacagcataatgcaaaccaccccaaggttaaggccctggctcttcaccgttgttagctgtgtgcattctgttgcttgtgtgacaagttacttaacatctgtttcacagattctcatctgtactgtcttatagggctgttacaagaattaaatgagttaatgcttgtgaagtatttagaaaagtatccaacacatagtaagtgctatatagtatttgttacagaaaatgctcactctcctgcagccatactggcctctatgctggtcttcaaacatgacagtttagcccccacctcatggcttttccattcttctttcctcttcctggcatcctcttccctcagatgtctactttgtacatgttctcaccaccttcaggtcttccattaaaagtcaccttcttggggtcctctgctgaccacctaatttacaactgtgataccctttggcagtccccacctcctgattcctgctttgttttgttttattctccatatcactattatctaacatactatatatcttaattacttgttgcctgtctctcctactagaatttaagatttctgctttgcactagtctatctccaatatctaccatataataagtactcaataaatatttgttgaatgaatcaatactataaaatactcacaaccttattactctcatgaattagagatgaggacagaattcaccaggtgacatattcaaataatcctccactgaacagggtcttttaatcattcaggagacaatgggtccaaaaaattttacatgactacataaatgagaggagagtagatatttacacttattcaggcctctgttattatctttccacctcttgaatactcttctaaactgattaaaggattaggaagctggctgtctctctgagtcaaattctgttctccaagagagttcaattatcaggtagactacccatccaatacactagcattcaatacatttgttggatctcctcaacctcaatcctttattctcatgttataccctgggccttgccatcacacagaatttctccatttttgaaatcataaatgtcaatattctactcagtctgcaaccttctaccttttaactctttcatcctttaattcccactgtatcttcaagcttatttagaaattacagactttgatttttccattttttgctgatacagcactccctacctgtcttctcttcttccctacccagcctggccccatggtcatcacttggactatgttctcccgagcaacctcaactccccttgccatagtgtcccaatagccaagacaaaaactccaatcctggatcaaggctaaagaactcattcttcacttataccccttaatagctgagcagttttgaaaaaaaaaaaaaaaaatctcaaaataatgcagaattttgtttcaaatctaatttacaatttctaatttcaattaagctctcaaccctgcttataaaaccctttttaaaaacttacataatacctacagtgtgcctagcactgttctacatcgttacaaatattaattgattgaattctcacactcatggtaacactctgaggtagatactattttttttttttttttcacaaataggactttttatttgccactattaaaagtctgaacttcagacagattcttggactagtggttcatatccatcagttcgttcaactttagcacctgtcttgtccccagtggcttttccaaaactattaccttcaccamgaasctccrtaagttttcccaattcaaactagggcttcctcagcatttttacttttctaacgaagacatcacagagaggataaatagattggcaagccttttctatgtcttttccaatactgtctggaatcaacttattgaccacctctttccagtcatttgtctgtacctctcaggtcatgatttccatcatcttcttccagatttggaggacctgttggtgctgagcataagaggtcttccgtacctgattgttgcattttttagtaaaaccaacacagaacagatgaagcaatcattgtctgccattttttgatcatggaacacattttgtcatgggtaagatccatgccatggaagttaggcagtttttgccctaaacatcttcagtaatcagcttgaattttctaaatgcaacttcatcattctgcaaatcagtaagactcacttcaagcacacaaccctcaaagccatcagatgcaattttgattccttgggtcctggtgactagcatctttccagtatttcttatattgaacatagcaagtgctttcacatcataccaatccttcttcgaaaatggatcgaccactttcttcttggctccctttttgccgcctttcataaggcgcttgttcttgccaacctccatggtgctgctcagagccaaaaactgagatagatactattactgtctctgttttacagatgaaaaaaaattaaggcacagaaaaatcaagcgactgcacaaggtcacactgccagtaagcagtagagcttactagctccaaatcctggcagtctagctcaagcttttatctcgatgttcttatcgatgttataaatgaaaatgaggtacagagaggctcagtaacttgctcaaggatacccatttattgagtggaagaactttggtttgaatgcaaggagactaattgcagaacccatatacaaacccactaacctataccatctcctcaggtctaaagccatctgagagaatgatgctcaacagggtttggagctcctcgatttcccacactattctcagcaaacttacctagacccacacctacctctacctttctctcactctcctagtgttcaatcatttgctctggactacattttttcccatttctttccatctctttcctgtattgtcaatctctctatctttacttgctctaatggtcatgttcaagtttctttcatcccaaaagaccttaccttcaagaaaattttggtaaggccattctttatagctccctttacatgctcactcccttctcaattgggatcgtcaaaagagcaaaactcattttctcacctcttctctcattgtaactaaccttctgcactaataactcttctaaagcttttgttgctaatgtctttagtgataataccaactgtaaattcttttttttaaaattttttaactttttcttttgagatggagtcttgctctgttgcccaggctggagtgcagtggtgcaatcttggctcactgcaacctccgcctcctgggttcaagctattctcctacctcagcttctcgagaagctgggattataggcccccacaaccactggcctgtaatttttgtattttttagtacagatcgtgtttcactatgttggccaggcttgtctcaaactcctcaggtgatccactcacctcagcctcccaaagtgctgggattataggctaaattctaatggataatttttagtctttatcttaccatgtcactatcttgctcttcatttcttcttcctgacattctctacaccctcggaatccttagatctacactttaatgattcttctgccatctctgtctcccttttttaattcctcaactctggtcttttccccagggtttgaactgagagaagtttaaaaaagcttgatttaacattccccaccacccacccactcccacccccaccctgcgccccccacaatatacatgctttattcttaatgatctccctgcagaaaatgcaatttaaatggtattcagctgacagtaatcccatcagtggtcatggctttgttactcctttttgaagagccacccctctcgttccccattccttctaacttgtggtcaaaatggaaactggctgactttatatccacatggttggtaagcatctgactttcaaaaagacaggtgtcatggaagcctgaccaaaaaccctgctagttagatggaaaagaaagacaagagggcaagctgtgtctctattttagtcatagatatgttcatatattctcaatcaaaattaaggaaatatggtctgctaaagaagttttgttctattttagaatgttagaaatggtgcaggagatgtcatgtggatgctgaaacactgaaatttcaaagacactttaaagatttatggttataaagtataactggttctggattttacaagatgtctggccactgtagtcacagactgcaagagaatgtttgtgtcctcccaaaattcatattttggaacctaattcccaatgtaatggcattaggaggtgcggcttttgggaggtgatcagtgccctcataaaagagatctcagagaatgaactaggaaggaagccctcaccagacgtggatgtgtcagcaccttgatcttggacttcccagcctccagaactgtgacaaataaatgtctgttgtttatgatacccagtctatggtatattgttatagcagcttgaatacagttagacatagatttaccagaaagatgccacaatcaaacccgtcctcttggccaggcagagtggttcacacctgtaatctcaacactttgggaggctgaggcaggaacaccatttgagcccaggagttcgagatcagactggacagcatagtgagaccttgtgtttaataaaaaacaaaaaaatcagccaaatgtggtggtttgtgcctgtagccccagctacgcaggaagctgagtatcacaaggaggatcgcttgagtccaggacatcaaggctgcagtgagctatgactgcaccactgcactccagcctgggcaacagagtgatactctatctcaaaaaataaaaataaaaaataaaataaaataaaataaatcccattctctctaacagatatgatatagcacaattaaaggttttattaaacatgtaatgacaatttggtaagcaagcattgcaataaagctttcctgaccaactactataatatcactggccactttaaaagaagaaaatataaattctttgcacaaccttggctatatagatataaaatctgcttgaatcacatttctctgcatttatcaaggtgcaaagaaaaatgaagttgcattagcttacaaatggcctgtctacatcgtgtaacggtgcagtgagacctagggctgttctctccatctatgcagggcataccaagatctacagagcaaaagtgctaggcatggtttgacaggttgcttaaatgggacttaaggtgggtaaatgagaaaaaaaaaaaggcaatgtcaatacaataaatgagctttttatttcctttataagttgaagaaagcatactcttgattataaaagcaaaaaccacatcagttgttgtatagataatatggcacacttattgaactagacagtcctttgagacaaaaccatactcaaaataaaatcttttcatctcaatcttgagtatgtctacacttttctatatacagatgtaacaaacctcagtataatataaagaggtggcaaatcctagtataattagtggtacctgtgaaaaatacaattagggccagagtgacaataaaagtcagttaagcgacaagtttgaaattcataccctctcagaaaattgttgaaataaaattggtatgaccttccaatcatttataaacatgtggatactttgggcaataataagatcacttattaactgcaacaaacattacacaacttttgtaattaaataaataaaaatgcacacaaaaatgtatggtttaagttcaacaatctccttgatgacaatgctatgcactgtctcatgtgttgtctcactgattttttttcactgaattcattcactcattaaatacttattgagctccttctgtaacaggagttattatgccaaagatttaagaattaaatctttattataataactcattttctcacacacatagttatcacagccacggctcaacaggcaaatcttcctgtctttcatgactggtggtggcctctagaaacatactgcctggtgaggtctgcctgttgagtagcagcttatgctgcacctgtggtatggtgcatactaaactgttttctgctgaggtattcacaaaaggtctaaatgaaaaagagcatgctcttccatctatcttaaagcaaatgtctaaaaacagagacagaatataaaggatgtatttttttctataagagagatacaatgtcctataaaatttcaaaatggaagcaatcatttccagcttaagaacaaagtttttggaaccgatatctgaggttttttggttgttgctgtttgttttaaaacactttattgtggtataattgacattgcaaaaagctgtacatatttctgttttgtttttaaagaatgatagagtacagacagataaggataggaagaaaggcctttccaagaagaggtaatggcattaataaggaagtaaaagggagtagctccgaggaaacttggaaattttgtgaactctagggcaaaggatctatgtaagatagcaatggtctagagaggtattttggatccggactgtgcaaagttttttgttttttgttttttttttttttgagacgtagtctcactcgtgtcacccaggctggagtgcagtggcgcgatctcggctcactgcaagctccgcctcccgggttcacatcattctcctgcctcagcctcccgagtagctgggactgcaggcgcccgccaccacgcccggctaatttgtttgtttttagtagagatgaggtttcaccgtgttagccaggatggtcttgatctcctgacctcgtgatctgcccgcctcggcctcccaaagtgctgggattacaggcgtgagccacagcgccggcccggactgtacaaagttttaaacgttctgtgggaagtctggactttatgagaagcccccacaggcttctcagcaagggaacaacataattagagctctgcttttgggagattaacaaagtcagactgattctagggggtgtggtggggggcgggaagaatagtatggcaatggaaagaatcctactaagagtgataagagtaaaagagagaaaggttgttggatagaattatatattattgaagaagtcatcatcaagcagggaggacctaccaggtgctgtgcagtggccaaggaactttatatatggtaggatttcaaatctacataaaattcttacaatgtgaggagtattattaacatgttgcacatgagacaactgaggtttagtgaagtcaaaaaactgcctggaatcacatttaaaatgtggtggtagagccaggcctggctgatccaaatagtcatgcatggtctactttcccccacttcctcttaatgaagagccagtcaacttattgagtctggatgtctcatagcttagtggcatgggagtagctggaaggttgccagccatgggaaaagccaaagtttgccaggtagctagtagccagtcggtgggccaatctgactctctccccaggactggcaagagttccacacagtctggtcctttacatctcccttgggactccaacttcgcactgcacacttaccctcagcccaagaagcctcttctcttttccagcaaatttatgaactggctgctcagaccattctccccatgggaggacaggaatccaaatctgcgatttgagtaaacagctccatttcccttcactattatattctcctgcttcccaaaaggggtccaaagtaacgtggtgaataaagagtaggctttattcatataataaagttgaacactccatgcaaagtctctgttcatgaggagtgtgacaaaaagttcatgagaagccctttgtttgatgtataaaatgaattctgttcaatattgctaattttaaagcctcatcaccattctaattaatatactaatatactcaccttaatactctataattaatgaattatagacctctttaagaactccttcaaaggacaatctttcagaatcaaattcttccttgtcccttgcagaaatggcccacaacactattttcttacttcccaccttctgactgtacttctgccacttcttgaagaaagcactctagccataaatcccaactagaccctagatagtggtcccttggtcagccatcaactttagctctcaccacctctcctctacctgcagggctctgtgcaggttgcccttttagctatagactgtgtataaacagaacttcctacatgcaccttgggactcatgtgttaaaagcccttattttatacaaggtaatcctagtggtagtagccaaatagagacatggagataaatttacaagacagctttgcttcttcctcataattcattgagcgaaacaagactgtaagaatagcaacaacaaaggatgat

SEQ ID NO: 96285 - DNA, 50317 bp, Homo sapiens
ttctcctgcttcaaactcagttgagctgccttgctttggctttgatcccagctttccagcgctgctcaatctgttgccatggcaggccattggaaaggctcagtgcatccccgtgcctgaagccaagtgagcgctcactccatgcatgcatggaggctgggcaggagcctgcctaatcaaccagccatgtgaggagggagggcctgttccttcctgtaagctatgtcatgaggcagcgtggtcaagtcctctgccagggagtggcctgggcccagcctgggcatgttttcatgccagggtgctagagcctactgccagattgtctccctccacccccaatgaaaaaatccttccagaagggaagagccaatttcccctgtattggaggggaagtggcagcacctcctgaagcagttggactttcatcaccctacctctgcatctgcctgaaggacagatttagccaattaacctaaggttaccttcctctctgataaattccccattctgtcttcccatgtgttgtgtctcgtttttttcctcctccttccctcttccttgccccctcttcccctaaaccttacagatagctcgtgaggctgaggcagccatgttccaccgcaagctgtttgaagaacttgtgcgagcctcaagtcactccacagacctcatggaagccatggccatgggcagcgtggaggcttcttataagtgtttagcagcagctttgatagttctgacggagtctggcaggtagggccctaagggcaggtaacactgttaggataaccagcctcttgctccacctgctctaggagaagacagccaggcccaacctggcatctgggcacagagcctcttctcgtctgtaggaacaccgccagggaggtcatggcagggcaggaccaaagggtcctgtggctcagtaggcacagtagatgtcacaggcacttggtgaaggactggtttctgtggagtcttgatcttggctcagctcagaatctccagtgattgggctcctcttggcctttgttcccaggaacatgttcctcaccagctgtccggtgactcttcccctccctctccttttgtgacaaagctctgacaaagctctgtccccctctcgtccctctggacggatgttgctcccctagattgcccgtgaggcagaggctgccatctaccacttgcaattatttgaggaactccgccgcctggcgcccattaccagcgaccccacagaagccaccgccgtgggtgccgtggaggcctccttcaagtgctgcagtggggccataatcgtcctcaccaagtctggcaggtaggaggcggcagcggctccctggaatgccctgctcagtggtacctcaccttgggggtcctgggagcagtccattgaacaatgctcaggtggcactgagccaaggtaagacccctctgcctgccaccttgggcctgcagggaaggattgagcagagccccttccctgggcccaaaggactctaggtagcactcataaggaatgtcagaacatttggatcaaaagcaaatttatgctggagatttattacataacagtgcacaggctgactacaaatggttatttgatattgaaaatttagtcctctaaaattgtaaaagataaccacttttgcttattccagttactatgtgctctttaaaaatttcagttgggaaatgaatttatttaaatgctgtttactgtgcctccatttggcacactagtccctgctgtttttgagccctaaagacaaattgggttccagctcaggagaggttgctgtgctatcttggctgacattctgtggggcctggcagccaggctgaggactgtgtggcctatgctgggcctccaacttgggatcccttccttggcccaggacattgagttaatgtccttcactctcctagttagggagtatgctccttgtccctgtccacagggcagcaagggtttcctggaagaggggagcaaacaggcagtgcccatgcactgaggagcagcagatgggcgtgggcagcccagagaaccaggacacaagctctgtgcagatgccctcagcagagggctccagcctcccactcttggctgaacagctccaacccgtagggttgacctttcttaaaaggtccagttcttgctgtttggctattttaagctctagtcttctggggtttcactcagctggtcctggcttcagcaattgcttccctctgaaggccttgcatagaggccaagcgtgaagtgcagggacttctctgctgtgatgtggcttaagtttccctgacacctgttgagtgtcctcataacttcccttctggtgcccctccccagctcctgagacacagctgcagctacaagtgtgcagtgtcagtgttcaagaaagtgcctggcagaggggctttagaagggtcccctgccttccaaaggagctttggcaggcagagctgctcctgcagcaacactcccatttcctgttcttgcctgctgagtagcacctagatttctaagcctcatctagatactcagatttgattctgggcctttatagcccagttgctgggactgtttcaggagctaggggccatgtggggcagggagagggcacaaaagtagagaagcctgatgttgattcccagggggctggtcagctctgctactgctccttgcagatgtcaagagtcaggtgctagtcacgtgctgcttggcttgtcactgtcattggcagcgagaggaatgggtgctggtgacattgggccagggctgcctctctgtgtcagagttcagggtgtaggaggggttctgccaaccatgggctgtgtggggtaagtgggtgaggctgatcttgctgggtcaaggtgatcctgagcccttggcctgtggaatgggggtagagggcaaatggtaacctagcatgctgtgggggatataggatgaggggctgcccgagcctcgggaggggtcctagggagcagatgttgaagaggccagagccctcagtgagctggatgagagggtgagctgtttgaacgccctgagggtacttcctggggcctcgtgtaatggtctcttctgtatgtcccccatcccatctcaggtctgctcaccaggtggccagataccgcccacgtgcccccatcattgctgtgacccggaatccccagacagctcgtcaggcccacctgtaccgtggcatcttccctgtgctgtgcaaggacccagtccaggaggcctgggctgaggacgtggacctccgggtgaactttgccatgaatgttggtacgtggctggagcaggggctagagcctagaggagcttggggatgcttgagcattggcttctgtgggaccccgaaagtttggggaatagaaaggggaacacacagaccttagtggggcaaaaggcccagcgactgttcctctcccttattgggaatgttcattctgaatctctcattctccgaagtcctaagctgagccaggagggaaaagggtcctttgagttgtagggctgagcaattcagttcctcttctcttctagtctggggctcaaagcaaaattgtccattttttggcatctgctcattactgagagttttttttgttttttgttttttttttaaataaaattggccacagctcctgtgctgtggggtggcatacacagattacgtactgatgtggccattgtccctgtataaggtagggtatcatcagatgacaggaagcagctagctctgaccctgggcaaggctttgcaccctctccaggatagtgaatgatgtccaaaggtccctgccaaccctgccatctgagtgataaggacatttcagggccttcctcctgtttgcctgggctgtgagtttggtgccaccttgtggtgtgaggaagtagtggtcagccagcctagttcagtactcaggctatggggcagctgcccaggtgcaaacctgcctggcttggcttttactcaccaacctcccttctcttcctccaggcaaggcccgaggcttcttcaagaagggagatgtggtcattgtgctgaccggatggcgccctggctccggcttcaccaacaccatgcgtgttgttcctgtgccgtgatggaccccagagcccctcctccagcccctgtcccacccccttcccccagcccatccattaggccagcaacgcttgtagaactcactctgggctgtaacgtggcactggtaggttgggacaccagggaagaagatcaacgcctcactgaaacatggctgtgtttgcagcctgctctagtgggacagcccagagcctggctgcccatcatgtggccccacccaatcaagggaagaaggaggaatgctggactggaggcccctggagccagatggcaagagggtgacagcttcctttcctgtgtgtactctgtccagttcctttagaaaaaatggatgcccagaggactcccaaccctggcttggggtcaagaaacagccagcaagagttaggggccttagggcactgggctgttgttccattgaagccgactctggccctggcccttacttgcttctctagctctctaggcctctccagtttgcacctgtccccaccctccactcagctgtcctgcagcaaacactccaccctccaccttccattttcccccactactgcagcacctccaggcctgttgctatagagcctacctgtatgtcaataaacaacagctgaagcacctgtttcctctcttttctgctggggagggggaggtggttgaaccctgccctctgagcaggctgggaatggctgcagcctcgtgccccgcagtgggagctatggtggtgtcacctgccatcctgcccacctcctggtgcagaggcgctgggaaagcagtagcttactatcttaggggttacaggttgcccccttcagtgctgcggggagactttaatggcttacgtgaaccgaagatgggaaagagcagggacaaggcctccctcccactctggtagataaacccaaattgcaaagtggccttggccatggttcttccactttggtcttcctgcattagcgtatcccttatgggggctgtaggaggagtcagctctgggcgcctgagactgggtttggctcccaggtcctcagttgtggacctaggctccccttgggacccctcctgtttgctggtgccctcccaccatgatgctgtagtgccaaagggctgggggagagagttgggaatgggaccaaatctggcctgcgcttttcctctcccctgaccacactcccaaggaccaagtgtcctggtggggatggaagaggaaagggcctgcaggccaggcaaaagctcattgtcacactgagctgtgcctctgcttccctgcctttgatttgtgtccaccttcagcccctttgcagactcctccaaaagtgtatttccttggagaaactgcaatgttaactccggcaaaagtgcgtgggagcatcctggctcccgggttcgtggtggtgacttggctgtcagaccatggtgttcaatatcccctttggtgttccccactgacggtaaaattgaaacttatccggagctctatgttgggaagggttaggttggagaggggccggaattggttcctgcagagggacccaagccgcaagactaggacgacagaagcgtccagaggggacacaataccctcgacgtgagggacaggaggtgccgcgccaggccctggcctccgggacctcccagtccggggaaccgagcgctaggatctgctcagagcttggagccccacctggggaaggtggggaaggagagaagctggggaagctggggaatgagggggaggaacggccaatgggctgtgcccggcccgcgcgacccgccaatgggcgggcgggcggggcgggctctcgacggggcgggcggggtccggcgggcgctgggtcccggcgcgcggtcggggcgctgggtgcaggcgccgggatgaccgctttaagccggagcgaggccaccgaggagggcgggtaaggggttgcggcccgggggccggtctcgggggttccggaggccgccgcgaggggctgctgccgcgcggggcaggacggctcctggggccgcggcaactcggcgcgttctgcccacggggcaggcacttcccggccgccggaatgcgggctccgggccagagctgcaccgcgcgcccaggcgtctcccggggcccgcgaggtgttcgcactaggaccgggtgtcttggctgagtctgctgcgacctgggggatgagggacggtcccggcagcatcggggcaaggaagggcaccctcctcgggacgccccgcatggcccatctccgcctcgccactctgttcatcctttcatttattcattcatcattcgttgcccgcrgtatcgactcccagtcctaattgcccccgacccaaaggttggatttccctgcgtcccctggagggccagactgtttcctctcgccgccgaatccgtatygtagcggcccgcggctgcggggaggcagctcrgagctgtctcagcacgacgcggcctcccccgggcgccaggcccatcccggtcgggcgggctggggccggtctcccggcctcgagacctggtccaaagtcgccctgggagaaagggataaggaggcagggcagacaggagctggcgctgcacgtaacatccagaattgtggtttctgctgcttgaggtcttagggtcctgggagtgacattgtttgggggaacctgtcaattcctgccccggtccaggttccaagccgcacagcctaaggtcgggtacagcctggcatcctcggccagctagcactggggcaggtaggatgaatgtgtgagccttgtgtccaaatcagcccgagacacacagggatgtggaccccagcgggactccctctgccttatactcagagggactggtggggctccaccccgctgtcgtctgtgtctctgctctgcttgccgccccactcactatgcttgattgtttaaaggtgcccctccttgcaggggccaggctcctagggaacgagagagggtaccctcgcaacctgatgtcttcaccccatgtccacctgtagccggctctaaagtctggctcctttcagagcaaagacttatggccttgctgggagaggtagaatagagggtgtctatcccattcttcagtgaggagtcagtatgcccctccttcttttttcttttttttttttctgagacagtttcactctgtcacccaggctggagtgccgtggtgggatcttggctcactgcaacctctgcctcccaggttcaagtgatcctcctgcctcagcctcccgagtagctgggattacaggtgcccaccaccacgcccagctaatttttgtatttttagtagagatggggtttcaccatgttggccaggctggtcttgaactcctgacctcaggtgatccacccacctcagcctcccaaagtgctagcattacagggactacaggtgtgagccacgtgcctggccccctccatagtcttctgatcaggctggctggagaccatgctgcagacactcttaggtttaagttttagtttgacaggcattgaggtagcctcagtgggcacctctgggacaaatgggcaggtccagaggggaaagctgacagaggccccatcgagcttccaggagagtttaggctggggccaaatagaagttctccttcccaacttccccttgggagaattttctgaatagcctgaagagggtagctcaagctccatctgtgccttgatgttgctggctgctttcaaatttctttctttttttttgagacggagttttgctcttgttacccaggctggagtgcaatggcgtgatctcggctcactgcagtctccgcctcctgggttcaagtgattctcctgcctcagcctcccgagtaggtgggattacaggcatgcgccaccacacccggctaattttgtattttttagtagagacggggtttctccatgttggtcaggctggtctccaactctcgacctcaggtgagctgctcacctcagcctctcaaagtgctgggattacaggtgtgagccactgcacctggcctcaaatttctaaatttagcaaggccccaaagctttggcacagaccagagagacttgtatgctaattcatccacctagggtgctcccgtgaccccctgaggttgaggtcggcagtacccaaggtgggttgctgccagctggcctcttggaagctctcccatgagctgctgcgctgttagtgcctcctgggtggctccaccccgcccctaacctgcttaggttcgctctggtccttgcctgccacggaccatgtttatcagctggagggaagagcctcactctggaatcagaagtgagttctaagcctcaggctgttcctgttttgctgcgacttgggacaagtcacttccgctttctgggcctgctttacaccataaggtaaggagattggactgtaggttccctaaaggccttctgcatgcagtcatccagtgattctcctaactagacacttctagcagcttcaggggaagtttgtctacactcatgctacagtattttcagcaaatgtgattggacaagtgggcctgtgccttatcttttggtggagtgaaaaaatttgggccagtgaagccaaatccttacagcaagcagcatgcagcatacctggctctttgctgattgcaaataggcatttaaagtatgaatttgagccgggcgcggcggctcacacctctaatcccagcactttgggaggctgagacaggtggatcccctgaggtcaggagttcaagaccagcctggccaacatggtaaaaccccatctctactaaaaatacaaaaatgagttaggtgtggtggtrtgtgcctgtaatcccagctacctgggaggttgaggctggagaatctctggaacctgggaggcagaggctgtagtgagctgagatcacgcaactgcattccagcccgggcgacagagtgagactctgtctcaaaataataataataataataaataataaagaaaaaatatgagtttggaatcagatatctccattacttccagctaaagcgtcatcataggtatttcctaagttttaagttctggataaaaactccactggtgcctactatctccaccatgaactctgttaaggaaccttcacttttgtatatgcctgctgttttctcttcatttccctgtcttctgcataagcatgccctcttgctaagtaattcaagcataaggtcttggaatactaaaatcataagcttaggagaaagaataaaataaaacttattccccgtccccccaaaatccctccaatttccttcccagtttcggaagatgtttcatttattttcagaatttctcctttgctgtggctacccatggaaagcccttgaagtcaagaacggtgtagcattccactctgacatctggtgtgagcctgaacaccagaaaataatttttctcccttccaggaaagtgaaaatgatttccctcaattctgcagccatctctgatgcragtgtgagtttcacttgaggtcggccttggccactgtgcgctattcacctggacttcagggcatcagtctgtcaccacctgtcatcaccaacctttgaagctttaattccccagttatttgctaatgtgggaaaggaaggaggagggggagggcagaagcccctgggaatggagcttcctgtgtaattaagaagtaacagcctccctgaggtgcacctgcgtgctccggcacagattccaaaagacaggcattgttctcagggatataagccactgtaggagaaagtgattcctcgcccctccttcccactactatacatttttattagtttagaaatgcacggcctggcgcgttggctcacacctgtaatcccagcactttgggaggctgaggcgggcggatcacgaggtcaggagatcgagaccatcctggctaacagggcgaaaccccatctctactaaaaatacagaaaaaaaattagccaggcatggtggtgggcgcctgtagtcccagctactcgggaggctgtggcaggagactggcgtgaacctgggaggcggagcttgcagtgagcagagatcacgccactgtactccagcctgggcgacagagcaagactgcgtctcgaaaaaaaaaaaagaaatgcacaagccgggtgtggtggctcacgcctgtaatcccagcactttggggggctgaggcgggtggatcgcctgaggtcaggagtttgaggccagcctggccaacatagtgaaaccctgtctctactaaaaatacaaaaaatttgctgggcgtggtggcgggcacctgtaatttcagctactagggaggctgaggcaggaaaatcgcttgaacccgggaggcagaggttgcagtgagccaagatcacaccatttgcactccagcctgggcaacaagaatgaaaaaaaaaaaagaaatgattggtcatcatttaggactggaggcgtgttttaataacctgtggcgactgaaccaatctttatttatttatttatttatctatttatttatttatttttgagacgaactgtcactcttgttgcccaggctagagtgcaatggcacgatatcagctcactgcaaactccgcctcccaggttcaagcgattctcctgcctcagccttccgagtagctgggattacagtcatgtgccaccacgcccgactaattttttgtatttttagtagagatggggtttctgcatgttggtcagactggtcttgaactcctgacctcaggtgatccgcccaccttggcctcccaaagtgctgggattacaggcattagccactgcacctggccgactgaaccaatctttaaagccttgtcataaattagtgtttcctcagtgatgtttgtaattacattgttaatttttaagcagtttttggctggctctatttctttttaacctaaagtaaagatcacttgaagaattagtttaaatcaaacatgaattgcttttcctcctaacatctgtacatggcacatcaatggtatagtagttaattgtcgagatcctgctggtatttcatttcattgccttacccaccgcacagcagcgtgggcagtatgcctgaccaaacaactgtgactgattattaggattttttttctctcttctgtaggaaaaaagtttagatatttctaatatgtgttagaattaatcagattactcaaaacctgccagtaatcactcaggccacacaaaatgctattttaaaatacattttgaatttttgaaggattacttagaaattttattttaaaataacccagtgacagtacttcagaattggtattcctattgggcttccttcattaccagacaagttgaaacatgtttatattctgaattgctaactttttattgtggaaaatttcaaacatatacaaaaggagagagaatagtataataagtggcatgtacccatctcctggttttagcaataatcaagtcatgggtaaagtttgtttcatatatacctcccttctccctgtctcctggattattctgaagcaaattgtagctattatattattttatccaaaaatatttcaatgtatatctataaaagagcctttaaaaaatatttctacaatatcattattacatctaaaaaatggcagtaacttcttaatcagatagctagtcagcatttacattccctccattgtctcataaatgtctttgtaccatttaataaggattcaaatgaagtttatactttgactaaagtcaaagagttgacattttgaatctctatatctttatctctttagtctatggtttcctcttttcttccttttcttttttccttgcaaattatttgttgaaaaaaacaggctatgttttctataactttttctgatgtgttgatgttgtttaaaccattcctttgatttatgtatttcctatacattgggagttggacctacagtctcggtcagattctgatggtattgtgtgcttcaagaagtatataatatcagttatttctctttgaagaatgttagcagccattgatgattatttcatgcagacccattatttaattagggactgaaatatggtattagtctaatcctaccagtttttcatcatttattaggagactctttctataaaaagatgtgttcccagctgggcacggtgggtcctgcctgtaatcccagcactttgggaggccaaggcaggcggatcacctgaggtcaggagtttgagaccagcctggccaacatggtgaaaccctgtctctactaaaaaaaatacaaaaattagctgggcatggtggcgggcacctgtaatcccagctactcaggaggttgaggcaggagaatcgcttgaactcgggaggcggaggttgcattgagctgagatcacaccattgcactccagcctgggcaacaagagtgaaactccatttaaaaaaaaaaaagatgtgttccctcttcaaccatttgcttatcctgaggtgtagccagtactagaaaggcagaataaatacttgactcttatttcttagttttcaaaatcgtggtatgggctctagtagccaccaaaggtggccaatgagtcatttcggtgtattataatctcatggatttaaacatatttgatgtgttttaatccattcttattgatgctcaaatggtcccatctttaagttggttcctgagttcttgagccatgactccaggcttcaatgacttctttagtttctggtatgattagatgttttaggctcctttttgcatttcctcagatccggaatcagccatttccccaaggagctgcttaattagaggagtattttctatcatttgggggtcataggctacgttgagagtstaataaaagtgaaatgctctcttcccagaaacatactcctttgttcagacccaacaattttgcccaaagttccaggagttcacagatccaccctccaactcttgcctggacctcagaggcatgtaatttacattagattgtcaatctgcgtccataatgatggaagacttgggagaatgggaaataaccaagtgtccccatgtgaaaacagaaactggaaaagttaatgaatcttgcaatataagaagacacaagagaacagagagttgtggagcagactttgccctggtcacaccagcagtggagatccagttttattaaggaaggaacatgaggacaaaggtttgttccttggtgaaggattattagctagaaggtggtccatttaggtattgggaagaacctttttttttttagacagaatctcactctgtcgcccaggctggagtgcagtggtgcaatctcggctcactgcaagctccgcctcccaggttcacaccattctcctgcctcagcctcctgagtagctgcgactacaggcgcctgccaccacgcccggctatttttttgtattttttttagtagacacggggtttcaccatgttagccaggatggtctcgatctcctgaccttgtgatcctcccgccttggcctcccaaagtgctgggattacaggcgtgagccaccacgcccagctaattgactattagaactttctaatagtcaggactgcagtgacagatctaatagatgatattcatgtataggcatacattttgaaattcctgttgcctagttacaatgcacctttttttccccacccactcgaatatttatttctttatatggagtttcttgatatggataacactgagtaagggtttggtttggttttgtcttttaagccattccagccatgtagtcaataggacagcctaagctttcagacagacctgggttcaaattcttgctccacaagttactgctgagtttctactggctctgagcctcccgttatcattctataaaacagactcacatctaacctgcttcataggtactctggctgtgtaatggcctagtacacagtaggtgctcactaaaacgtactttcctttcagtgcctctaactttgagaacctaaaatgggacttcttagtgataattcagctacagctctaagaaaagctacctctgttttacttttccaggcacaaagttcactttttaaaatacactttttgttttgagagaattgtaaattcacattcaattttataaaataccacagagagatctcatgtattcttcacccagtttcccccaatggtaacatcctgaatagcaatagaacagtatcacaaccagaaaattgacattgatataatccatctaccttagtcagatttcactagttttacatgcactcatttgtgtctctgcatgtgtgtggacctatatttagtcttgtgtgatttttatcacatgtagatttggcaaagttcatttttaaaacaaagctttatttttctgttggttctgaaagtttccatgtagtgaagaatgagattttaggaattttgaatttcagaggtgtctattcattaataatatcgcagtgcctttggaacaattctttttcctgccttctccttctcctcctttttaaaaattcttttactaaatgaaaatagtatgtttattctaattataaaattcaggcaaagtggcctgaatactttgttttgtttgaacttattctaacaggtgtataatacttttaagatcaaaaccaataaagctcttaaaggctgggcatggtggcccacacctgtaatcccagcacttcaggagctgaggtgggcagatcacctgaggtcaacagttcgagaccagcctggccaacatggcaaaactccatctctactaaatatacaaaaatttagctggctgaggtggcgggcacctgtaatcccagctacttgggaggctgaggcaggagaatcacttgaacctgggggtcggaggttgcagtgagccaagatcatgccactgcactccaccttgggcgacagagcaagactctgtctcaaaaaaaaaaattgaggcaaagtataccaaaaatacagaaaagtataaagaaaacaaaaaaacatgtaaaaatcccaattcgtggaggaaaatgttagaattttagtgagcatctttctacatatattattaggcacactgttctacagaacgcttttccaatgttatataatgctatctttcatgttaatatagactttttaataagttttaataaatattgataaatatttttaatggttacatagccttccagtctacaaataaaacataatttgtgccttattgatggacatttatagtacttcctttttttctcctctaactacactttaatgagcattctttttttttttttttctttgagacgaagtctagctctgttgcccaggctggagtgcagtaggaggatctcagctcactgtaatttccgcctcctgggttcaagtgattctcctgccttagcctcctgagtagctgggattacagctgcatgctaccatacccagctaatttttgtatttttagtagagatggggtttcaccacattggtcaggctggtctagaactcctaacctcgtgatctgcctgctttggcctcccaaagtgctaggattacagccatgagccaccacgcccagccagtgagcattcttattatacattgtaatttgtgctcaattatttcctagcaataaattgttagaaatggaatttacaggtgtgacaggtgtctacacataaaatttatgtacctttttcatactgtcgtaacatacaagtatgtgagactgttcattcacaatatgttgatcaacattagatagtattaactttaagcctttaaaatctaaaaagttaggaaaaaaagatattatggccmggtacagtgactcactcacacctgtaatcccagcactttcagaggctggctgaggctggcagatcacttgagcccaggaatttgagactagcctggccaacatggcaagaaccctgtttctataaaaaatgcaaaaagtagccaggcttgatggcacatgcctgcagtcccagctactttggaggctgagtgggagaattgcttgagcccagcaggcagaggttgtagtgagtttatatcacaccactgcactccagcctgggtaacagagtgataccctgtctcaaaatatatatataacttatatctttaatttactgttgttttttttttagttttcttttttgttttttcttttttgagacagggtcttgctctgttgcccaggctggagtgcagtgacatgatcatagttcactgcagcctcaacatcccaggctcaagtgatcctcccacctcagcctcccaagtagcagatgggaacttatacctgttagtataagttcaaacaaaacagtgtataaagagtgaacatcatccctttattctcctggatgtagtcatgattgatatatacccttaagtatagtttttttatgttatagattatatcatactgatctgtatctacttttcttttcttttttttttcttttgagacagagttttgctcttgttgcccaggctggaatgcagtggcgctatctcagctcactctacctctacctctggggttcaagtgattttcctgcctcagtctcccaagtagctgggatcacaggagcctaccaccacacccagctaattttttttttttttttgtatttttattagtagagatggggtttcactatgttggccaggctggtctcgaactcctgagctcaggtgatccacctgtctcggcttctcaaagtgctggtattacagacatgagccactgcattcagtctgtacctacttatcagttacaatacatgttggactttttttccatattagcacatataggagctctaacttactcttttttatcaattgcataggaatccattatactgataaaataccattatggtatttctacatttttccccataattgttaatcatacgaatatacatttttgtccatttatttccttacatcaagtgtcttaaagggaattgttgggttaaagaatttgtatttcttggctgggcacagtggctcacgcccgtaatcccagcactttgggaggccaaggcagacagatcacgaggtcaggagattgagaccaacctggctaacacagtgaaaccctgtctctactaaaaatacaaaaattatccgggcgtggtggcatgcttctgtagtcccagctactcgggaggctgaggcgggagaatcgcttgaacccaggaggtggaggttgcagtgagccgagatggcgccactgtactccagcctgggtgatagagcgagactctgtctcaaaaaaaaaaaaaaattaaayaaataaataaaagaaaaagaaaagaatttgtatttcttaaggcatttgatgtatattagaaaggttaactcagtctttagtcttataatggggaataatgaatgactatttttcacatccttggtaatactgagcactataattttagtgyttactgataaaataggtaagatagattgttttctaaattgcttgttcatattctttgctcacttttctattaggttatttacctatttttattgacttggatgagctccctacatatgaagaataccaatcctttgtccacttaaattttgatatacagaagttttaaatctttatgcaattaaatcttttatgtgttctgggttttatatcttgcttagaaaaacttttcctgatatttaaaaatattctcttttattctagctatttatagatttagaaaatatttaggtgttttatctccctgggttatctttttgtgaatggtgggaggtagccaaattgccccaatatcatttattggacaactcattctttccttacttgtgtgaaacacattcttcatgctatactaaattctcatatactcataggtcattttctggactgtcttatgctccattgatctagtaatctttcctaggccagttaatacttcgctacttaattatcctacctttgtaatttgttctgacatctggtaaggcaaagcctttacatcattttctttttcaaaattttcttgctctctttcacatgtgtgcacatgcacgtgcaccctgttggaacatttacaaattaatttggggtaaatttgctcctttaaaactttgactcaggccaggaatggtggcttatgcctgtaatcccagcactttgggaggctgaggcaggtggatcacctgaggttgggagttgaagacctgcctggccaacatggtgaaatcctgtctctattaaaaatacaaaaattagccaggtatggtggcacgtgcctgtagtcctagctactcaggaggctgaggcaggagaattgcttgaacctrggaggtagaggttgcagtgagccgagatggtgccattgcactctagcctgggcaacagagcaagactccgtctcaaaaaaaaaaaaaaaaacaaaaactggaacaaaatatatttttgttgtcatatgaatataggtattttcccacatatactttataactgtattgtaggtctacaggaaaacgattgatttttacaagttaaaaaatcagtcgtttgggaggtagccaattgccccaataccatttattggacaagatctattgatcttgtaaccgttaaagtagtaattaattccatgagttaattatgtgtctaccccatcacagttctgcctactttggtgcccaaatatgaaaatatctgcgccacgtttttatgatttgtcggttgattatgtgttgtttaggtagtttatctgaccatcttcaaacaataattgtccctctttaacatgtaagtgaaccttttatttgtttttctctcctgtgtgcggtggctggaacctccaggacaaggttgaataacagtggcgagagcaggcattcctaaggagcgttcccgcagttagacaatctggggttctccctggaggaggaggtcccaggaccyagcaagctcctcaagacgaggtcattggtcaggaatctgagccctcggccgagcccagcctgggggagccgagttggcaggagcctgggcagggcgcgcagcccgtccccacgcgggcgtcctcagccaggccagttaccacgcttggtacacgcactgcaccaggaaggggctcagaggggcgcgcgctccttttcccgggagcccagcaggtgggggcacggctgcggcactcctggcagctccccggcctgcgcaagctctggctgtgaccaccagcctcctgcaaagggtcagctggggccagccgggcgggatcagtgccgccgcgggcgccgctttggagccactgagtgtggctgtggaatgctgggtgcggctgcctcaccagcttcccagccctttccaaggcaggcgcagaaaataggcttgtggctcttgcctgtgctagccgaggggtggaggtgctgcaggtgaaggtggcttggggaactggggaacagggcagtgaggccgtggggcgagggcagtccctctccctccccgactgcaaacaaccccctcggggaaccaggagagaaagatgcaatcctatctatccgttcccagtatctccgtggtcttttcccgcgagggagggcggagggcaggttcagaggggatgtggcgctgagctggactgggactgagtttccagctgtgctcagcagcatccttgctggtggacagagacctgtcctcaccatccatccctgggatgcagtcaccggcccaggagaaaaggaggaggagcagaccccactactgcaccaaagttgtcctgaccaaagtaactcatctgcagtgttaaattcagggactgcctttgcgtcctgctcttacttggcctttcagcagacttcagcattgcgttctcctccatcttttgaaaccctcctttggcttccatgacagccttacacctggttttctactttttgttgttttgtatttatttattttttttagtagagacaggatttcaccatgttggccaggctggtctcaaactgccgatctcaggtgattcacctgcctcggcctcccaaactgctgggattacaggcgtgagccaccatgcccgggtttgttgttgttgttgttgttgttktttttaatggagacatggtctcgctctgtcgcccaggctggagtgcagtggcgcgatctcagctcactgcaagctccacctcccgtgttcacgccattctcctgcctcagcttcctgagtagctgggacgacaggcacatatcgccatgtctggctaatttttgtatttttagtagagatgggatttcaccctattggccaggctggtctccatctcctgaccatgtgatctgcccmcctcggctcccaaagtgctgggattacaggcgtgagccaccgcgcccggccaagagttcttttagaacagttttaaattgtagttaagaaaaaaaaaaacaacaaaaccctaccatctgggcacagtggctcacacctgtaatcccaacactttgggaggctgaggcagaaggatcccttgaggccagaagtttgagaccagcctggataacatagagagaccctgtctctacataaaataccaaaattagctgggcatggtggcatgtgcttgtagtgccagctactcaggaggctgaggtgggaggatcacctaagcccagggaggttgaggctgcagcgagccatgattgcgccactgtactctaacctgggcaacagagtgcacagttcagtagtgttaagtatattcacgttgttgtgcaatcttcagaacttttcttcttgcaaaactgaaactctatacccaaagaacaacaactcattatcccctctgcccccaggccctggcaaccaccattctactttgtttctatgaattcaactactctagatacccaatttaagtggattcatatgtgtttgtgtttttgtgactgtcttatttcacttaacataatgtcctcaagattataagggttctctatatatttgggatactaaatccttatcagacagatgatttgcaaatattctctcccattctgtggattgtcttttcactttcttgatgatattaacagcataaacatttctaattttgatgagatccaatttatctgtttttttcttctgtttcttatgctttcggtgtcatatctaagagatcattgcctgataggtcataaagatttacacttatgttttctttaagagtttcatagttttagcaaattttgggtttttttttttttttttttttttgagacagtctcactctgtcgcccaggctggagtacagtggcaagatcttggctcactgcaacctccacctcccgggctcaaacaattctcttgcctcagcctcctgagtagctgggattatagacatgcgccaccacgcccagctgatttttgtatttttagtagagacagggtttcaccatgttggccaggctagtctcaaactcctgacctcaagtgatccaccctcctcggcctcccaaagtgttgggattacaggcatgagccactgcgcctggccgaattttggctaatttttgtatacagtgtgagctaaaggtcatgttattcttttccatgtggatattcagtttgtcccagcatgatttgttgaaaagacttttatttccccctaagtcttggcattcttgttgatagcttctgttccttgtgtacccactttccctggcacagtcttactagctcctcttctcacttatgggccagtaactcagaaatttatccctcctgcctaaacctttcttctgagcttcttagtcatatatagtttgacatctccacttaaatgtctctcacacatgttcaaggctgaactcgtgactgttgcttccaactaggcttttcttctagtccatttttacctcatttagtctcagcaaaagagcccactatcctactcgcttaagccagaaatctggagtcatacttgacaccttcttgtttttacctctcatccaattcatcaccatgtcagattgattatatttggaaatacrtattccaaatccatccctggccctccatcaccactgccacccagtccaagacatcatctctctgctgagctacagcctttcacctgatctctctccatggaaaattgtgaacataacaaaggatgagagagttgtccagtggatccccacgtatgtatcacccagctacaataaccaacaacacgagtcattcctgtttcaccaatattcaccctccactcccctgccccacttccatgggattacttggaaacaaattattaacacacaaagttgatagtatactttcctgtttaaatctctacattggttccccrttgcttttaagataatgaccaaaaccattatagaggcccatgggccctgcatgatctggccctgccaacccctccagccttgttgtttaccacttcgctgctcacctctgccctccagactcaaaggctctatttagctttctcacacatgctgcacacttctggccttggggcctttgtatatggcaacccctctacagtgaccctgtccgcccagaatcccccttctccatttggctagcatcccttggagatgagctccaatgttgtacgtcttcagaaaagtcttccttgccctccatggttgagtcaggatgccctaatagaggtccctcctgggatgagggttcatctgacctcagagggccagtggccatctgcagtttatacagttcgtggcctctgcttttttccctcagacaacatttgttgtccctcctgggctgtgactttctcgcccctttgcagaggagtcactgaggcccagaaaggaagagtggcttactcaaagcccctcagcagtgagaagcagttccaggcctgcattcctgtcttcctgtccccaactccaggctctttcaggaccccaagacccttcacacttgcctgtggtcctgagaagagcctgatggatccacaaagccagagtaattctgaggtgggtatcccagggtggttggggtgggctgtctggacagtatccatggatggacagaactgacttgtctccagagtagccacagcccctggcagccctgagtgggggcgtctgagcggctcagcctgtctgcaggccccctcacttagcaggcctggccggagggcggcccccaagagcacaggggcgctctgttccttaatgaatgcaagtctgtttttagacctgaatgaccagctttttgtctggaaatggccaagccccaagtggcctgccaagaaaaagtggtctatgagcagacccgggggtgccagctcaaatagatgccgctccagcagcgggcatgatgggacgaagccagcagccggcagggcactctctgcagagccggctctgtgatttggcctatgctttgtaggaaatcctggatatccccaggaggaaagcttcccggttttagctgtttgtccctgtctgtctccgtggcgactgttctcactgcacaggcctttgagctctgggcaggagggggcagcaattgctggcctctaacctctggtggagggaggagaagaaagggaggctgggcctgagctgaagttgggtcgtgcctccgagcccatggtggtgggaggcagtcactgggtgtggcccaggtgtagagagggccttgcygcrgctggttccttggactgtagtcccagtggaaagattcaggcatggaggacatgtatggagctttctgggtgcctttgaggcccagtggtacccctgtcttcacttgccgtgggtagatgcccctctaggtatccttcaaggatgtgatgggacagaggctaacacagcgctcaccagtgctagtcggggacgtcctgctcaatgggcagggttatgggtgtccccagccccaccccagactgagtcaagacctcttgcagatcctcacagtagccctgacgatctgcaggtcacagaggggataatttttttctctgtttgccattttgtggagacacaaatgcaggagttaatgggcatcttaggggagccagttcgtgctctcctagactggaggcctggcccatggccccctgcttctctctgcctcctgccccctcttccctcgctctagagccagtctccgggggcacccagaggttcagctctagtgtagctgcagctcgcacctacctggctctctctcgcctgttccctcctggctgcatacctccacatctcggatttcccagttaggattccttaggaagggaatctgacaggccggctcatcttttcactctaaagaggctgctggtcagcttgtgatggcttttcctgggcctggagcacaccatggttccgctggctgtggccagggtcacttggtaggtcttgggaagataggcctctggccctccacatccccccttcatctcaaagctgctacaggcagtgatgggagagcaagcccgttcccggcctgggtgttctcagaacccttcctggaagaagggattgtgatgaggttgagttcccgcccctctggagcccgctgccaggggagctgagtgggaccccaactcactaagcctcacccccttacactcagtatgagactcgattattggatttttctcccctcctccagtcagtggaaaggacaaagcagttgtcctagatatggaatgtcatctgagaaaataaaaagggaggtacagcttctatgaaagtgcaagacagccgggccgggtggctcacaactgtaatcccagcactttgggaggccgaggcgggcggatcacaaggtcaggagatcaagaccatcctggctaacacggtgaaaccccttctctactaaaaatacaaaaaattagccgggcgtggtggcgggcgcctgtagtcccagctactccggaggctgaggcaggagaacggcacgaacccagaggcagagctggcagtgagccgagattgcgccactgcactccagcctgggcgatagagcaagactccatctcaaaaaaaaaaaaaaaaaaaaaaaaagaaagtgcaagacagcaataatgacattatttttgcaaaagaaggaaattaccttttatcttcaagtttcagcacattgatgataataagcctgcctctctccacagaatcctagtttgccatcaggaaaggtcttgtcacccagtttctgactgtgtgtgaggactgtggccctgagagcacatagggagtctctcgggaaggacacagtgtggttcagagccggcctctgccacctggaaaagctggtcttgtgacttctgtggtacaacctaggaaatgggcccccaggccttaaacagatgaaggaaagcttattgacagtggggttccctgccttgtcaaggaagttcctgaaactcaagagggccagggtgaagaaggctcaggagggtcaggaccccagtttcagagcccaggcaggtggattggccttggagagaagccacaaagaaaggaggggtgggggcaggattcttcccatggtttcttagttggctgggggtttacaatcacctgggagcctttaaaagctaaagccggccaggtgcggtggctcacgcctataatcccagcactttgggaggccgaggcgggtggatcacttgaagtgaggggttcaagaccagcctggccaacatggtgaaaccccgtctctgctaaaaatacaacaattagctgggcgtgttggcacacgcctgtaatcccagctactcagggggctgatacatgagaatctcttgaacctgggaggtcgaggctgcagtgagctgagattatgccactgccctccaacctcggtgaaagagtgagactctgtctcaaaaagaaaaaaagaagctgaacatacacctgccttatgacctagagcttctaatcctaagtgtttacccacggaagtgaatacttgcatgcacaagactggtactacaattttcatagcactttcataagaggcaaaaastggaaactgcctaaatgtccatcagtagtaaaacgaataaataaattgtggtctatccatatttcaaatgcattgctgagtaaaagcagacacatacacgagtatgtatggtatgattctgttcatttaaagtcccaaaagcagcaaaagcactctgtggtgctggaagtcgggatgatggctatccatggccaggagggtgtggccagtgaaaccagaggaagcagcgggtagttctgggggcctggttcccaggtgtgtactcgtttgtgaaatgcattgaattgtacatttacttaacatgtgcttttctatatgtaaataatacttcaacaacaatttaagaaatctatagttatttaaatgctattcccagatattctgatttaactggtttgagacagagctcaggcatcatttttttttttttttaaaggactgcaggctgagcacagtggctcatgcctgtaatccgagcactttagaaagccgaggtgggagaattgcttgaggccaggaccagcctgggcaacagagcaagaccttatctctataaaaaaattttttaaaaaatagctgggcatggtggcatacacctgtagtttcacctactttgggaggcttaggcaggaggatcacttgagccccaggaagttgaggctgtggtgagctatgattgcaccactgtgttccagcctgggcaacagagcaagactccatctcttaaaaaaaaaaaaaaaaaaaaaaaaagcactgcaggtgattctaatgtgcacccagcggctacactttagagttaaaaggagagtgtcctttccccctgaagtaggaggtgagctgagtgagaagtgcaggtggagtgaagagaccttgtcgggggatctggagcagccactggggggaagagtcccaggtccagcctattgagccccagtttgcgaagttttatccaggacagatgtccacgaagcttcctgtccttggatggctatttccctggtttctgggtttgtactgtcggggcctgttgccatgatgtgtttttgtttggaagagaacagtggtgttttcaggtctctgcttggagctcgctggggctgagcgtcctggctggctgcacaaaagggtggagctgtctttggcctggccttgagaagagttggcaggacccacagggtccacaagaagtcagcttgggagagtgcggtcacctccttggaggaggagatgcccaaggggaccaccccaccccagctgtggggaaggccctgcctgtgaccacgcaggcccggctgagatttgtgcttcagcatcagccacaggcttggccactgccagaggcttggatgagtactggagggaggtttgccctgtggttaggaagggctgggaaggctgggggagtgttgccagggcatggcccgcccaggtgtgtgcagcccactggagacaggaggggcccagcctgtgctttcacccaaataccccatcctgcccagaccctttattctttgcttgggcctcctacctcccacctgagttcctctttgatcagtcagccaccctgggctgagtgccttgaggtaccgaaccagagctcctggaggaaagggccctgctgtgggggaccccatcagctcctgtccagcctgtcccctcctttcctgctgggtgtgtcattctctgcgccccctcactcttactgccttgctttttcctctscttctcccttttggggtgttatctctttttccctgtctctccttcattcattcagcaaacactgggtgctggctgtatgctggggatacagagatgtacgggacacgcccttgctggagctcagagtcaactgggggacacagatgtgtaaacagacaagcacactctggtgtggtaagtgctggggcagcagcctgcaagaagcgacagtggaccacagaagagggatgagcccctctgctgggggaaactgaggaaggcttcacagaggtggtgacgtttcacctggggcttgaaagatgaccggaactccccaggtagataagcatgagaagggtaagcaggtatgcaggcaaagcacgcaggtgtgaagggctgctgtggcatagaagtgaaggtgctgggctgtactgcaggggagggaatgacgggcgatgaggctggaaagcaggaaggtctgggaggccagctgaagaagtgacgggaagtgaagaaggagcatcagcaggagagtggcaggatcagacccgggccccagctggccctctgggcagtgtgcatgtgggagagaggcagtgtgtacccgcacagccggaggcagttttggycagggagctgttgccagcatctgggaaaaggattgtggcctgggcttgcgtggtgtagtgggaatgagaaaagagatggttttatgggttatcttgggggggacctgagggcttgattggctgtggaggtgaggagaagaatgagtggagtattctggcctgggtaactgtggggagacagagcctttcacagacattggatgccaaggaggaagtgggtttggggggccgctactgagattacatgcatggacacgtctagatggcagggggtgaagctcgggagggtgtgggtgtcaaggttacagaggtagacttgggagtgactgcctggtgtgggtatttggagcctgggggaggtgtgcagagcagaatgcctgtgtcaggtgcaccacgaggcccctagactcctgtgtatctgggctcccactcattgccccctcctctcctgccctgtctccccattcttgacatctccctgtgctggtgccatccctgccctctggcagcttctcaggctggggagctccctacytgcctcatgatgtgaaaagctcagggagtattttttgctgcatggggctggagagcaggcagacacctcctgtgccctctagggaggggccttcctgccttcagaccatgctcagccaggggaagggcctcatcggaggatttccaatcttttgtacctcctttaatgtcaaaacactgccactcccctgctccatacctctcctgacagaaattaggtagttttttatggcttccaggactcctgacatgaattccacagctggggcatggggatgggacrggactggatgggacagagcgggaggagatgtggttcacaacccacagggcatgaacacctagcgcgacaaaaagtctgtgagtagagtctacagcggctgcctgcagggtgggggaccaggctgagccctgtgctcttgaagcctccttcttggccctctgggtcagggcccagctggtcactgggtgtcccctgcctgagtggttctgctggtgagtgctcagtgaccagtctgccctgtacttcttcaggtggcactactcccatttctttattttcattcgtcaaaataaacactacaggggagaagacaccactattgagtggaaagtgaactgaagatcgttttgagagcgcggcaggtttactcattttggccataggcagggtctctgagccaagagcattatcagcagagagacaggaggaactggcttcagtgggcaaacagaaaggaatggcttgcaaccatcctcttgatcatgtgtaaaggagttggcttttttttttttttttttttttttagacagaatttcactctcgtcgcccaggctggactggagtgcaatggtgtgatctcggctcactgaaacctccacctcccgggttcaagcgactttgctgcctcagccccttgagtagctgggattacagatgcccgccaccatgcccagctaatttatatatttttagtagagatcgggtttcaccatgttggccaggctggtcttgaactcctgacctcaggtgatccacctgcctcagcctcccaaagtgctgggcttacaggcataagccactacacctggccaggagttggcttttaatttaaagagacttgaaagttggccgggtttggtggctgagcctggtctgaaggcaggaaagctcctccctggagttgtcgtgagcgcctgctgcrtgctcagcactggactcaggggattcaatgaaggaccaggcagagtctgtgagcccctggagatgcacagtcatggcacacagacacagtgtgacagatgctgagcagagacttccgatcagggtgctgtgagtgagtatctgaagcagggactactcacctaggctgggggagggctgagggaaggcttctctccctgagacagtcacatttgaacctaaggatgtgtttggtttagaatccatgcaaagacatggttatctatgcaagattagataatccatgcaagattataattatacccagtttctaaggctcagcttccttttctctaggaaccccactgtatttcagttcccagggatctgtgcatcctctgagctcctgcagtcctgagaatttgactcacattctcaagcaacaggctccctgcctctgaaagcactgtccaagctccttcccattgtcatcccgttctatccctcatccatccttcagtctgggatgcaggttcttcagagctgagcccacagaatttttccctggcggccccatggattcactgccaggcccacgctgtaatggctcagtggtctgacttgcatatctactccccccaggcctgtcctgtgagaggactgagaccaagcgagaaacatacatggaagaaatagatggaatctcccatgcagtaattacacacaggcacagcagaaataccacagacaaaagagaaacgacaaactggggaaaacatcacaaaaatgataaactaaggattaacgttctcaataaagaatttacaggccaggtatggtggctcacacctgtaatcccagcactttggagaggccaaggcaggtgaatcacctgagatcaggagttcaagaccagactggtcaacatgatgaaaccccatctctgctaaaaaatttatatatatataaataaattagccagatgtgatggcaggtacctgtaatcccagctactcgggaggctgaggcatgagaatcacttgaacctgggaggcggaggttgcagtgagctgagatcacaccactgcactccagcttgggtgacagagcaagactctgtctccaaaaaaaaaaaaaaaggctaggcatggtggctcacacctgtaatcccagcactttgggaagctgaggtgggacgattgagctcaggagtttaggaccagcctggacaacacagtgagacccccgctgtctacaaaaaaaatgaaaaccttagcccggcatggtggagcattcctgtagtcccagctacttgggaagctgaggtgggaggatcacatgagctcgggaggctgaggctgcagtgaaccaagattgcgccactgtactgtagcctgggcgacagagtgaaaccctgtctcaaaaaaaaaaaggccgggcgtggtggctcatgcctgtaatcccagcactctgggaggccaaggcagggggattataaggtcaggagttcgagactagcttggccaatatggtgaaacccccgtctctactaaaaaatacaaaaattaggcacagtgacacacgcctgtagtcccagctacttgggaggctgaggcaggagaattgctggaacccaggaggtggaggtttcagtgagccaagatcacgccactggactccagcctgggcgacagagagagactccatctcaaaaaaaaaaaataaaaaagccagaaaaaatttatacaaatgaagaaagaacttcaatacaaatgaagaaagaatttcacctgtgaattstctataagacaatgaacttccagtggttaataattatttggaaaaaactgttcaacctaccagtaagcagaaatacaaatgaagacaacgtattttcacctatcagatttgcaaaggtgagcgagagacaatatccagagaagggcatgaatatggggaaacaggcaccttcatgtcgtgctgatggctgggttaactggaacagcatctgttcattctcaatccactaatttcacttctgagaatctatcttaggaatggacagtgagtgacatgggaaatttctcatgaaatcaggttaagccacagaagtagggtatacaaattatagattatataaccatttacataggttatatgtttatcatacattttttatttgggtgatttttggggaatctttaggtgattttgatcttatatatatttttcatattttctataatctttaaaaatcaagggaaaaaaaaaaacctctgtgaaatgtgacatgatggaaccaaataaatccagaaatcaactttgagagtcaaatctctagcaaaatctgtcacttcacaagactgttgtaggtatatgttgatatgtgtggcaaaatcctctctaaggttgaggacagaggtaaccaggccacatggccatggctgggctgattttgtgggtgaggtcactggctgttcactgtaggaccggacacagcctgtcccttggcaggtctcagtttcataatctgtacaatggtatggtgggagcgggtgaggctgaatcaatctytgagggtcctggcagatcttgggctgaggcraaaactctgttcttgaagaagagaactttggctggcctcagtcacagagcggagggtgactgagcattgagatttgtaggttccaggctccagctcctaatctgcagcaggaccactgcacgtgaccttgttacctgttcctgaccaccacactgccccagcacggccctgcttcttggccaccctctctttcttggtcagcccctgggcccacttggttggggctggcttgacggctcaggctttattgatgtgtagcctggaggagcaggaacagggtaatgattctttggagcgattagtggaggcaggaactcaaaggccattggagagcccgacctgcccagggagagaggatctgttccctcctacgctctccctcagggacatttttgagatggtttggctctcatcatcaagctgtcctgactgtccaaggtggctgaggccacttcctggtataagacggctcctcccctcctggccacactcacctgtaggctgatgggcgtccacctcccacaccttcagcgcatcagctcctgagctttgataaggcctcctgtgctcagcctactttcccggaacctgatggtttacagtcatgctgcgcgggtactttggacacttttgttctcggcataagcgagtctcagggtcctccctctcagtgtgcctcctcaagggtggggctagaggcctcactcagcctggcctacgagctgcctggcactggagatgaggtagacaggttgattttcctcccagcctaggcataagcagaacttctggctttcgggaaagacgctgtgtgagacccgcctactccgtcagccatcccagaacctctgcctgcgctgctgcctctgaactgtgacattttcagtgtcaccctcaatatcagggccagtcttgggtgggggccagaggcagcggccatgggmatggtggggctgttagggaaaggtgtcctcatgaagcccccttcctgatatgggcctgtttttccctagcaaccaacaaatgcacagaaagacarcttctctgaacagtcctgtgtcctgcaaagagaaaccagacagagttgaggagcccccggactacaggtgaggacccctttcccagtcakagatacacacagactagagggtgggaagccctcaggaagtgacctgtttgtaagaggacctcaaggcagagccggggcccctttgcaggtctgtgaggtcaggcacaggctgccccaggcttcttcctcccgcccctcaagactgtcccagtgcactgggacctagcagagtccatgcttctcgggtttccagcctcctccctgctcacctgtgctctgggccaacctggccaaggcaaaggtttacctttttttctcagtgccatccccctctcccagtgtggtagcctcagccaggtcaggtgagtctgtgccaagctccccgcagcagagctcaggccacaggaaggaggcggcagggagggcagtcctgctggcatcatggcctgtggccaggccccggcgctgtgagtctgacaccttcacctcacccacaccccaaactgtccctattccagcactgcctgctcccctgcttaccccttggccagagaaatgggacagggtctttgacacycaggtgggaagctcctcagcatctctgggagaccaggcgcacctccaggagatgctgctcacccgcamtggggaaggtgggcccttggcgacccctctctacctcccgcagtgccctcccccagggatgagctgtatagtttagctgtgtgctcgctgtacttgtcattttgctgtgtcccctagagaagggtcctagtctctgatctctgcctcaagcttctggctcaaggccagggcagaattggcactgaggatgcatgggcaggactggggttccttgttcccgaaatggaatgtctcctttgcagtctgcactggccagaaggcttgaagggtgaagagataaagaagtgtggccgagaaggggtaagtctggaggctgacttctcactattcacccaggaaggggtcctgggctgccagaattcagtgacttttggctccttggccaccgggcctgtcatcaggaaatcaggagacctgagtgtgtatcccttcctgggtgggagtagtgtgtccccctctgctagtacaagctgcctgtcaggacctagcagcaccaggagacaagctgtgcttggcacacagccctccatactcactggctgcttactagctgcctcatgctaagtccscagcatgggccggggggctgtggcatttcctgttggctggagsagggcccctttggcggtctcatctcccagcgcttctcagacgcagcctgtgtgtttgcagataacactgaataaatacaaccagcaataccacaagctgtttaaggatgttcccttggaggaagtggttctcaaaggtgagctgtctcccggtatagctggttaggcacccagagtgcctggggccaggggcctctgctctggagcctccaaagcacgacttagaaatgggaactggctgtcctttagatgtggaccactcccctagaatgtgagaagactgggctggtgagaagactgggctggtttggacatagcattgcatttttgaaggttttcttggggaaacgtcagggctttggaatcttgtgtcctgctcttactggtgacttcttacctgctctggcctctcactgagcaggtgggggcatttgcacaatcaaggcccttggggcagagcagagcagggaaaggtcagggattctgcctgaggtggtgagaatgcaggcttggagatcagggcaggaacttgcctggaccctctggagcaagggtggagaaggaagaaacatccagcaggctggtggagtggaggagcagtcaggagaaggacccttcgacgctggggawtggactgtttggggtttggggcctgcggtggggaagggggagtctgaggaagacaggtcctgaggctggactgtggactccagaaygtgaggacccaggtcctggggcttcctgggctgaccttgcttatggccattttctctcctgtgacatcctagtgtgttcctgtgccctccagagggacttcctcctccagggccggctctacatctcccccaactggctctgcttccatgccagcctctttggcaaggatatcaaggtagtaatgagtggtgagggctgccatgaccctgtgaggggagccagcctcctgccccacgggcatgcctcaaagtcatgcctatctctctgcgtgctgggcccckggtgaagccccttgctggttggatgcgcagcttcgaggcatcccatccagtgtccaggaaagtagtcctgccccttcaaaaacaggggcccaatctggaccccacatctggcctgagctggcctgaacagttcacagccaaatcattctgcctctgggtatttcagaaatgctttgagaatcagagtgggatatcacatttaggcggagccctagctgtggccaagaagtagcctggggagctccattactagagtatgagatttaccagagccaccatccttggcctcctggataacagggatcatacctatgtgacagccaagagtgacacatcctgccaaggctggggcagggtggcagggacaactggaaggggagcctggatgaaaaggtagaaggttcagagacttccccacatggggccaggcttccccatggtggccatgctgggctcacagctgggtccctaggcagggagcaaagggaccacgtccttgggggttagtcctgagagaagcatccctctccytctcaggtggtcattcctgtggtgtctgtgcaaatgatcaaaaaacacaagatggcacggctccttcccaatggactggccatcaccaccaacaccagccagaaggtcagtgcactgggcccatgctcccttgtcagtctcccgctcccagccctgacagcccacagtctgactcgggcacattcccaggtctttatttcaccccaccctgcagctctccagtaggtatttcaggccgtacaacaagctggaagagaagttcctaggcagagcttctgttggctctcatggcctgatacccctgtgggcctgtgcccaatccacaagggggctggctggcacagcaaggagtctcatctcaccctacccctgtctgttttctttccatgtcccagtatatctttgtgtcactgctctcccgggacagtgtatatgacctgctgaggagagtctgcacccacctacaggtatggagcttgggagcaggaaggccagggaagtcgctcaggcctggatgcaggtcttgcacaagggtgttgggggaggtcgcccatctctccagcacagggaatggggcagggagaggggagttaaaggctcaggctcaatgtacaagagacagtacttggattgtgtgtctatgcttgcaagcatgtctttgaggccagtgagcccctgtgtgtccccatatacagatgctccttgttcatgggcttatgtcccatgaacccatcaaaagttgaaaatatcgtaagtcaaaaatgtgtttaatagaggtacacatcacctacagaacatcgtagcttagcctcacctcccttaaacatctcagaatgctttcattagcctagagctgggcaaaagcatctcaggcaaagcctgttttataataaagtgtggaacatcttatataacttattgaatcctgtactgaatgtgaaaaacaatggctgtatggtcccagcactttgggaggccgaggcaggtggatcacctgaggtcaagagttcgagaccagcctggccaacgtagtgaaaccctgtctttactaaaaatacaaaaattagccgggtgtggtggcaggcacctgtaatcccagctacttgggaggatgaggcaggagaatcacttgaacccgggaggaggaggttgtagtgagccgagattgcaccattgccctccagcctgggtgacaagagcaagactccatctcaaaaaaacaaaaaaaaacaaaaaacaaaaaacgaaaaccggaatggctgtataggtacttgaagtacagtttctacaggaagcctatcacttttgcaccatcataaagttgaaaaatcttaagtggaaccatcgtaggtcagggaccgtctctatgtccaggccctcacttgtgcttccttaatgcacagataggagcgcgtagctgcttcccaacatgccctatgactctctctgcctatggtgaggaagaggggagggatggggcagcaggtgggagagtaagtttcctggggtttgcctctctgctccagcattaaatagggggccccctatagaccctgggagctgggcttcacctgacacaaagtggcttatttggaggtaaagctctcttggagagggctgatgcttccccctgcctgaccttgcctgttccagatggacaagtgactgctgttccctttcctcctcagccttccagcaagaagagtctgagtgtaagagaattttcaggggaacctgagtctctggtgagagctgaagctgggagcaaagactgctggactgacagtgcctggagctctgaggcttctgggcctcctaggggggcccacaatgcagaactggggcaccaggctcaagagtcagtggccatgctatgccagggcatctcytaaacctgccacaccataatgcagagccaccagggcctcagcagataggctttcttttctttcttttttggacgacagagtcttgctaygttgcccatgctgcagtgcagtggcaccatctcatctcactgcaacttccacctgctgggttcaagtgattctcctgcctcaccctcccaagtagctgggattacaggcacttgccatcacactcagctaatttttgtatttttagtagagatggggtttcaccacgttggccaagctgatctcgaattcatggcctcaagtgatccactggcctccgcctcccaaagtgctgggattataggcgtgagccaccgtgcccagccgataggctgactttctgagtagaacagaagtccaagcaccaaaacactggccaggttgggctgcacacctgtacagatgcaggaccagtggcccatcctcttttcttcagctgagtcaagagggccttcaaggggataaagatgaccctgggagccgagtgtggtggctcacgcctgtaatcccagcactttgggaggccaaagcaggaggatggcttgagcccgggagttcgagattggcctgggcaacatagtgagaccctgtctcaataaaaatacaaaaattagcagggcatgttggcacgtacctgtagtcccagctacgcaggaggctgagatgggaggatcacttgagcctgggaggttaaggctgcagtgagccaagatcacaacactgtattccagcctgggcaacagagggagaccctgtcaaaaaaaaaaaaaataaaagatgtccctagggaagaactccaaagactatccctgaagaacccagacagacttattttagatttgccaaagttccagaagtttcctttggcagctggggccctgggtaggcagaactgagtttctagrgcagggatggcgtagaaatgaccctggggtgtttgaaggctcctttagtaactattagtgtttagccaagcatgtgatatgcataataccatgtgccggatagaaggtgaagttcccatttttgtagatggggacgctaagtcctccctgccaaggttagggcttgggataggagcaggaacttatcctacctaagacatgttgtgccgagctttcttggcctcagatctgagcatgtatctgggttggctcacatctaagatcccactgtggttctacactagcagtgttcaaagacatcgtttgctggcagaatagctagtcacagcaagggagcagagaggagaggcatatggttgctatagcaactgccctcctcgcttgtacctgcttccatccctggctaggcatctatatttggtaatatctggagaaaactctgataaacctggtgtgggctccttagggcaagtgagatcgcaagggccatggtaagatagcttctcctgtcttactgcaggaagtcctcatccctgagatgaagtggagaaaggtatgcccttcctccaggtccctgtctctcccagacaacatcccttgtatccctccatcatccgtggactccacagacagtttcttcccctccaggaagcctccaatgtctggtaagttcgggagggcttgtccatggcaactacttgcaaaggccagactttctgtcttcccagttccataaaaagggctcaccacagccagcagggcttctgagagctgattttttttttctcccaatccataaagaaaagtcaagagcccaagtagcttcagaaaatggtgggaggtgggcatggcccatgccaggctggggtcctgcctgccctaagaagatgccgaactgctctcccactgcaaagaatgctgtctatgaggaggatgagctggaggaggagcccaggagcactggggagctgaggctctgggattaccggctcctcaaggtcttctttgtgctgtaagtgactatactggggagggggacagacccacctgcatgtctaggtgcttggaacaagggccttggagtgtggggaattcactattcagaaccagggggaagtttctgagtcaaattcaagctcttgggtggtatctgaaggccatgtggcacgcccttctgtagcaagagaaaggatctccagtttttattcttgaaaccctgtaatttagggttaagactatttggtggagaggggcaggatatggagatgttgagaagaggaaaaggatttgggagaaggagggccaggaaaattggagagagagaggaaaagcttggcctcgccactgcccaccactagggcagcttctggaacccctgacttgtctctacctctgtctaaggaccagtagagcagggagcatcgtgggaagtgacatgaacagccagcccctgctttccctcaccttagctcatcagcctcctctggctcggctggccgggttttgaccatcaacatcagcacctgctgggggaatgggcccaccgcctagggggtcatcatcatgacctcccagaggaggcacaggaaggaccaccatggctggtgagagagagggtaggatgactgatctggctgtctggccagagctccmcccagagctcagctgaagggcccagagctctagctgggctgtaaggacacttccatggggacaagtctgaagacccctacatggtgtctgggaagaaagatgctgaggcctgaactggctgcaggacaaagggctctttaattcttccaactgcaggggtagcttggtccccactatttccggtgaacttccagaaatgctctttctgtggaagaaatatttaactccgtattgccsctttcttcaggatctgcttcctggtcatgtcmtcatccyacctggcgttccgtatttctcggctagagcagcagttatgctccttgagttgggatgacccagtccctgggcacaggtgaggccttttctctttctaatgcytttgatattgagggttgaggacaggagccaagaacctcaggccaggctgcctggctggacttggtcctgttttgagctggcttctgaccctaagcaaggttgggcagcgtgcagggtacaccagtcccaccctggcccactcttgggggaagtaaagttatcactggcccttctgcccacgtccgtctgcattctgggccctttccctgatgtggacatctttcctgtgtgcaggtaacagccacttggcctttgtccccattccttctccaagaagaatgttctgggtgctaagtctccaccaatgatccctgtggtttatgctgctgctgtgctaagactgcctatgaaggaaaatattccagatccctcctcctccccgcagctcttctcttccctctatgagagatctgaagtacgtgtttacaaagtaactggcttctacaatttttggactcaagcaaaaagccagattttttggaaccaactgaggaattctgtacacaaagcttcagcaaacacttagagaaaacaaacaaacaaacaaactgggtccttggaaacagttctggcacacaggcagaacactggaggccacctcaaaggacagaggccatgctttcgcatttggaatgtggctctgccacacagctcactcctatggtggggtcagaggtcagaacacaaaccacccatgtgggctctgctccctcccaacactctgtgttcccacagggcttctctgcgggcagccaggcacctgtcaggcttgggcaggggcctgctgagaatctgtgaatgcagaggggagggctcatggccaggattccagccagagatgaatttccatgctctgggccagggctctgtgccggcccctcatgaggtggctggctgcattatggggagatgctgcccacggcggagatggtggcagtggctgtgaagaacagaggtacctgaattctgtgtcctcagctgtcactttccggtgagacaagtggagcagggcctttgatcactgtggtcacagacctggtactgggttttgcccttgtgtgctcaaacatttctaaggtgtcccaagccctggaaatagggaagggaagggtggaggcttggatctgaggtcttgctgtccactccctgcctgcctgcccgcatctcaggcatggccaacagcagcccgttgaggggggcttgtctggacagttgcgtgtgatggtgttgagccatcacagggcagaggtcacttgtgtcacccccatagtcattgggttgcaggccatggaggagggacctccactccatggggcctattctccattaaggtggaagtgtccactgtgggcctagcacagtgcaggaaccaggccagggggtctatctcatacctctggggacaggaaaggtagaggatgaggaggttggacgtggtggtggctttgccttggatattcctcttcctctatcaaggccttctcttcttctctgtgtcccacaactctggcctcatcgccctgggactcccatctgctaagatagtggctttggaggttctggaagggcttagtgaggaggccagaagtatcagggaaagttgctggtgatggggtgggcggtgtcagaagcagccactgttttcccctcttcagacactgagagattaatcagggaatgaaatccaggtggaaattatttattgtgaagcagacgactgtctgtcctgtttatgacaaacccaaatgagaattggagggactaccagtaagtggtctcttcatgctctccccatcccagtttttaggatgaaatttagagcctggccttttgtgttgcttgcaccaaatctgtatgtctcaggtgaaactcactgttccatgaatggtcatccttttttttttttttttttggaaccagcccctttcaccctttcatccgtcttttttttttaggaaaataacccttcttgcttcagcacttctccctggtccttgctgaaagacagagataaaaatccattctctgagccttgcttggttgtcagaggccatgagaggtgccagttataggtggatgtgccaagatgctggtgaacttggtcttcagctatacccaggctcagaaagggcaagagccatgctgcagcgtaggtgactttggaggtgcacttggggcccagggctttgagtgttgcgggtgtgcctgtccctccagatagtgctctgtttctctctgttgtccccctgcctggtcctctggggccactgtgctttctgctgtgtgcatttataaatgatgtgtattttatatagacctgcttgcattggctgatgctcctctaattccctgagtttgattcaaccacccttgggttgttttgctatggccttagcctttgaaaatattttaaaataaaaaacttgatttttctagtgtattatggtatagaaagttcatttttatcctctgactactcactacaggtactcttactgacatactcagcccccaggagactgatggagcccaagtcattcctataatcccaagtactctgcaaatctcaaaggacttggcatatggggaagagtgagggtggccacagcaaacccccacagccctctgcctctgttgggtggacaccgggaatacttacccattttctctgagcaactccaaagcaatgtccctggctcaaacaggattatgcctctgatccaggaattaacatacggagttcagagccagaaagctcgkgtggccttttctatgacccagagcctatgtaaggaggtaaaattccaatttgggccatatcaccttccttctttttccctgtgatgccccctctagtagtgattcattcattcaataaatattattgagccaagactacatgccaggtactaagctgggcactggagccatgaacatggcaaacatatctgtgtccatggaacttaacttacattccatgtacaggtagattccaagtaaatatgtaaacaaacaagataattgcagatagtgattttcaagaagaaacagtgacatgatgaagtgtgataaacagtggtaaagagggaggtggctttagatgacatggttaagaaagttctccaaagtgacaagctggtgcttaaaggatgagaagtcagtcatgagaggagctgggaacaacacattcctggaagagggatcagcaactgcaaaaggtaggaaaggacatgtttgtctctgaggagcagagagactagctgcatgttagtatcctaggatgctaagtgggagagtgacatgaaaagaggttatagaggtcaacacaacaaaaaaacccgattgaaaaatgggcaaaaggctgggcccagtggctcatgcctataatcccaacactttgggaggctgaggcaggtggatcgctttgagcccagaagttcgagaccagcctggccaacatggggaaaccctgtctccactaaaaatacaaaaattaggccaggtgttgtggctcactcctgtaatcccagcactttgggaggccgaggtgggtggatcacgaggtcaggagttcaagaccagcctgaccaacatggtgaaaccccgtctctactaaaaatacaaaaattagccgggtgtggtggtgggtgcctgtaatcctagctactcaggaggctgaggcaggagaatcgcttgaacccgggaggcggaggttgcagtgagccgagatcgcgccactgcactccagcctgggcgacagagcaagattccgtctcaaaaaaaaaaaaaaaagccaggcatggtggtatgcacctatagttccagctactcaggaggttgaggtgggagaattgcttgaacccaggaggcggaggttgcagtgagccgagatcatgccactgcactccagcctgggtaacagagcaagactgtcttaaaaaaaaaaaggcaaaggatttgaatagacatttctctaaagaagatacacagatggccaataaccaatgaaaagatcttcaacatcactaatcattagggaaatgccagtcaaaaccacaatgaagtaccacttcacactcattagaatggctactctcaaagaacagaaaagaaacagaatataacaagtgttggtgaagatgtggagaattagtaactctgggaatgacttgggctgggttggtgaagatatggagaactgtactgttggtgggaatgtaaagtggtttaactactgtgtaaaacaggacagcagctactcaaaaaattaaaaacagaattaccatatgatccagcaattctaagtatatagccaaaagaactgagagaataatcttgaagaaatttttctttttttttctttaaagacagggtctcactctgtcactcagtcacccagactgaagtacagtggtgtgatcacagcttactgcagcctcgacctccagggcccaaactgaagaaatatttgaacacacatgttcatagcagcattatgtacaataaccgaaaagtagaagcaactcaagtgtccacccatggatgaataaacatatatatatatatgtgtatatattctatatatatatgtttatatattctatatatatatacacacacaatgaaatatgtatattcatctactcatggatatgtaaatatatatatatatatatatatatatgaaaaaatattcagccttgagaaggaaaaaaagtctgacacatgctataacattgatgaaccttgtggacattaagctaagtgaaataatccagtccaaaaaaaaaaaatttctggaatccaggcttgtagaaagaaaaaaaaataaaaacaaaaccccgcacaaatactgggcagggtgcagtggctggcttatgcctgtaattccagctacataggagggaggatcacttgaggccaggagtttgagaccagcctgggcaacacagcgagaccccatctcttaaaaaaaagacaaatactgtatgatttggcttataggtggtatgtggagtagtcaaattcatagagacagaaagtagaatggtggctgccaggggctgagggaagggggaagtggagaactattgtttaatgggtatagagttgcagttttgcaagatgaagaattctggagattggttgcacaatagtgtaatgtacttaacactactgaactatatgctaaatatggttaagatggtaaattttatgtcattttaccacaattttttaaaagttaaaagaaaagagtttggtggggtaagcagaagagtttggattttatatagtccctgggtattacagctcagatcggaaagtttggtagggcagatcagtggttgttgaaaccaagtgctttcctttgctagaggaaataaacacctggatataatacacagaaaaatatagcttataatctataggcttttcagggacttagagaaaccaatccaataaaattctttaaagtatgcccactcctcactattcccagggactgattcatagcagcagcatcacagagaaggcatataatcatatatttatcatggcaatgagctaactttatcagggagaaatagctgccttaaatttggggaaacagaaaggaaatatacattatgccagagcctcagttttgcaacatgggccttagcagaaaggaagggtcatgggaggggcagtattattagcgaaaaaggcattcaggaatgagggggactcagggacaacttcatcccactgagatgtcctgggaataagaaactacccccaccccctctcccaggtgcccagccagccagccatggcccctctacctgactgccagactgagtgaggcctagaagcccatggtgctcctctctcctagctgctgggccacagaaccagggagtcctagagcagagaaacttctcagagaaggatctccaggttgcctcaggactagactgagaggctagatcctcaaactcaatccaaggctggctgtctctctctcagagaaggaagtgatgacaactgagccactaggcggcagcaaagtccagcaaaaagacgcagaggcagaggggtgagtaaagacttcgttctcctccctcagaaaaagctactcctgtccccttgctggggaaaacgggcccagggcccctccagtccaggtcacctacctatccaaagtaagaagggaatcttcaggaaggcttgtgtggccatttgccccgaaaagaatggctctatccgcttccgctttggtcctcctcgctctcttctctcatcacctggggaagggccagcgctgattctgaaaggacggcgtttccgagggctctccagacttcccccagctctggccactcggaaggcaggcgtggagaacaagtgtgtgtgtgtttgtgtttctgggctgcaagggtggagagtgcagtttctagggcatagaaatcccaggctcttctccaacctgcccttgtttggattagcattttctcttagacacagaatcgccgaaatctggctcctgtgaagtgtgatttcatgatggcaacaacactctttccgctcctacctttatttagagagcacgggctgggccccagagcagagagttttaacgtttaacagttccacatgccctgtccgctgacagcgagagggtgggaggcatttaagcctctgaaatgatattctagagaaacctgagttcatccgcctgcgtgcctgacctccacagagccaaggaacacctggtacccagcagagccctgctttcgctgctgccttcgtgctggcagggctccttgccttcccggaatgtgttccttcttgtttgccactcagtgcctggcccaaagccaaacctgggctgctcggaatgccatgcccccactcacttctctctcaggatctgagacaaggctctcttccgcctggggaaaggccaggctctcgctgcagcctcgtcccactgcgcaacttctctaggcacatcagactctccaccggctgaaagcagaagcacttagggagaggacagcagggtccccaggaaagcagacggtgtggcatactgatatcctattggcagccttctaaactgggccagagttggcaaagtgttattcacaaggtgttcattaacttgctaaatgcaaaaaggttgggttgggcaccactctgggaaaacatgacacccctgctcctggattcagtctagcatgaaggtgtgttaattggtgtaggatttctatgcaagtttttctttgctgttagttccaaataccagactagtctgtgtggcatgctctccccaatatataaccacatttaaacaatttattaagcaccttctatgggctcctgaatgcatgcttctatagatactatgacactataattttctgagcacttaattgtgtaccaggcactatatagagtgctttttatactcattatctcattgaagagaatctcaatacactaatacagttttcacactttacgctgtgtaaactgagatcaataggccagaaatacaatatggactccttcagggagtagctgaggaagcgaggtagacagaatagcaatgtaacagtgtaagacgggtgaatccgtgtaagtgcaaaaggcagtggtatgggcagacttaatgttacaggggcatgcagcatgcgtgggcctcaaagaatgagtaagatttggatctgaggagagaggtggggaggatcttcccaaaatgtgtgtttgcggggtaacatcagttaaagtatggtagtgctgagggcgggacagataaaaatctgaaagaagcagagtctgaatatgtatgtgggcagaatccccaggatctaagtgccaggatgacaaggacagacttagtctccccgggctgaggagctactgcagtttaggagtgaaggagaaaagtgatggtttggcgatattggtttctcagtagagtacaaggtggattaaaagttcagtagaaaagtctagatcatggtttctcaacctcagcactactgatattttggactggctaattctttgttatagggggttatcttgtgtattgaaagattctgggccacatccttggtctctgcttacctgatgccagtagcaccccccacccctggttatgacagccaagtgtctccagagcaggcaaactacccctaattgagtatcattgctttaggtggcaggaagttagggcctggaccttataatattggcagttattttgataactgcgtcagtctattgactttcagaatagctgataaaagtaaaaaatggtttccttgccgcaggaaattcatcatcagtgccaaagaacttaatggcatagagaaaagaggcttcagaagtagatcattctgcctattagaaacctctagaggatactccaaagcttcagataatgtgctcaagactcattagcaagacagcacctgatagcaggatttctctctctacctcatcccgcaaatcacaacttactcaagggccacattgagtaaggaatgcccccatgtgcatgcaggcagagaagctaatgatctataattttgctaggtttgcattcacccttctagaattttgtttttggcaactgggagaggggatgaatagacactggcctatcaatgaagagagctgatttaccaagatgtgtctttgtctaaagcaggaatcagctaagtacagactgctgtacagcctggccagcttttcgtaaatacagttttactggaactcagccatgcccctttgtt

SEQ ID NO: 96286 - DNA, 27525 bp, Homo sapiens
agaggaagaggcaccggtggccatggggctggaggcggcgcgcgagctggagtgcgcggcgctgggcacgctgctgcgggatccgcgggaggcggaacgcacgctgctgctggactgccgccccttcctggccttctgccggcgccacgtgcgcgccgcgcggccagtgccttggaacgcgctgctgcggcgccgcgcgcgcggccctcctgccgccgttctcgcctgcctgctgcccgaccgcgcgctgcggacgcgcctggtccgcggggagctggcgcgggccgtggtgctggacgagggcagtgcctcggtggcggagctccggcccgacagcccggctcatgtgctgctggccgcgctgctgcacgagacccgcgcggggcccactgccgtgtacttcctgcgaggtgagcaagccggccgcccttggcccgccccacccgactccagcccggctttccctgctgatcgtgctcttcccctccttgcaggaggcttcgacggcttccagggctgctgtcccgatctgtgctctgaggcccccgcccctgcgctgccgccaacaggggacaaaaccagccgctccgactccagggctcctgtctacgaccaggtgagtattgacccccctcccccgaacctccctctctccccgccgcggactgggcgcctctagggaaagagcctgccatttggggatgcgagcagtttgcccatatacacacacttttatacgtgtgtgtgttgggggagggggtggggcatggctgctcgcgcgtgcctgtatgggtctgtgtatgtttgcatgtgtatgttgggagcatgaagggaaatgtatgtcccggtgtgtcctccgcacattcctgagacctgtctcaggtcaggaggactggctgaggagtcctcttgtctcggccagcccatggggtctccacccgctgctgctccagctctccggggctgggctggaaaggcctcaccgcccctctgttccctccagggtggccctgtggagatcttgccctacctgttcctgggcagctgcagtcactcgtcagacctgcaggggctgcaggcctgtggcatcacagccgtcctcaacgtgtccgccagctgccccaaccactttgagggccttttccgctacaagagtatccctgtggaggacaaccagatggtggagatcagtgcctggttccaggaggccataggcttcattggtaagggggcacctctgcccagaaatcccgaggggctccagaggagaggactgggggcacctgtctcctgggctgtgcacattccgtctgacaccactcccccatctcccttgcagactgggtgaagaacagcggaggccgggtgctggtgcactgccaggcgggtatctcgcgctctgccaccatctgtctggcatacctcatgcagagtcgccgtgtgcggctggacgaggcctttgacttcgttaagcagcgccggggggtcatctcccccaacttcagtttcatggggcagctgctgcagtttgagacccaggtgctgtgtcactgaggtggtgcccctctgcctgcctgccccactgtgctggcaggagctgactgtggactggtgggctcccctctgggccagcacagtcccctcacctctggcagggctgctacctcctcagagtttcagaagcccccacatgggggctctaggaatgccggcatgctggtctttccgacctggtgctcttctgctgggggactgaggctggccctcattcggggtcgggaaccaagggtgtgtctgctctttccctccccatcctctggcagaaatcagctagacgctataccgtggactctccctggtccaccaccatgttgaagcccttggcagcctgagagctccaaggaacaagctgtgacaaccaggagccctgtctgtgggttcgtctgcccagggcctggagcccaagccctgtgttcctggggaagctggggacttgggaagtgatgggtgtgtcatgttgcgtgtgtctgtctgtgagcctttcacacctgtgctggcgctggaaaattatttgtgctcagctgacatttaacactccctcccccgcttcctcctagccctgtgggcaggggttggaaacttagcactttatatttatacagaacattcaggatatgtcaataaaatattgttatatttaaaaaacaacaacccagcatctggtctcatctgatacccgggagcctgcttggacctcacgtttccttgtgcccttggggtttgggaagtgaatgggcagaggggccagcggccggaaggggcaggtctgaccctccccacaaaggctgctctcttggccccagttctccctgggctggcgtcttttcccagacagggacctcgctccagagctgaacagggttgtttctgggaggctgggtcccgtccgtgactcagagccaggcccagtgctgccccgatcagaccccgcttccttttcggaatgtggaaggatgcgagtgtgtgcctgagggtgtggtcctgtgggggtgggtggtcttggcccatgcacacctgcatgttgcgcatggtgttcctgtgggagcgtgtgtgcacgcccacacaagaggcacttcccaggccgtgtgggtctctacttcctcacagcaggcctgcatggcctccctactcttctcccacatcccagggctggggctcacagcgtcccctgttccagagctccttcatgtcccccaaaggcatgtggccctgtgtctggtgcagaggacctgtcaccagggatgggattcattgctctgcacacccacccaactagcacatcttggccgagcttcaattacgggcccagcataggactaaggttcagtggagacctgagaccagggccccgcccacgccagaagccaaggggtacctgccgacgctgccgggagggggtgctgtgatctgcctgtgagcaggggtgctgaggcctttggaaatggttgtgcgggagccagtcctgcttcaggctcactgggacactcggccatttggagtgtcatccagccaagggttgtctctgcacagtgctacctctaaggatctgtccgtggtctgttaggaactgggctgcacagccggaggtgagcagcttcatcagtattacagccgcaccccattgctagcattactgcctgagctccgcctcctatcagatcagcggtggcattagattctcataggagcttgaaccctgttgtgaactgcattggagggatataggatgtatgctccttatgaaactctaactaatgcctgatgatctgtcactgtctcccatcactcccagatgggaccgtctagtctcaggaaaacaagctctgggctcccactgattctacattatggtgagttgtataaaattatttcattgtagattacaatgtaatgatagaaataaagtgcacaataaatgtaatgcacttgaatcacctagaaaccatccccctcaccatcctgggccaggcatggtggcttatgcctctaatcctagcactttgggaggccgagatgggtggatcaactgaggtcaggagttcgggaccagcctggccaacatggtgaaaccccgcctctactaaaaatacaaaaattagccaggcatggtggcgggcgcctgttatcccagctacttgggagtctgaggcaggagaattgcttgaacctgggaggtggaggttgcagtgagccaagattgcgccattgcactccagcctgagcatcaagagtgaaactccatctcaaacagaggaacaaacaaaaaccggtccctggtgccacaaaggttgggaactgctgtcttacggcattctgaatgcctgggagggtgtgcttgtggggcagggcagtgtagtttgacagtccgggggctggttttgcttcaccttgctgtatacagttttcttgtctgtaaaatggagtttcattgttagcccccacctctgaggatgtagacttacacaagtcaatccatgtagtgcctgctcatagtaggcgctccgaaaatgttagctaactacggccctaggagtgaggttgatctgatgtgccggtgtgcacatgcgaggtgtgcatctggaccaggatggacactcataacggctgggcctggggtccactcagccttgtgcctggagcctggcacaggtgggcgctcactctgtgaggccgaatgaagggtgattcttgttcccactgctgtctgaggggtggggtgagccactccagtgtgaactgggcagagccggggttgctattctgccttccttaggagctgagtaggcatctgttgggacccacttgtacccccatgcccagcttgggtgggtgggggacatctggggctctaagtcataggggacttcacaccacacagcctcatctcacacacagctgcactggtggctgaggcctctgcccaccccccacccttggccctaccccatcccaccctacccagccccaatcccctctccttccttccccgtgctttttatagcttgtcatctagcaaactgcccttctctttctctctcttttcctcctttccttctttcctatttattaaatttttaaacttttaattgtggtaaaaaatgcaacataaaattggtcatctttaccattatcaagtgtttagtaaagtgtattcacatcgttgtgcacagatatccagagctttttcatcttgcgaacctgaaatcctatacctattaaatgataactcccctccccagtccccagccccttgtgagctccgttccactttccgtccctgtgcactgggctactctagacacctcttggaggtagaagcatgcaggatttgtctttttgtgactggcttgtttcgctcagcaaaatatcctcagaccaactgcatgtcctaataaagactctgtttctctccccaagcagggtgattatttcttatcattattttaattcttttgttttttgagacagagtctcactctgttgcccaggctggagtgcagtggcacaatcttggctcactgcaacctctgcctcctgagttcaagggatttctggctaatttttgtatttttagtagagatggggtttcaccgtgttggctaggctggtctcgaactcctgacctcaagtaatctgcctgccttggcctcccaaaatgctgggattacaggcatgagccactgcgcccggtctactttatttttttttactgaacattcatctttttttttgagatggagtctcactctgtcccccgggctagagtgcagtggcgcgattttggctcattgcaaactccacctctgggttcaagtgattcacctgcctcagcctcccgagtaggtgggattacaggtgcccgccaccgtgcccagctaatttttgtattcttttagtagagatggggtttcaccatggtggccagtctggtcttgaattcctgacctcgtgatccacctgccttggcctcccaaagtgctgggattataggcgtgagccaccgcgccctcctgaacactcatcttaagtggtcagccttgtgcatttgttttttgatgggtcctattctttattttacttattttttctaggtttactgaggcataatcgacaaataaaagtagtatatgtttaagtatacaacgtgatgttttgacatatgcataccttgtgaaatgatgaccacaacaagctaactagcatatccatggtgtgtatcctgacatctgtcaataccctgccctggcagcagggcgtctgcctccatcatggtctccctgtgattctgattcctatctttggagaagctctggattccaggcacagtgggaatgctgaaaggtccttgtggacaatagctattcttcttggctctgtcgcttcccttcactgggtgcaggtgactgtgggggtgtccccaaatgctgcccagcgctgacatgctccgcctctgggatttcaatccaggtggggccctgagtgacctggctctggggctcaggggtatggaggaggggggatataggtaaggagtttaaatttccaaatctgtgaaatgggaataaatactgactgatcatgccagctgctgtgggattagggggtggactccctgcgaggctctgggcatctgggggttccacctttcccacatggcaggctttctagggtgctgcacactgttcagtttgtgaaatttcctggagccctgtgcttgtgatagtgaacttttctatatgtgtactaaaataaaagcttgtgaaagtgcagtgaccttttcctccttccggagatacacggggggcgccccagggtctcaggcagctttccccatgtctaagcacaggccggggtaggaaagggggtctccctcgctggaggaataggtctatacctgggctggggcctcagctaggcctggagcaactttctgcgatgtttctctgccccctggaggcaggaaggaacctcagaagagccacactcccaagcgggcccctcctgtctttcacctgctacagccaggaaggggactgggctggggtgggaaccacaggtaggcatcggaggggctgccagtagacctggtttgggtggcgctgccggtagagctggttggggcggggctgcaggtggagctggttggggcggggctgcaggtggaggtggttggggcggggctgcaggtggagatggttggggcggggctgcaggtggaggtggttggggcggggctgcaggtggaggcggttgaggggagcaaggtgggaggtggagcagctgctatttaagagggggtggtggtgccggttctgcaattaggttactgtgtcttgctggggcttggtcttgtttgctgaaggggcagcagggctctaccatggagggtgtagggggtctctggccttgggtgctgggtctgctctccttgccaggtaagctggctgcctgtccctcctgctgctggctccagcctggagaaagctggggagaggctagaaggttgtggctggagcctgcagggattgtagctgagctcagtagctcagagcacagagctctccagggttattctagaagtcagctcctggggggccaaggggaggcctcctgaaggccctggaagcagagggcctgcctggcagaagatargtgttgtgccccaggcctacttgtcttggggtgggggtaggctgtaagtccccactccagcctggtcaggcagggagtcatccaggctgagcccattgtccaagagcctgggctgagagagagtcataaggtggggtctgaggctggccctgcccgtcacgggcgtcagaacccgaggtctgtcctgcctccttccttcctgcccctcctctacctcataggtggggcacatggtcccttttggtccccctaagggagctccttccctgaggtcatctagaccttggcaccagttggggttgagcagggaggctgggaaggctccttggctttgtgctggagcctactcttcctagggactgagtcttaccgtctgatcccccacacccaccccatgtcctgctgtctggtctcaccggtgggtgctccaggcatctgtgtatgcccctgtctgtctggaccaggtgtgatcctaggagcgcccctggcctccagctgcgcaggagcctgtggtaccagcttcccagatggcctcacccctgagggaacccaggcctccggggacaaggacattcctgcaattaaccaaggtgagggcactacatcttctcacggcctggaggggcacgacgttatgtagtgtgaaaaccacaccgaacactcagaaatgcagagcctgggaggaaatggaccagcttactctgggctctaagtggtttttaagagatggagtggtgttgctatattgccccggctggtcttgaactcctggccttaagtgatcttcctgcctctgcctcccgagcagctgggactacaggtgtgaatgggtggaaattctatgggcaattgcttaagtctactctttctttttgtatctttcttagtggattgttacttttataagaaaaaccaagctcttaaagggcctgggcgtggagctaagcggttagtcgcagtctgagattgtcagccaccctgtgcaggactgtctgcaggtgtgattaagaagtctgaagctcagctgggtgcggtggctctcgcctgtagtcccagcactttgggaggctgaggcgggcagatcatgaggtcaggagatcgagaccatcctggctaacacagtgaaaccccgtccccaccaaaaatacaaaaattagccgggcgtggtggcgggcgcctgtagtcccagctactcaggaggctgaggcaggagaatggcatgaacctgggaggcggagcttgcagtgagctgagattgcgccactgcactccagcctgggcgacagagcatctcacaaaaaacaaaaaacaaaagtcaggctcagggccttgctgtctggggatgtcagctgaggaatgagggtgtataaatagcctgaacaaagccagttgaaatggagactggagttcagatgttggagcaatgagggctgaagcactcagggttgaagcaatcgggctgaacaggggacaaccttgccctaagggtgggtgagatcctaccagatgtggtagccactgtgtgatctgcccccttcttcctctgtgagctgacttgggagcccagcgccagctgagccttgagccccaggcaccatcccacccctggatcaccgtgagtggtctgcaggtaaccagaaccaatggagaaaactcccaaatgctggtgaccccaacaactatcctatcacctacggtgaggctgtctcataagggctgcccgtgccttacccagtgctttcctgggaagcacctgcccatctccagccactgtgaatatggctaatgctgcacagctgtctgcctcccaaaactggcccttggccagaaggagctgcctcagccagagatgcccgggggctactcccttgtctgcccaaggtggcctactgtgacttctaagggacaggagtctggctcctgcctaaaggtggtacaagtcagcggtgtcatttgtggtctggagcgcccatgggatctggctgaggctgtgcctgggttcttccctgccttctctcctgcttccctcactccccctgtgagtcacttgtgggagacccggctcagggagagatgagaagcagagggactaagaggggagaggggcttgcgagagccggtatttgcctgcctctgatggtggaacaaatttgtggaacaaaattgccacctcaaggggcctgaatataacagatgggtggggaatagatgggggatgaggtgggcaggagaccccagggcctgttctgaggagtgtggctcaggctggaagaagccactgcttcctgacagcagggacccgggcttgggactggattgcgtgggtcatgggctgtgtttgagcaggggaaggctgcagtccagccgagaagccttgcacactcagggactgtgtgacttccctgaggccacgcaggctcagtgctcagggaacctctagctccacagtcaggagagggacagaccccaagcctcagtctcctttgtctttgtcctccagccccctcacacctgcagacagtccgcacagggtggctgacattctcaaacatcaactaatgacttaactaaacacccaggctcggagagccgatgacctatacttttatcaggctatttaagaacttataaaagtaacaatccactaggaaagacacaagaatagacttaagtaagtagggatttgcttggcctgtcccacgagtcagtgttctgggggacatgggccaacacgtccttcttcctttcccagggctcatcctggaagaaaccccagagagcagcttcctcatcgagggggacatcatccggccggtgagtgcacacactgacgtgtgtgggtgcggataagcccacagttggcgacaggtcctctgagcccaccctggatgccatggggcctgatgtgtgagggacatacatagcttggtagatgcctctttttgtcaaggtcagagcgactgttctgttaggaaataggaataagccagcctgaatgctaaggaaggctggtatctgaagtgctggcacagtcagcctgagagggcttcctgaaggaggaggtttgaacacttgacccagcttggtaccctgcccaggggaggtgctcagcactcgggaggtgctcagataaaggaagagatgagcaagggttggcagagtggccagtggcagataaagggcctggtggcagtggcgacctagggatggtggaacaaggagtgatgttgagcctgaccatcttggctgtggtcgaggggccgcatctgaagggagaaggttgctggggattggggcgccttgctaacagaaaagggaacactgtgcccaggatggcagccatgtgtttcaggcaactgcgaatggcagaaggctcctgaataggacagtgacccagggraaggcaagactgtcctgttggaggctgccactgacggcacagcctctggctgggcaggagagccagaggctggcccaaggctgcccrggaactccgggggcagggcagaccctctgggttatgcagtgagtgctcgggcaggtggtgtgcgaccacccggagcagaatcaaatgcctccagccgatggcacaggcacgctggggtgctgtggagcctgggcaccgaagggctctggttgctggagagcagaagtaagcagccgaggccagggtgctgcctcactttcactccatatggctctgttcccatgatcgtcccatgttcagggaagcctggtggctgttcccctctggaaggggcactgtcaacatgctggagtggggctgctggcccaagcccttctgattcagggcaccctggggtgctgggcctcctagccaacatcctcagggactaatctcttgtttgcttgagattgaaattctttcatcataggccaagggactgtcttgtgcatcaaggttcatgtagctggccccttgccttccacagctctgtcccatctctaatggtcccccattcccatgcacacaggtcctgactcccacatctttggggttctggtgccctggggtgtggtacccttggggcacaaagcttgggtggcctctgtccccaggggttgaactgctgctctctcctcagagtcccttccgactgctgtcagcaaccagcaacaaatggcccatgggtggtagtggtgtcgtggaggtccccttcctgctctccagcaagtacggtgagtgagcatggcgcgctccctccctgcctcagccccttcttcctaatgcggcaggtgttcctctcttcccttttcctcttacaccatcacatcccttccacctccccacccgaagaacctgtccacagatgcccttctgttgctgaaggtctcctgagtagggagggttaaaatctgatgggaaggtatgtcgagtggggatctggttccccttgagaccatgcggtgcagaggacagtgacctacccaaggccacacagccagggtctgtctggggcccagcttcttcctggcaccactaagctgccctttcttgatgctattttgggagagtgagttcagagctctgctcccagaccctcaggtagagctcaaagaccaccagggctctgggggctcagccaggtggtgtcttccagatgagcccagccgccaggtcatcctggaggctcttgcggagtttgaacgttccacgtgcatcaggtttgtcacctatcaggaccagagagacttcatttccatcatccccatgtatgggtaagtgccggggccaggatgcgtatctcagctcgcttctgcgttcagcccggaattaacttggccattgtctaaaatgtattcctgggcccatcctccagggctcagtctccctgcccaccctgaggggtctgccaagtgtgagctggacctccagggyggaatgtgggaaagggatgggaacggtgctagaccctccatttacaaagccctcctctcccgggggactccatgaggtggtgaggagaggaggttttgcggggcagacagtgcgtgagtcactgagtcctggcaagtcccctaacttctgagcctcttctgtcccctctggggtgcgagtggtggcgatacctgcttcctagcttgtcaggggcctgaggcaatttgtgtgaaagccttggcttagggctgaccaggagggtgtgctcacttagtaagctgcttctgtcctctgtgttcatatatcagtttctgcagcctccctgcagcccaggctggtgatgggggtccggtatggccatttcacagaagtccaggcagtaaaggggcctggagaatggtgaacctgagactagagcccagagtggggcctgcctgttgggagtttgtctatcttgtgttgtgtggggagggagagcccaggtctgtatgtcyggagggatctgggctggcacttaccccacttgctctcatcaccctgcaggtgcttctcgagtgtggggcrcagtggagggatgcaggtggtctccctggcgcccacgtgtctccagaagggccggggcattgtccttcatgagctcatgcatgtgctgggcttctggcacgagcacacgcgggccgaccgggaccgctatatccgtgtcaactggaacgagatcctgccaggtgagccaggccacacgcaggacaggctggtgccggggaggggacagcayggcttgggcccaagtcgcctggtccccatgggtgaggctatccatcctccccatcacctgcctgcttcctgtggggaaggtgggggtctcacttctgtctggtacctggtacctggaggtggtactctgggtgctgctctgggccccaggccttcctctacccacctgtagttgtgccttagctagggcgccaccacctgctttgtctcgcttctcatccctgacactgtcctctccctggcgatggggcaggcagtgcccatgatacctgcttgttgagtactctagcagcggtctcatgtaccagataccaccaccatggactggggctgtgtgccagcttggggagctgagccaaagtgggaccccaaggtagcaggctgcacaagccaagtgctgggccacgggctgagggcagcactgtggggctgggacatgtgccagtggtgccagtgagcaggcagaaggaacacagactgtggccatgggagagtggaggctggaggcaggtgggctgtggttcctgtgctggcagcggctgtgtggcgccggggatcagatcctggtgatggtggggtctctctcattgtgggcttgatggtctggttcaggaggcaggaagagccccacgagggaggggcagaggaggtttgggtgggagtctggcttaggggttggagcaggaaggcctaccgcaggtggagggcgtccagcacgagacctttcagggctgtcatgttagccaggtgaggcagccagggaagctgcctgggcccaaggaccttcccaggccccaaacaccgctttctcagtggctctcagcaaacatgagtcacagagaaaggggtgacggggcacgtgggtagcacctcacaaagggggaggggatggatattgaatcagaccaggctggggaggttgtgaggggggtgacaagtgactctgtaccctgaaaacagactgatccttcccaatgctcgtggaacagttgtgaaagtttaccctgataattttatgatataccatgaaatgccatgaaaacctgcaactctgaaagtagaccaatgtaaacattctgatcatgatataaagtagaaaccgatacatcaaaaccgaaagcttctcctattcagaaattgaaaaaaacaacaaaactttctttcagctctggagttaaagtacagcaattctaaaaaaaaatcatgaaagacwagaaaagccaatggttcacagctaaagcaatgctcagagaaaatgtgtagacttacgtatcagtaaacagaacaaattgagcatgtcaacccaagttaaatgaaagcaggagggaatttcaaaaggtaaaagcagaaattgagttggaaaacagcactaataattattcctaatgataaaacaggctaaaacacgggttccccagtggaaaaaatgagaacatatttgttcccatttaggttaatatgttctcattaggttaacatgtacagaaactgccagggcagacacattaataacagtaattaactgttgtggggcggggaggtgggaactcaggaagcaggggatggaatagacttttactacatctcaatatttgacttttgaaccaaatgaatatactacttattcaaaagtatgtttaatgaatttttaaaaagaagtaagagctcaagaggcagctatgttaggcaggtggtggggtatgaaggtgctggagggctcatttgctccatggagaggaagctgctgtgaccgaggtggcgtgtatgcgtggctggctggctggatttgggaggattgggggagcaatccctctgaaggcctgggggacttgagtgagggggagatgggctccaaatctggggaagtgttgtggcctgacacaggaagaacaggtgggcctgtgactggggactagggcatcaccactgcagatgacagcgtggcagctttttaaagctgggtcaaggaatagacatttcatctggggtgggagggacatctgagaccctgagcagtgtgggacccgtggcagctgtggcttatgcagagaccagccccgtgcagactgaatatgcaaggaggaaggatgggtggagggaacagctaggaggtgatggttggccagccatggggtccctgtgcctctacctcaactagtacaggttggggatcctcccagggctgggaaagtgggactggtaccagaagcagcatggtggctgtgggctcagcccctcagcttgggtgagttatgagctcccagaagactctcccagccattgccygccctttcttgcctgccctctttatatatcagtaagttgtattgtttttgtatttttaggctttgaaatcaacttcatcaagtctcrgagcagcaacatgctgacgccctatgactactcctctgtgatgcactatgggaggtgaggaccctgccttcttctccctctgcttcccccagcctctcccgtggtgatctggactcaggggtctcccgctgggttccaggctygccttcagccggcgtgggctgcccaccatcacaccactttgggcccccagtgtccacatcggccagcgatggaacctgagtgcctcggacatcacccgggtcctcmaactctacggctgcagcccaagtggccccaggccccgtgggagaggtgagtggcatggcaggaaggtgacttgaacctggagaaggcgcctgtgctctaatggtgtcagggagggtgacaaggagggagatgaggttgcagggggagcagggtgagatcacgggggcttgccacaacgacgcagaacaagcacttgaggaaagttaacactcactatgactcaactgtaaccaaagaggaatagggctcacttgcttagcctagataataaacatctaccaaaaacctagaacaaaagttaagggtaaaacattaaaactgggaccaagacaagttttcccaccattgtcccatctactccacattgtgtggcagtggaggtcctgggcaccgaggtagagccaaagaaactaaaggtccgaggattggaaaggaagcaaaaaaatcgttcataatagatgattacctgtattgaaagcaacaatctataaacaagttattagaactaataagaattagaaaaggtaaatacagttaatataaaaatcatatttctgtacacccagttagaaaacacaattgttagtaaacataccattataatagcaatcataaaggtcccaagraataaatctgacagctgtatcaaayatttgaggaaaaatgaacctttattaaaatcgttaaataatacttaaatatagataaatctgttattgaaaggaaggcaatgttataaaaattcagtcttcccaaattaatctataaattcccactcaaaataagtttgatcttgacagagtgattttttttttcttttttttttttaaagatggagtctcactctgtcacccaggctggagtgcagtggcacaatctcggctcactgcagtctctgcctccgaggttcaagtgattcttgtgcctcaatctcctgagcagctgggcttacaggtgcgtgccaccacacccaactaatttttgtatttttagtggggacagggtttcaccatgttggccaggctggtcttgaactcctgaccgcaagtgatgcgcctgccttggcctcccgattgacagggtgattataaagtttttatatgagaatatgaaaggtcaataatagccaagacatccctgaaggaaaaactaaaaagacttgtcctagcagatgttagtcatctagttcatgaaacgtctttacataaatgcatagcactggagcaaggctagacaattgcccgctggaacagaatcaaatttagaaacagattccattcagaagcagagccttgatgaagggccattgatggtcactatggaaggacagttaagttacttagttgtcttagagccatttagcatctatttaaaaatccctaactcatatcatgcgcaaataactctggatgcatgaaagacacatgtaataaaaactttaacatgtttagaaaaaaaatatatagtaagatctcttcatgaccttgggatagggaaggatcacttaaatgagatacagcactaattgtaaaactagaaagattcataaattcaactacattaattataactttgtccaaaggcaccaaaaagaaagtgaaaatacaggttacaaatagactttttttttttttttttgagacagtttcactctttttgcccaggctggagtgcaatggcacgatcttggctcactgcaacttctgcctcccaggttcaagtgattctcctgcgtcagcctcccttgtagctgggattacagtcacgcaccaccatgcctggctaattttgtatttttattagagatggggtttcaccatgttggctaggctggtcttgagctcctgacctcaggtgatccccctgcctcagcttcccaaagtgctgggattacaggtgtgagccactgtgcctggccccaatatatttttttgcaacacataatttgtatacaaaatacataaagaactacacattaatataagaacaaaccagctgagtgtgatggctcatgcctgtaatcacagcactttgggaggctgaggtgggtggatcgcttgagcttaggagttcaaaaccagcctggacaacatatagtaagaccccgtctcttaaaaaaaatacaaaaattagtgggatagtggtgtgcacctgtggtcccacctactcagggaggctgaggcaggagaatcacttgaacctgggaggcggaggttgcagtgagccaagatcgtgccactgcactccagtctgggtaacagagccagactctgtcgcaaagaaaaaaatcaaatagaaaaatgggaagagacttaatagacatctcagagaccaaatgggaaacacactaaagatgttcaacctcagtaattgaggaaatgcaaatgaagtctacaataccattctatagccactaaactagacactttaaagcccaataataccaaatactgttaaggatatagagtgatgaatggaaatgctagaccctactgataggaatatgagtggctgcaaccactttggaaaacaatttgacatcctggaaggttgaagtgtacataacccctgacccagattctactcctaggtcatcttgcatgcaaatgccctctccctcccctcactaccttacctgcttctgcccccagccccaggtaatcactaacctactttgcctctccggatttgcctagacatttcccataagtggaatcataacacatagcctcttgtgtctggcttcttaatgttttcaaggttcatccatgttgtagcatgtatcaataacatcgctgaataacattccgttggatagatatgccatacttagtcaccagttgagggacacttgggtttttactttgcagctattatgaatagagctactatggtcatttatgtacaagattttgtgtcaacatgtcatttcttttgggtatacagctaggaatggaattgctaggtcctacaataactccatgtttaactgctaagatttttttttttttttgagatggagtctcactctgtcgcccaggctggagtgcaatgatgcaatcttgcctcattacaacctccacctccagggttcaagcaattctcctgcctcagcctcccaagtagctgggactacaggtatgtgccaccatgcccggctaatttttgtatttttagtagagatggggtttcaccatgttggtcaggctggtctcgaactcctgacctcgtgatctacccgtctcggcctcccaaagtgctgggattacaggtgtgagccactgtgcctaagatattttcaagtggatgcaccatttttattcccaccagcggtatacgagggttccgatttctcccatccttgctgacacttcttatctatcattttggttagaaccagcctagtgagtgtgaagtagtatctcattgtagttctgagttgcatttccctaataactaatgatgaacatcttttaatgtgcttgttggtcatctgcatctttggagaatgttcatatcctctgtctgtttttcttcaattgggttctctcttctgagttgtaagagttctttatatattctagacacatgtccctcatcagatgttgcccttaaatatttcatcacttcctatgttttttgtttttcccactttttaataatgtcctttgaacactaacatcttaaatttggaagtccaactgaccaattttgtcactcctttttggtgtctatgacgcctttgcctaacccgaggtcatggagatttgctcctgtttccatgtaagtcttagtttcaggttttacatttaggtatatgacctatttggagtgaacccttgaacagggtgtaaggaaggggttcaacttcattcttcatgtaactagccagttgttccagcaccattctttcccctacactttttttactgtactaaacatctaaaaaaaaaaatccytaaaggacagatgtggtgagaaatttgtgcgtaatttcttttgttgagatggagtcttgtgcacctcagcctcccgagtagctaggattagaggtgagcaccaccatgctggctacgttttgtatttttagtagagacagggttttaccatgttggccaggctggtcttgaactcccaaactctagtgatctgcctgcctcagcctcccaaagtactgggattacagatgtgagccagcatgcttggccttgtatgcaatttttctagaggtttgactaccatgactagggaattgggaggtggtggaaaggcctgtggtcaagggctgggtctatcaagatggtgagcatgggagcacattcagatgctggaaccatgacctgctggaggagaggggtggatatagcggggagaaaggacacccagaatgtttggaaaaaggctgcacatggtgggagctgaggcatttccttggatctagtgggaaggaagaagacaggaatagacccaagtctgcaggaggatcttgatgtatggatgctggggactctgttacataaggagaggtgaggccaccagaggtagggagaaggggatggaaacaaaggagaagatgtgcctccgctgactggagagcaggagacacctggtagaggtgggggatgctagcgttctagggctgggtctggcggcaggtgtgacagcagggaaaggtggttgaggctacctccgaggggtgactgccatgggggctgtgaagcctatgtaggtgggagtgatctgaagtggggagggctggtgtaggatgatgctgggtctggggagtatctgcagagccgcgctacctcagtgtgcacaggtggaggcggtactgtggagggtggcccccaggaacaggctgcagtggtggtagctcctggtgctgaccaggtctggagggcggtgtgggctgtgaggctaacaggacctggtagaagagtcaccagttgaagtgtgggagtgaggatttggtcagggtcagctgagggaagaggctcctggtgaagccctcgctgcatgcgcaggaggaactgggatgggaggcagtgctgaggggctggggccagccagagaacatgggcttgaatgaggaagagtgcccacaaagaggtggggtacagttgtagtctggcatgacagtgaagaacaaggaagccccaacctacctcctggcacggtgcagggtttagatgtggccattaagtgcaggaacagttctaggggaggtcttgggttcggggcaagtggtagggtatggccataggcagaacaacctgggtgaagggtccggaaggtgggcgctttggtgctgggtcaggtgacttaagtgtcccagcagtctcgggtgtgaatggggcagtggtggaagcctgagtggactgacattctgatggtgacttcaggggccaggcagggaagagatgggatggcttcattgtcctggtctctggtagggtgggaatctgggtcttggatgcactaggccgtggcatgggtgggcaccactcctgtgagctgagccagctctgggtccgcacagctgggccacatgtcatcctacagttctgaggttccacctcctgtcttttctgttgcagggtcccatgcccacagcactggtaggagccccgctccggcctccctatctctgcagcggcttttggaggcactgtcggcggaatccaggagccccgaccccagtggttccagtgcgggaggccagcccgttcctgcagggcctggggagagcccacatgggtkggagtcccctgccctgaaaaagctcagtgcagaggcctcggcaaggcagcctcagaccctrgcttcctccccaagatcaaggcctggagcaggtgcccccggtgttgctcaggagcagtcctggctggccggagtgtccaccaagcccacagtcccatcttcagaagcaggaatccagccagtccctgtccagggaagcccagctctgccagggggctgtgtacctagaaatcatttcaaggggatgtccgaagattaagcctgtggcttctgtccccaagtagggagggcatcctctgcccagtggagctgggtcgtctacctcttggctcctttgggccacaccactgtcttccagccccaacctaccaccccatctcagagggccaggactcttcccctgtctctcttcactgtgttcccctaagggctcctagggccaggggttcttctagctctgccacaggggaaggcaggcctggctgtgcctgctcttgacttttgcccagccctggtggatgctgggaatgggaggtgacattctccagggacaggtcctggaaggggtggggaagaggtaggttccagccccgcagaaccctggaatccctcctgtgcctgaggccctgccccccagcatggactaatggtgtccctacctctccctcagggcagccctgtggctgggaccctgggaacagcctcccatcccacccaacatgcccaagtgtgggggaatgttctacagcagtgtagcctccagcccttctctccaggaggctttgagagcccaacttactcccctgcagagcaggaaggtggtaggtcaagtgtggccaccattggggagacgagaaagaagtggggccccaccagattgcacaatgggaacctcagctggcccctgaacagaggactcagttgtctccaccctacaccgctattccctggagctcagccaggcgcagccttggaaggagaaagggctggggttacctggcttgtcctcctccaggaaagcccccttcctcctctgccccagctcccagcctggcctcctccaggcaggccctactcctctgccccagctccggctttccccatgaggtttgtcccaggcatgaagaaagcatccagggtgccaatgagtgggcctaggccagaggcccctcagtccccaagggtactgttttggtggcctttcagagggtcaaggaagccctgcttggggtagaaggggcaggagccccacatgttgggggaggaaataaagtggagtgtgctgtgctgaccttcccacctcctgtgtgcctttaacaccccttgccctctggggccccaggtggctatcccacctcccagggaagacaaagacttcagcgagtgctccaggggtcctggccaagaagcagcagggcagggctgaagcttggagttcccaagttctggggagaggttgctgtttgccagccttctggagggtcacgtgctggggccgcattgaggacatggggatgcactcaggggacactgtgtcctctaccttcagtcggccttgggtttcagtcatgagtcatgaaccctgagactgaacagtggcccagtcccaggcattagcacaagggaaggactgcagggaggtgctgttcttcctcttgctcctggctgggggagtggggtctgcgtgagtgtagagtggataggggctctggccatgccccaaggagtaggggacagccccgctgggaggcttccaggcagagaccttgaggcagccctaggacagaggcagtacatgcagtgccccatttatcaaggacagtagagaggcttgcactcctctcggcctctgctgttgggtggaaggaggtgctgtgcttcgtacccagggaggaccctggggctcgggccacccgtcaccagcctccattgggatttgtctcttggtctccgatcttgttctcttgaagatgccacttgtctgagcctggtggcttaaggggagcacagggacaaggttcagtcgtttgagccccagcctgggtggtgggaggggtacagggccctggggtgtaaaccaagcccaggcggctagccatcccctcccaggggtctgtggcttgttcacctccccagtcaccgaccatgcagctgtgtaggctcaatttgttcactcatccaacataccaggtaggcagtctctgttctgctgggaatagcagtgagcaaggtgggttcctcttctcgtggagcttattcagggtggggagggttggacaataagtcagcaaaccagaaaacatctggcattggcaaatgatggcagagcagagcacccccttaggctgctggttaggaagggcccctctgaggatgtgacatttcagcctagccctaaatggcaggaggctgcctgtgaaaattcaggaactgaatttcctgaattcctgagtagccagtgcaaaggccctgaggcaggggaaagcaaggtgtgttgggtctgtgtaactggcatggggaggggcccacagccaagtcagagatggggagggttttattccacaagcaacaggcagcaactactggaaggtttgaaggaagatggtgccacatccgacttaaggtttaaaacgtcctcgatgcattctggagaatgggctggaagcagaacagccgggaagccactgaggttatgcaagggagagaggctacagagatggacaggagcaggtgcctttggagtgtttaggggtcacagtggccccacttgtgattgcatgcatggggtgagggcacaggctctgggtgggagctgcaccattcactgagaatccagcactgaggacctcggggcaaggcagggctgggggaaatgggtatgtcaggtctgaggtgtccatgcgacatcaaaggggtcagagagtaggtgggctgaaggagtctggggttcagcggggagagcagggcaggaggtgcctgggggagtgctgtcgaatctggaggggagccacacgtgtagaggaagaggaaggatccccggactgagctgggttgctgcatttagagcagcatttcttaatttcagcgttgcagcattttgtacctggtaattctttattgtgaaccttgcaggacatttggcagcatctttggcttctacccacagatgccaatagcggccccctccctgtattccagacattgccgaacgtcctttagaggaggagaatcactcttagcaagaacctctgacttaagagtttgggagaagaaagggctgcagaggagtggctttcaaggcggtcacagaccctgtgagtgttccaggggaagggctgctgtgccaagtgctgctgagaaagagggcagaataagcctggtgcttggtgatgtggagtagggcatgacccacagaagaccctcggtggagggtctgaagatgacctgccgggggttaaggagagaatgtgaggggtcagccacagtgcctggatacagacacggggggaaggtggctatgggaggcagcagaaaggtgatggggcttggggggcagttctaaggggtggggctggctttgtagagtaggggcagtgaccataagagggggataactgaagcgggggaaccctggggtgagatgagaggggttgggctctagggcataggttgaggacttgcccttcaatcagcagagagagtttgaggccagatgcaggtgggcggcgggggtgagttcctgcctggacttccgtttccccctaagtaccaggcagagtcacagcatggtggggcggaggagtggctgggaggttggagagggagggagggatgccgattttaacaagtgggaaagtgagcatactagggaagtttggagatttgtggtcatgaatttagagtgaggccagtcgatgcagagagtgttttgctccggaaagagcagctgcttggtcaaaggcaggcagtgggtggatgatttaggtttgaccagagctggggttttgtcaagatctttatgcagagaggacgactgacttctattatagaggacacgacccaaggatctgggaagtggggaggttggggcatacaggatggtctggggttaagagtcccagggactgaaaggctggtggggggcggggtacatctggagaaaggtggggtgtgtggcctgatgggggtctgtcccagtgggcccttaggggagggaaggcaccgttgtgagctgctggagccccagcccaggagatctggtggcaccatctcacctctcaggcctggagaagtgtctccatggcttccaactaaggtctcacagccagcaatgggacaacagtcttgcccttctttggaaaaggtggatcgcttccatggctaggtcctttccccatggcccctcttcccaaggacatccctccagggcaccctcatttgggctatctgtcttagaatgctcatgtgtatgagtgcactgttgcctgctgccactgtccctcacggccaatgaccttgtgccaggtactggggacagagaagggatgtccactctgatgggcagaggtgatgcaacaaacccatcagagagcatcttagtacagtgtgctgagtgtgaaagtggtgccgcctggcgtcgaggaacctggagaatggaggtcctccctctgcctgagagcctggtgactggtgagtgggccttgaaatgtgagtaggagcccaccaaacacagaaggaagggtgatagggcatctctatcagagcaaacagccccagggaaggtctagagagtggagacccagggcacattcagaatccaacactggcctggcggggcagggatggagggctgggatccaggttgtgccctgctgcccactcccctgctatgtgtctgggaaagctccggctgctcctgctgctggctgttgctggtctgggactgaactatgcccgttcctgtggaacaggatgacagtggaaggtcaggtctagtttgggaagagctgaaggaagccttgctatgctagtaggctccaattcctgcacctggcagcctcatggggctggttggagcaggcaaggcctgaaggtgtgtgtgtgcggggggagatggtgagccgccgagaggagcaggagctgagttatgttatggcctgcgtggccgtggagagctggcgcacccacgctgcacttgtccatcctggggtggagccaggaggagacagctgcagtagacggtgacagcctggggcagcggtatggatgccaaggcagctcctgctgcccggagggcacacatctcccaggtctgccagctgtagactctgtccctggctgtccccacctggcctagtgcctagctggcccaatgaaagatgcctagcaaggcttggcactcagtagacccaaagttgtcacttctaggaaggcccaggtaagcgtcctcagtggggacttgcagggtggggagggcacacgggcaacccagtctcagctcctgcagcatcccttgaaggaagatgggtcagaagacaaaggctgatgctggctgcagagtctggggagctgctcactggcccccagcccaagtgtggttggagacagtggaaaggcggttcctcccgatgcccatgtgggcctctagcaggcccagactgtgaaggccttgggagcccctggataggcaggcacctgcctaagtagctgctcccaggctctcatggccaccctctgtccttcctcagggaaagagctactggcatctctccatcactggttatgtatgcccaggcggcgcccaggccctgcccagcccagagggtgggaaagacacatccaggaaactgtgtctagcagagtggtcggttttgagctgaagcctagggttgggggtgggaaggaggctgattgccctgtccgaacccagccctggcagcatccaccccatgggctgtgggcacttgcacctcaccagaagctggggagtctggcagaatgacagggatggggggatcaaggaggcacctactcccaacacacccccgtggctgggggtgctggtctgggtacctgagacggggcacctcccacctgagcctggggaggcgctagacattgtccgtgggcactgagaggccacgtgctctgctcccatggagggagcagggaggagaggaggtccagcaggttggacggggcctgggggagccccactgtcagaggtggattggtgcttatttatacagaggatgcct

SEQ ID NO: 96287 - DNA, 41584 bp, Homo sapiens
ttatttgttcaaatcaactctttagagttttattgtgcctcagtttaccttttaaaaggaataaagaccctatgttagtgtaaagcaataattactattgcaatttggcctctgactcctgtacttaacttaaagttaacattcaaaatcaaaaagcctccacaagtaagagaaaaatagaaaaagatagcagggttccaatgcttaaaactcagaaacataaacatcctgattagcaaatgtacttatttaattaaatagtaactgtcaacattaaaaggcatacaataaaaaatgtccttgagtgagttaaagaagaaataactctgtacaaccaaggactttacaaagttttagaggaaaaaaataactttaataaggtttcccaactcttctatttcttacattgaggattattaatctaatgctaatgaccctcaaaaagcttaatctctagtgtaacccttactctaaaactccagaatcatataacaagctttctattggcatctccacttagtgtgctagaaatatgttccttaaataaaatttgtgcatacctgagctaatcatctcttcccaggctttccctaatcttgctcttccagagttttctttgaaagataaaaatctaccaaatttccaaagccagatacatgcatattatccttgttctgccatttcccatgtatcttatatcagatggataattctgttatttctagcttctaaacatctccatagtactatgttagtccaacttaagtaaagaaaacaacctagttatttaaacacaaagaattgaatgtctggaattggttaagtaggtattggaagactagaaagtaaaaagagaatattaaggtaacacagagatagaattgcaggaacagctaccaccccttggactgagggaacagagtgaggttggggttattagaacttaggagagaaaagggccttgaaattctgggccccaggccttgaggaggggccatttcttggtagctgctcatacctcagaatcgcaaggaaggaattgcatgaatttgggttcggggagagaaacaattagtgctgggcacctctgaaaggtataaataggctggttctgggaatgtggaaaataagctcgatcaattgctttttcttggatgaagagctattggtgggatgaggccgataggattgcaagcatatagaaatgagtagatctctttctccctctttagcgttgtaatctcacatggagtgctccttagaaaatagaccaggtttcaagaaagggtcatatatgcaaagcaatctccaaacaaggaaggagccaagaaaccaaataataaggcagacaaaatcagttttttgataaagggtaatttattgggggaacttacagacagaagtgtggcctgcagtagcaagacaaatagatctccacaccaatacaccccagaccccgggcttatatatcataaggaaaggggatacatgctctatagagacaattaaagacaaccccccagaacaggcaagagtgctgtgtgcatcataacctatatttgtgtgataacatcaagtttgctttggtctaaaggcaggatttacagtaagtatgtgttcttacactaaggacagtaaataaagtaggaatccgaaggcatttatgggactggggttaatgagaagtcaacatggtggattagcatccaagatgaagttaattttgtctccacataccagtaggaaaaaaaaaaagctagcttgcagaatgccagggtaggcattgaagaaccaaacatagaaaagtgtgttcaatgctaggagatagcttaataactcatagttggcaaagtctgttatttctacctcctaaactctagagtttatcctattctctctatccacactgctgctcttctgccccaggtaactattatcatgcagctgacctaatgcaataacctcctaactagttgctgtttcttttttcctgcctcagatccactctctgtacaacagccagagtgagctttattatataaataaaattctgattacaacactcctctactcaaatctctccaatgggagccaattttacagtaagtagctagtcagacatgagcagagtaggagagggctccccccacccaccaggaatgtcaggtgaacatcaggtgatagtaaggaggttgttaaccgtctctctaaaataatagttgagggccaggcgtggtggctcatgcttgcaattccagcactttaggaggtcgaggtgggcagatcacctcaggtcaggagtttgagaccagcctggccaacatggtgaaaccccgtctctactaaaaatacaaaaatacaggtggcaggtgtctgtaatcccagcgactctggaagctgaggcaggagaatcgcttgaacctgggaggtggaggttgtaatgagctgtgattgtaccactgcactccagcctgggcaacagagcaagactccatctcaaaaaaaaaaaaattatatatatatatatatatatatatatatatataaaataacaattggtcacagccagtgccagggaaaggcagtctcccaatagacagaaaaaacttgaaactggtgatcagcagcttcctgataagatctcaggagttgggcgagtgggttcaagcatgcacattaagaggcagaatggcagagtttaactggtatattaccttctagggacattcagctggtaagagaagagtgcttcaagtaagcatgcatacaactccagtaaacacactgtgcatgctcccctcccaaatcctggtgggccactgcacatgtggacagcccaccaaagggcagaatcaggggagaaggaatgcaggaccctggaagtatgccaacgtataaaaaccccgagtcaaaagtcaaactgcacacttgtctttcaagttgcccacttggtcctcttccaaatgtactttactttgtttattcctgctctaaagctttttaataaactgtcgctcctgctctaaaacttgccttggtctcttcttccatcctatggcccccagttgaattctttcttctgagaaggcaagaattgagtttgctgcaaacccacacagattcactgctggctggtgacatattttggtgccgtgtgactcagataacttccactgctaatgtcaatgttggacaatgttagataatgttgaaggattaagatatcagcgtaaaactgagtttctgtggactatacttctttgttatgctctactgaacccctcttggggggaagtctttgggatacaccttacaagagactcatctctcacagacagttggctgctggtcagtggaggttggctgcatttacagccaggatcaaaggatgccactaattttaagtccctagtgtttaattcagattaaacactaggtttatttcttgacagaagacatttgtcttcttgacagtgttatttcttgacagaagacatttacctgtgaaagctgttttctggaacttcttttctttacctgtctttgtaattataggctcaaaattgccagaggaagaaccctaaacacttaaaaatatatctgtttatccaacttcattctgacaatatgcctccgtattccaatttgacactatagtttacgaagtcctcttccttcacctttaattctccttttggcttagactagagtttctctacattagcactcttctgagctgggtaattctttgctctgagaggctgtcctgtgcactgtaggatgattagcagcttccctggcctctgctccccacattagagtaccatgctcccactcctagttgtgaccaccaaaaatgtctccagacattgccaaatgtctttagtttccaataaaacgacgttctccattaagcaacataattttttagtgtatgtatgtcccatatgacatttcagaaatttatctgaaattcaaatttaactgaacatcttatctttttcgttgctaaatctgcagtctatctgggggcgagataacccctggttgagacccaatggcctagagttaaatccaagtgttttacaaataacaatgagtcaactgcttttttcattggtttgttttttgagctaaccctacatcatttgcaattataatgagtactgttcctttagaaccagatgttgtcaagagatgcagaatctaataaaatgagttttgatcctgattgaaagttaaagaaacatttagagctcagtcagggaggaaagagcttgaagaagaaagctagcagcaaccttaggagagaagcaatgacagtgaagagttctgtccacacaaattagttgaaagaggttacaaaagaggctaccagaggttacaaaatattgcataacagagtgaagtacccaatggatataccattaatgtttttctaagtcaatgggaagacacttaaatgtcttaagagtctacagaaatacaaaatcaaaccaagccaaagaggaagtcagctgcaattttagtgggtattgcagacttccctctcctccaacggaagaattagctaattcttaaactccagagaggctggcctcgatgtcaactgcatagtgaaacataaaatctttgaaataattataaaaatagctcagtatatccaccagtggagtaagaagaatttccctgaatatttataagcacaggcctagtatcctggtcactagtttctggccactaaggagcctcaactgattgggaaaatcacatcaattggtttgagatggttgaactatttcttccatgatattattgagcaaataggcttgctgccccctgctcacagaagccaatatctggacactgggttttgaggaaagaaaaactttattgcaagacaggtcagcaaggagacaggaggtgggctcaaatctgcctccccagtttggaatctgagaaaatgtatggcttagagggtgagggaaaggatttaggaatgttggtttggcagggactgattgaagggcttcaaatttgaccactaaaggtaaggtatgttgaggcagatttcagccctggatcttttgggccaatgagcccctagcttctgaaagaggtcctgcatttaggttcccgtcatgtccttgtcttcttggttcccaggggagggatcatttgttctaggttctgttagaggcaaaaacatttttattgtgcatgcctgggctaaatgacttacagtttttggctctgttatatctacagagtaaattgacatttgttatcaacaaagtacggcccatttgggctggtcccatggttataatgggtgtgtggacggtcgagtgtttcaattctgggaaagtttgatgtgattgtattcagttcaaggaaaatgtgtgaatgatatcatatatagcatataaaatgtttacaatatttaagagattgggcatactagcatgtttgataaataaattgatgatgcaatttaaaatgcataacagagtatttgattttagacttatgatttttaaattgaatattataaagtaatttggctaaatgtgtgaatagtattggaatatttaaaacaacttaagatttattatgttagtaaatttattagtttacaaaactgcataaatagctggaaaagcgttacttgttaggctgagaattttgaagattatttttcaagttctttgccagacacgtgtggctctcacaagtaagtttgttggtctctagcctttctcaatggccactgaaaaccagattttgattacgaaatgtctgaaatacagtatcttggtttgaaccgtgagtccttcctgccaatgtaagaacttttcttcctcccttaactttgcttccttctttcctgcatgttaccactggcagagcaaatatgactcagaaaccggctcctcagggttgtaacattagatgatacaggcttgggtcgttacacatgacaccagtgcctttgtttcattgggctgggctctctggaaggtgtgctgctgcctgagctgctggaaaagcactgacaggtgtttgctagaaaagcactcctggagcttgccaccagcttggacttctagggactttcctctcagccaggaaggattttgatattcatcagaaatacctccagaagattcaaggagctgtagaggtgaagtaagcctgtgaaggaccagcatgggaatcctatactctgaggtacatcacctttctgaaagcagagttccaaagatgttaaaagttactcatgcttttcagatgcaattttctatccctgttaatatatttctgttttgtctgttcaactccctgggggagcattaagtcagaaaaaataaagtcctatgtgttattcttgttgatattcttaatagtttaagacaaagtattttgtaattctaaaatattagctagatctaagttgagatgaatataatacacatttcatagtatctggatgtttgcaaggataatttggacaaaatcgagtttgagttgtgcttttctcatgacaaacactcagagaaaaagagaaaattgtactcaattggattttctaaatatccaaaagattgactgcctcttttatggaaccacatgaccagagtaatgcctttcagcttggtatttgaagggagattcacctttagtaaatattagtaaagactatcactatgaagaagaggaataataacatattttgatgatttgattattttcttttcacatctgataaatactgaggtacttttacttgtattggaagtaacttattagaatcaaatggatttttaatgatgtttcaagaaagtacaagcaaggaatgtttagacaagagtacaagargtgtaatgatgtcattatacataatttactctctctctcctctgacacaattaactggttaatctgcatttcattgcagatgctcaggggaaccttcttggatagttttgatctagtattaaagacagtttatttgcagttatttctaatgccatgtgtgtatatatctctccgtgtgtgcaaatgcagtgtttgattggtttataactctaggtatgtcttgctcagtgattttagcctcatgaagggatcatatacatgaaaatgacaaaacatatagtgcttttaaatgctactctggtaactctcaaactttagactgcccaagtgtcagggagagaagtttgtttgaaatgcagtttcaagggactccaacccagagagtctgtttcactcagtctatggtaggatacaaaagtatactttttaaaaggagcatcccaggtggttctgacataggggtgatctgtttaccaccatcctgagaaagaaagactgccacaggccagtgctttcccgtttttaatgtctatacagatcttctgaaggtcttgtttaaatgcagattcttagtttgtagacctgggtgggacctaagattctgcattttggttgctttttcagattgcatgtgggaattatatgtgatttggaaaaaggaaaaaaaaaagcctagtctcatcctcaggtattctgatgtagaaagttggaagtaggacctttcatctatagttttaaagagtttgagactctttaaaattaaatagtaatctcttaaatatttaaacatagcctactcatttgtaatatatcatttgctctgtgtttcctaaggataaagattgtgagctactcattaaggacaagaaaaaagcctgctggatccctggtcctatgttgcctggaagaatctattcaaaaaaaaaaaaaaaacttcccccaatttgagtgcgggaagctcctctagattggggacatagggttatcatttttccttagagctttgcagtgctaatagttatgcaatatatatttttaagaaagaaggagagaatgagggaggatcccagagagctggtcctgaaatctgcactagaggataagcttagagctcagtgagagrccctaattttgaataagtaactccaactgcgtaagatggacttttaaacaaggctgattcatttaaacccttatcaaaggtatttgttcataatatttacaatagcaacaaacatgtatttagggcttcttatagattaggccctattttaagcactttatatatgtattaactcatttaatacagcaatcttgtaagagtcacttttagtatccttattttacaaatgaagaaactgaggaaaaggtagtcactggctcatagttacacagttgaaaagtgcttattggctggagattggtggctaggatgagtcctgtgtttactcattcaaagagattcttcttacatcactgctgaactactaaatttttctactacttgttatttcaacagatatgtcatgctccataagagaattggtcttaaccactctggtgttctgccactgttctaaccaggatggtgccctgttcccttagtggaaagaatgagtaaactaaatccaggtccaatgaggtacattctactgctaccttgcaacagagaactgttgcattgtgaagtagcacaaaaatcggaaagaagaaaaatgctgagaacttaaaagagttcaggaactaatacttaggagacttaaagaatcttttacagacttttggtctcttcagttgcagacacaggccccaaaaagcgtttcttgaaaatcatatcttaaatgatgtattcctttaaacattgggaagttctcattataaggctgtaagtaaaaggatgcacacacacccmcacacacacacacacacacatgcacatgcacacacacaaacttaaaattaatcctttggcaatggatatgtttttcagagaagctgatgttactacagaaaaaggaaatatagttcaaaaaacagaaagattgtcttgaaatatacaatgcctagggagagcaatttagatcaagcaagttttattggaaaagctggtacagttgaggaggagaagtcagggaatacaggaatagagatgtgactaattgaatggccattggactgaaagtcaagcaatcctatattttagacctgattgtgccaggaacttcaagggatttgagaggaagtcatttaacctctctgagtcacagttttaatattacaaaacaagagagctgaatgagatctggtttcacatttaacatcrtgtcattctgtgatatgagaaaggctaggcagagacaatggggaaaaaattgcattctcacaatcttcccagctctctccatctaccttgtttatgtatgaactcctagcaagattttggtattcaacaacataygcaagaagagcatcaggcgttttcatcccaactggttttctaattctttccttgtatattgaaagtaattttacaaattaaaatgttgtgctaagtcacaaaagttcagagagaaaatgataactttcacatatgaaaagacaccaggattgaaaatgtgtatacctttatttatttattcattcacccatccatttgtttaatcaaccatatttattgagtacatactatgtttcaggcatcttctagttcctggtgtatatatgtatatatatatgtatatatacwtatatmcatatatacatatatatatatacacgyatatatgttgggcatccctaatctgaaaatttgagtggaagtgctccaaaactccaaatttttgagcacaaacatgaaacaagtagaaaatttcctacttgacctcatgtgatgggtcacagtcaaaatgcaggtacacaatgcacagtttactcagaattaacaagagaaaaaagaatttcccagcccctttcggctgtgatatatctttttcttgaacacccagtttttcccatgaaagcaagtccacaaagggtaaaaaatggcacctgtgcaggatgaatgagcctatagcagatttgccactctgcctccatggggccaagatttgtgtgtatttctctgtgtgtgtctttttttgttttttggggtttttttttattttgtttttgttttgctttttctctactctgtgatgtaaatatactgttgaaaatatcaaaaaggtctgcagatacttatgggtaacagtgataagaaaaaaaaggaagcatttatgtatacttataacacagaaagtcaagcttttggataaattggacagtggtataggtataaaatgtctgatagaagagtatggtgttgaggccaggcgcagtggctcatgcctgtaattccagcactttgggaagctgaggcaggtggatcacctgaggttgggagtttgagaccagcctggccaacaaggtgaaaccctgtctctactaaaaacagaaaaattagctgggtgtggaggcatgtgcctgtaatcccagctacttgggaggctgaggcaggaaaattgcttgaacctgggaggcagaggttgtagtgagctgagatcacatcactgcactccagcctgggcaacagagtgagctccatctcaaaaaagtaacaataaaaaaagagtatggtgttgaaatgaccaccatatatgactcaaagaaatagaaggataaactgtttaagtcctatgctgaagttaatgaaaaatgtaaaaaaacattccacaaagctacaaatgaagatcccaattgtgtattgagaaagtggatccatcagtatcacaaagaacacatgccacttaatggtatgctgatcatgaaacaggaaaagatctatcacgatgaactgaaaatttaaaagaactgcgaatatgcgtagttctttggcataaatttaagaaaaaacatggcattaaattttcaaatatttgtagtgacgaaacatctgctgatcagaaagcagcagagaaatttattgatgagtttgccaagatcatcactgataaaaattctcacactagatcaagtctatagtgctgatgaaacatcactgttttggcattattgcttcagaaagacactgacttcagccgatgagacaggccttgtgggcaatcaggataccaaggacaggataattgcgctgggatgtgctaatgcagcaggcacacacaaatgtaaacctgctgtaataggcaaaagcttgaattctcactattttcaaagagtaaatttcttactagtccattatcatgctaacaaaaggcatgggtcaccagggacatcttttrtgattgttttcacaacattwtgtagcaatggctcatgctcactgcagggaagctggactggatgaaggctgcaagattttgttattccttgacaacttttatgcttattcttcagctaaaattctcatcaaaagtaatacttattccatgtgcttttccccaaatgtgactttattaatttagccatgtgagaatggtgtccttagatcaatcagtgtaaatataaaacattttcgtaaacagyatgttatcagcagtgaacataggtgtgggtgtttcgcataaaggatgttgtatatgctgttgccaatgcttgtaatgcagtaactaaagacagttgtgcatacctggcataacctctgtcctgcaactatgttcagtaagtattataaataaagtgactttgaatgattctgtatgtcaaatgagaaaaaaaaaagatgtctgaccatacatacgcaaaaaaaagtaccttcagagtccaccagtaagttggaagaagttgatattgaagaaatttttaacactgataatgaggctccagttgttcatttattaaccaatggtgaaatagctgaaatggttctgaatcaagatgattgtgataatagcaataatgacgatggtggttaacactgtaaagactttgtcaggggccagatcaggcaggtcttgtaggccaaggtgaaaaatttagattttatgcaaaacacaatggaaagcgggtaaaggatcttaagagaggaataatatgaccattagggtttaaaaaggccactctggtagcatgggagaataaatttgagagatgccagagggaaagctggatcttggaaggaagctgttacagtagtttatggagtgataatgatggttgcattagactaatgggtgaattttagataaatttttaactaaaagatttcctggtttgtaggttggcagtgaaggaaagtaagaaattaaagttgatactcagtattctgccttaggccagccagtggatggtggtgctgatgagatgggaacactcagagaggggcagaaggaaagacacatttcagggttctatttggacatggtactttagcgatatcsatgagacatctaggtggggatggaagatgaatacaggaaatgtacctttaaggagaggctcgggcaagagataataatttaggagttgtctgcatatacatggtatttaacgccaagagaagggatgagtttagacatggaaagaatgtagagatagcaaaggataccaggtcattgtaggaaggtatggtcttgccagagaaggaaggcaatattaaaggacaacctcctttgagcacccttggagcttgtaacactcaagaaacatacgcatttagtcaaacaggagattttctggggttgagggggaaacacatttttctttattcaacattgaaaacttagggagtttcaacttttgtatgtgaagtgagctgatcagcaccaaaagtggtgaggagaaaagtgagtttctcaagttttgtaagaggacaggacaagacaaaaacagcttgtgccccagaagttctccttgtctaagagcccacagcaggaatgtataattgttaagaagccagctaagaagccagctgttgagctcagaaagacaggttcaaagctcatctccactattatcaaggagaaagtgggagagaaaaaaatccccgaataaacttgttttctaaggggaaaaataagtcattttatttgtatatgccttctacaatataagcttttatttcatatatgtgtgcatatctattgaaataacaaataattttcagctagaaaaattgtggcttttttttaatcaactaaggaaatcccacttgtaattttaaaggaaaatctagattatctgagatgagataagaaggcataaaagggatcttttacttttaaccataaagattccttagattctaaacaataattactttaattaaaaatctgtaatgtttacttatgttatagaaacagctcttgatacatagctcccctaatcttaaagttattaagattagaaataccttttttggaaaactgaaaaagagatgagaatgggaggcgtttactatttggraacccataaagtactatttaatacaacaaaatggtttacatactaattaactgggaagtcttaacactaactttctaaactgaaggtagattttgtcaaaactctgctaacatttcccatcaaacataaaataaaattcaaagtcctaaccatggtctacgagacccaattttccttggtcccatttgcttcccaaatttcccgccactccccttgctcatgcagccatgctgaccttcctgctattcctagaacacatcaaatcgagctcttgtctcaaagggcttgacagttggattccctttgtctggaagtttcttcctcctgaaagttacctggctcattccttcacttaagacagatcatggatctctgcttgaatctcaccttcaagagatctaaaagagtggctttgtcattctttatgtattctcttactgtgctttactgaagtattataatttttaaaaatgtcgggtttgttagatgaaagtggatttgagagtcctatgtgttatgatttttatgattcccagtttgcaggttgccgaagagaaaggtataatgatagcttccctgacctaaatgtcggtttaataaacatgtgtctatcttgtagaaaataatatagtaggttatgtgagagttacaagaatgtaagaataaaacatttgttttctccaaagaatttactgcagtcataaggccagacacaaataattctcccaatgaaatcccttgtgggaaattcttgatgttagttgatttctaatttgccacaactcaactttcctgcctttaatggtcaaatttattttaattggactttatagtaataaccaaaaacttacttgttacactgaaataatacaactaatcctggaaccctaaagtccacacccttttttagctaattggtgccactaaagtaaacaattttgaaaaatgaaaaagatgctaattgccttgatgcaccatcagaccacatgaatcttcagaatcaagcaagcatttctgcaaaggcaacgttttctcccaacatgcttaagattaggcgtgatgaggatttgaaaggggattttagcactatggttttgtggctttaccaacagttgacctttggcaggtatcaagatcatattatgcttaaaacaaggtgggatgaggtctttcagcaacctcaggacttcccgtttctatatatgtgaatgagaatttcttccgccacagaatattcaagacacaaggaattggaggtaagagttgattttaggaaaaggaggtgaagtagatggcaggcaagagaagaagcttttatagagaagccttccttgagaaaagtaaatgaagatgaggtcaagaaacagtggcttcagagctgcacgctaatggaagtcagcccctacctgggaagtagtggtaatttctgggacataaaatcagaaagtcatcatacatttgaatgaaggaccagagaggaaaaaaataattgtcttcagtattagtatgatccaaaatggagtaaaaactatttgcaaatatattattgaaactgcaaatcacagtagacctataaaatttcctgtaagcaagaaytggcaagtaacaattcataacactatgtctattattaccacattacaatgtgtgaaatgttactgatatttttttcctgtcattatttttccaagtatgtgaaacatttatagttgtttttataggttcacttacatgctagycctctaatccaaattctttaactgaatttaaggggattttagtaattttgttaactctgcagatgctkgggaaggtktgtcgtataacatgatacagaatgtgatgaatgctattatgtacctcttgtgagtatctactgggttttcatcatctctgtatccctagagcctagcacagttctcttggaaagtattgagatctcaaagtctgttgaattgaattgaagaaaataatcaaggactataggcactcctggaacttttgtgggtagagtttattataaattagtgcatggagttgcataggagtggagagaggcttaatgggttaaaacactggttctggagttagatagaccagagtataaattctagttatgctactcactagctataaagagctctgagcctgttttctcatctgtaaagagggataatattatttttgttctaagattgctgtaagggttaaatgagatgctgctaaggtgcttagcattacagatggtatataaaaagagttcagtatatagtaggtattattactgtgaaactttttactgttattttttatttttcccaaaggagacttacatttagagatttagtgctaaaatacctgtttaggtccattaaatgtttagagacattggctgctgagagttcaaatcctgggcccttccccagccaaactgtcttctacgttaagaataagacagtgtagaaaagtcttgggatgtcaaaaggtaaaatgaggcacggttaagctcaaaagaatttatttgagcaaataccgattcaggaattggacagctgtggtttgcaggctttttggagggaatgcaaggagaaggcttttatagggtgaaaaagggagtaaagcacagaaaatatttgattggttgcagttatagagttgctttatttggtcgattctgctggaaagtctctatgtaagttaggcttctgattagttaacttggtttcatttttctttaatatagggatttataagaaatagctgaagttaagttttgsttatgtttgcaaattgagcaaggttaaggtcacttatgaggtctaaatggatttgtctggcccagagattcttcaagyctggtctccattataacttactttaacggaaatatatgccagttcctgttgctggtgtrttggagcaggctggagctggcttgagtcagcttgaactggtttgtgaaagccaattttgctcaactctgagttcgttgctctctcttttgtaggttgaaactagccaggtgggagtggttacaccaatgaaatggaagaagaccacaaaggttttctttctttctttttttttctcttactccctccttttgtagaactggatgttacctagttatgggcaccctactgccttctctcttctctgtgaatacctctgtggtggtctgaggtagtaggggaatatcagggcttctgatttgccattttctagcagccagaacccactcttcctccacccttactcctcgctggaggtgaaggatcttctgctttcccctggtcctcatgacctcagagtttctgatgtcctggagtcagaagtgtggcaatggggtttttttagcytcctggcaaggaacataacttcatgttctcaaacagacctttcaggataaagagtagaaaacatagatcaatatgtgccctgcttctatttccccttctgctatcgttcatgaggaactatgacttctctacacgttccagccagtggtgggaccttcctccatgttacacagagacggagtgggcctagaacagcctttaaaaaattattgcgacttttttatttgtctgaaagaagacatttcctaaggaatttataaaatacagtatgtgaagagtgagttatcagaaacaaaggcttgggattaattgtagaaatcaaattaaacccaataggtttttattatcattctccaaggtttcttaacttgaagagaaagaaaaacatcttccttccttttctgagaagacatttcgtgaatcacaaggctctttaccggaatcattttgctccaaaacctacaaatccttctcagaagttttcatggaacattttaagtgaggggagcttgtagcatggagatggctaataaacagtgaaccaattcctctgagccacaggcaaagttctacacagtctttccttagattgggaattacagaagctccattatactttagggaaaacaacactaaaaagtgggggtaatttgggggaagctttgcttttaaagacatccatagtggtacaagttgttcagatgtttctacactattaaaataayaacaaatattttttcagctgtgatatctattgtacttagagcagtgcaaaatattattaagtaatacatacagttaatcatcaacatgctgattattttagttaatcatcaacataccggatgcgtcatattctacccatggacgcttcttaaattttagtgcctgggcaagtaagatggaagtgaacagagtgaaaccttacctccaaattcttgactccttttaaagacaaacatgtgggaaggcaaaaggacacaaaaaatttttcctaatgttccattattccagagttttgaatgctccttagctaatgtgagtttaaaagctgcaatgttacattaaatttttacttccattatggggggcttgtttcttttacctttgcagagattctcaaccctcactgtgcatcagaatcaccagggaaatttaaagagcactaatgccccaatcctattcttacagattcttatttaactggtcaatagtggggcctgggtcgtgttttaaacattaagttggtgcaaacatgattgcaatatttagccaaggttgagaaccactgaggcgaaatattgtcctggtccttacatgatcgattaccttctaaacatcaacccctttcctagcctcacttcccagccagatcggatgaatccatgtgtcaaccaacaaatgacttttatccatgttctgggtgcttgaccttatggaagcctaacttcaggagggttacagtctagttaaggagactacatttaacccactagctcatttaaggccaatgagctgcttgaggttctgtatatttcctgctgcaggtaggaaagatgaaagagatttcttggagatgaaccatgagatgggccttgaagaatagatagcacaatttaaaagataaggatggcaagccagtagcccaaacatagaagtgaggaaattgacctgaccagagatgggagagcttgcagaacagcagtggtttatacacagttggcccactgaggggcactttaaaaaccaggtaaaagtcatagatacctcactttctaggaacttgggcacattacaccccatttcaataccaattagtgcaatttaaaaagataaaacaagattatgtgagagagagaaagttcctgggctgggaggctgagtggtcagggaagtcctctctgaggaggtgattcatgggctgatacttgatctggcctagcaggaagcccgccatataggtcacatgcaagtgtaaaggccagaagacagaaatgaacctggaatgccccagaaatcaccacaaagttgtgagcaaaagggagattgatagatgaggctgaagagaaaagttagtcagtgggccctatcaatcctgtgtcttagcttttcaggttgtccagagcacggctctagggagcgctgttcacaggttagcccatgggaactcatgcaccctgctggtaaatactccttctcttcaatctcctcctcgcctactagtctgttttcctctgtgccttcactgaaatctggcttttcctgggcattatgacaccttctcttatggtggctgctgattcagtctacttcttggtcaccgttgttttttgaccatggttcaatttcttacttgaaatctctgcttatggccctttctctacattctcccttctgtccactgtattccagggcccacttccacctccctggaacacaagttcccctttctttctgtcccccggggtcatcctcagtgacctcaacatccataagcttcattctcccttcttgacctgtgtttctactccaaatcagatacccaacaaggccacccttgacttctcatccctagacagagtttatctgtaacatctctctgataacttctaaactggttacttttctaatagaccacatgtacgaactgtgctctgatccttctctgtgtttctatttgcttgtctctctctttttgcaagttcatttgtctttatctggcttacatatgatgcccattaagactgaatttaatggtaaaccactctcctctcatttctcttgcctgacagacatgtttcctaatccttgctcttgscctcttcactttctgtactcttccctcatctaggtttgctgaagaaaatcacaaactcacatggcaggctcagtcaactctatcttcttactgtgtttctacaacctggttttcaaagccattttatatttttattcatttcatgtagacagttttaattacgatggtccaaaatcttccccatcatgctcaaaagtctcatctacccttgtctcaatcacatctcctgtcattaatccattcatctttttaaatgtcaatgctatttatttagttattggattagtctgttctcatgctgctaataaagatatacccaagactgggtaatttataaaggaagaagtttaattgactcacaattcctcatggctgagaaggcctcacaatctggcaaaaggcaaatgaggagcaaagtcaatcatggcagctggcaaaagagagcttgtgtaggggaactcccctgtataaaactatcagatctagtgagacttattcactatcatgagaacagcatgggaaagacccacccctatgattcaattacttcccactgggtccctcccatgacatgtgggaattataggagctacaattcaagatgagatttgggtggagacacagccaaaccatattagttatctagatgtatctatttatttatgacaaatatatagtagtataatgaatgaagatcaaacctctgactttctggcaaaaatttcagtcagtctaaacttctttccatccatgtagctctcttttctcccttgctttggccttagagccagaattttccttctatgtaggagactaatgtttccatcttaatgctctctatcctatcatctcttcactctctttgatcaattatctaccctctcataaccactcctgtccatcttcattggctccttatgctttaataattataagagtagctaacattaattgagggtttactgtgactcagatctgagctaagtgcttcatctgcacagttacatttaattctttctgaaacttataaagaaggcatgattatcaaaagcagaaggaaacttagcatgaagagtctaggtaacttgtccaaataacatagctgttaagtcrcagagttgagattggaacccagagagtttgtttccagagcctggatttgtaaccacttgatgacaccactttgcytacaaacgtgtggaacgttggctggacactgctacccccctctttgaagtctctagctttccctaacagctttttcactgccaaactgactacaattcctctccaattgcatcctctaattcttcatagacaatgtgctcaggcctctgtattcttccttcagccccatcactgtatgaaaattggcctctgcatggctgctaatgatcacattcartgatctttgtcttccttcttgaaactttcacttctttgcctttgagtcttaacgtttttctgtttcttctgcagactctctgatgacacttcttatctcttggtggatattgctgattctaggtcaggttggagaaggagtctggatgtataaccagtataaccagcaagtcagtgccacaagtggacagatcaatatcccgaatacagactgtagcttaaytttggacacaaatatcaaatgcgaagtcttgtagccagaagacattttgaaggctgatttttaagactaaagtgattggagatagaatgtacgcattctgcagtcattccccttgatttgactcttggccatgccagttgtgaactatgtcactttgggcaaggaaaacaatttcccttagtttcatctgtgcaaaacaggtatattaatactactttagagggttgttgtgaggattaatatagaataactgagctactcaataactgttagctcatcttataatttcttccttctcttatttactcactaagtacatattgaatgcctaccatgtgccaggcactatgttatgggggtacaatgatgaatcagtacagacaaaatgtagcctcatgtagtcacagtgcccttatatagcttacagtctagctggggagatggctgttaataacacacatacctttatttagatcaagggtgtggataagacagtggtaggagatgaagttgtaaaaacggcatatggaacacgtgagattgaaagaaktgtgtgcaatagtcttggtgagaatgatgaagatctgaagcagtactttagcagtgaggatggacagaagggttctgagactattaggggatagagttattataataatttcccaagtgtgtttcttctacacccagggtgcccccaaattacagagcttaaggggttaaaaggggtttatgatagcttttccagcaacccaaatggacaacctcttctctttttcatacctggcttgtgaaccagcactttctattggacttcccttctgcccgctgtcagtgcttttcttacgctgcgctgccccctagtggaaaccgcaagttcataacagcatggagtcttcagcgttagtgcgactctcacattaaattatagtcatgcaccacatgatgtcacgatcagcaatgaacagcatatacagcagtgttcctataagattataatggagctgccctatacaggtgtaccattttatcttttacgctatatttttactgtatatttttatatgttcacctatgtttagatgcacaaatacttacaattgtgttacaactgcctatagtattctgtacagtaacatgctgtataggtttttagcctagaagccacaggctataccatattagtaataggctctaccatctaggtttgtgtaagtaaactctgtgatgttcccacaatgacaaaatcacctaacaacacatttctcagaacgtatccctgttgtgaagtgaagtatgactgtacttgtgcatctcagccgagaaggaagacacttagcttcctggtaactctgtgtcttggatctaggaagcctaagaaagactaaagatagggttagtattttacataatattgctcaaatggggttgagaaagccctcaaaagcactgagtgactcttgcagaacaactccccatcttttcctcttcttctttttagttagctcttagtaaagactttgagaagcctaagcagagagctcctggaggtctatgttaccaggcaggtaacatagatgagtgaagagaaccagtgtaatgtgatggcgagtggtggggactgtggagaattggagtcactgccactaagcaccagttatttggtatcctacaggaatatgggcccagtgttagcaaaactttctcttttttttctttctttttttttctttttttgaggcagagtttcgctgtgtcgcccaggctggaatgaagtggcgcgatttcggctcactsccgaatcaagcgattctcctgtctcagcctccagagtagctgggattataggcaccagacaccatgccctgctaatttttttatttttgtatttttaatagggatggggtttctccatgttggccaggctgatctcgaactcctgacctcaggtgatccacccacctcggcctcccaaagtgctaggattacaggcgtaagccatcgcgcccagccaaaactttccatttttaaagagaagctggaaagccagattaatacatgaaatattctagttttttaaatgttgttaagttatttaaatatttgagaaaagagaaaaagagctctaaagccacttgtttccaagctattcatggtagaccaccaatttccaaatgcttgatgagtagtgctcactgctaatcactccattattaaattttcactagtttatggtaaaatcttttaaaaggacaataaaatgaatttttctataaagctaactaaatctacccaatataaagaactgctttccccctggtgattatattcttacatattttgttaaaatacccttcatttatctttgtatttgttaaaatatcttttatgaaataatagtattgttttaaatacatttaattgaaaaattaagagttggtgacttaacactgtcttgttgcatttagttttgttttacttatttttgaactccaaatgactgggcattgctgctaggacaatggcaagtcactgaaggttttatttaagcactattgtgttgacataaccctggactccagcagtgatgtggaagatttgttggttgagactagagtcccagaaataatcgaatatgaaaacccaagggaacttctgccttactccttcatttaatgactgaggacactgagatacagtagggaagtgaattgtccacagtcaccggggraggtagtaacagagccacaattacatcctgtttttctgacatgagacaagtgtttcaactgccccagtcctttctrcatcagccacacagtatgctgagacactgaagtgcccaactgttggaaagcttagtaaagggaagacttcaggataacagaataggtgatttgtgaaattgtgcatttctagtgaaacttaaagcccatgtatcatgttcatttcakttttaaggtacagaagtttgcctttaattgctgctgagttaattttctgttaggatgtttctttcatgagtaggcctttaggtttaagagtataacatagttcacttattgtgatatttggctatgttagaacctcagtttattagcaaatacacccacttgactttccccttgatacgtcccagtttccacaggtgcttatgtacctacccataccaaaaaatttttttcttgtcatttactctgtgtatgtgtgtctctgtcctatttccccacttgacagatacattttacatggataagataacatattttattctctggtacctgtgactggcacacagcagggatttgacttgattattaaagaatgacaattgcaataatgataactttcatacactaagcaccatccatatgccaggtattactctaaatgctttttaaaagacatcatctgaagattagtctaaaaatattcagtgtttgcctcccatgtgctgagtgctgtgttgaatgctggagaaatagcagtaaatmaaatggggtttacggcctgaacttcagtgccttccttctcagcactgcctcaaacctctcctgattcatgctagccctaaatacatgattgtacataattaagaaaagaattacagtatgtcagttgctgtgagggagagatactgaatgttgggagtaagaaaagacttcttggataaaatgaaaattaaattatgacatgaagggtgagctaggtgttattcagaagaaaggcaggtggtgtgttttatgcagagagagtattcagggcagaagcccagatggaaggtaccaaacatggtttggttcaaccaaactttgaagaacagaagtcgagaaaggctggagcagaggagggaaagaggacaagatcatgctacctgaagtcttgctattaaactcccatggtgccttgtgaagctctgtataatgctttttataaacagcatctaatcaagtgtagttaaccatataatttgtatattatttgcctaaaaaactgtcttttctgctctgttgagctccttgaatacagggtgctatgtaggtcttatttcatcactagtactgccctaaactcctccccatatgcttgttttctattttatctttagtaaagataaagataaagacattttatctttagtaaagataaagataaagacattttgtctttactaaagataaagatattttatctttagtaaagataaagataaaggtattttgtctttagtaaagataaagataaaggtattttgtctttagtaaagataaagataaaggtattttatctttagtaaagaaaatgaatgcttttcygacaggcccacctacctgtaagcactatacatagtttccttactgagttgaatttgtagtatttcatttatttattcatccatttgatggacataagtgtgtgccaagaaaacttaggaaaatgtaggaggttcctcatgggctaattcttgatctagacttaaagctaggcataactgagaccaaaaaatctcacctgmaaagcaatatrttacaattttaaaacattwaaattttaatgtattgggttatgacttttttttcgtttttgtggtttaattatgccagtatttcaaaacctgcttttgtttttcccgacccagcccatctgccaagcagcctatcagaatgactttggacaagtgtggcggtgggtgaaagaagacagcagctatgccaacgttcaagatggctttaatggagacacgcccctgatctgtgcttgcaggcgagggcatgtgagaatcgtttccttccttttaagaagaaatgctaatgtcaacctcaaaaaccaggtgaggtcatgacaygaatggagagtgtarttgttcatgataattcttttctctttgaatcrctagaagtggtgcatgtcattttttaaattgcttgcagctcctaatacgaacaattatcttagcctactttagaaagactgacacataccaaggacattttattaggctaaacagcaaaataaaacatagttcaatcagcaggcataatttgtgataaattatgtctttttacctctggttcacttatttggctggatagagcttctttcttttccttcttcctctcttcatcctcctctttcttcctctcccctctttctcattactaacacagaagcaatggcaaagatttcttggaaaagaaatgctgtttcattagttagatttttacctgctatattaatgtcctgatctccagaggatcctatagtgttcttgtagaatgaaagagtactattgagaaatttaccaaggacaaataagctcatgagccagaggttacttgaagtcacacaaaaaggtgtaaagaatatatttaaagatgcaatattagctactttggagccttcaggaccaagaaagagaagaatatgtgtgtattgctgtgaaaatccttgtggagccctttctgaacatctagcatttgcatcgtagtgaaggcaatatttaaattacactgaataaatattaagccatttttttgcaatcattatgactgtcctgtacccacttatatgcattcaaggcgagaaaacactggaaatccccccttgccccttctaagtcatttggagactagctcatcaggagtaacaatgtattatcagaaaattgatcattacyggacttttttatttatgcttactatttttggtttggttgcgattaaaagcaagtcatgcctgtgctgaatggaacagatatgcaacatcgtggactataataggatctctgtagatcactgctgtgaaaccagatatgtggagttgcagtgagtggtagtgccagaagacagatgtctgtgggttcctgcgctcttttaagaggtgcgctcgttaggaaactgagggaggagacgttagcccatgggcaaggctgaggagacacttttatctccgctttgcagaagaggagggcctcagccagcctgctgggattttctggtatcataaaaaccatgaaaaagactttagtggatacattagattaatagattttatcagtagaagtttttggtttgcattttccactttcaaatgtttctaatgttagcatttaatatttttattttctccaaatattaatatttgtacattaataatttgaacctgtgatttctcatgtctgaaatctgtttataaattatttccagaaacactaaacaaacaaacaccttaaaaacaaacaaacaaacaaaaagctctgctggagattcagaagcacaagcctatggattctattgatagcaaattaaattaaaacataaagatccttgtttttgtctgtcaaactgaccaagattaaaaaagaaaacaaatgttgatcagaaagtttaagttattattgtcttattagaacacaatttgatagcgcaatatgaaaagcattaatactttttatgccaggaattctatttttagaaatgtaggcaaaggacaaatttggaaatgttgacaaaaatttatgaatgagcaggttcaggcaatattatttataaaaatgaaaagtttaaaacttgaaacgggccatgtgcagtggctcatgtctggaatcccagcattttgggaggccaaggtggaaggatagtttgagaccaggagttcaagacctgcctaggcaacatagcaagacccccgcatctctacacaaaataataayaagtaaaaaattatccaggtgtggtggcacatgtttgtagtcccagctactttggaggctgaagttgaaggatcgcttgagaccaggaagtcaaggctgcagtgagctaggattgtgccactgcactcccgcctaggtggcaaagcaagatcctgtctcacagaaaaacaaaaacaaaaacaaaaccctcaaaaaccatgaaatgttcaaaaggcagggcttagctaaatacatcagagtagttccactcaatactaagccatgcagccattacaatcatatgtttaaaaatattgaattgcatggaaaaatgtacatattctaaatatacgtttctgaactgaaaaaagcaagatatgatattgcatatgcaatatcattctacatttcaaaattccacatttatgcatttaagaagactggaagaaaatacaacaaaatgtcaacagttaactctggaccatttaatataataatgggcaatttaaaattctatcgttatgttcctctctagtttctaaaatttttttacagaaaatataaatgccttcatattagaaaaacaaaaagtgttcttatttaggtacagtgcctygcataagtggaaactaacctcctttctttctcttgggctccctctcctcttactgatttgattggtattccaattaccaccttctgttttgccttatatttatttgtgcatatttctgtccatctttgattatgaggccctaagagttcacatctcccacaacccttggaagctgacatctattacctgataagtattcacatatttgaagaataaaattgagttatatgcattcttctagactatgcrcatgaaggaacatgaaaaacagccatgtggttaagagttttcctatgaacaaaccacaaaatggataatcgtacacatggtagatgattaagggataactatcaattttcatagtaaattcagtcctaagtttatatctcagtgtatctttttttccaaaaactaagtgggtataagaatctgtcttctgatgagctctgctgtgtacatttcacctttgttgactcccaggagcccttccctagcttttcctttacactggaccragttctctgttctgctccatggaaagccgcattcagtaatcagatgtatcccacaggaaaagatgycatgggtaccggaaaaacaaaaagcacaaactaaactttttgagatggccatctgaataaattttgaattgaaatgctttattagtaaagaatccttttcttaatttttagaaagagagaacctgcttgcattatgctgtgaagaaaaaatttaccttcattgattatctactaattatcctcttaatgcctgttctgcttattgggtatttcctcatggtgagtacaacacttgtagagcaaagggcaaatgtggagatcratggtgtgactcattgactcttgccaggccagtgagatgttgaaaagaaataaaaacaaaaaaagcctttggtttgtattctgtaattgacatgttcaacatacatccaatrctataaytgaagtacagcaagaagaaagctagcaaaaatagttaatcaatggtaacataatccatgcaatgttgatttagaaaaataatttaaccttaactaagacttttctgaagggagcaaaaaaattctgaatattaaaaaacaccccttctaatatttttttctcctttttttaaaagaggagtttgtgtttttggatttatctttctgacttactgatttttaagtactcctctggtggtgtgttgaaaaacagatcctaaaagtttgcatccagaagctgacacacacagaagatacttgttgagaatttaagcccattttcaccttgatgaatttcttcatgcttggatgaatcttggcagacagcaattttcttgaataaagaaagatgtagttggtatagagatgcagtcatatgaggagtagaagatgaagcttgagatggtttttggttttttttcccaatagggtaacagatctgcactgacttactcacttttatccatctagtttcctttgtgcccagttccacttctcagacatgactcaagagatgcataatttactttaattaaatgaccaagctccctccttgttgtagctcataaactgtgaatattggttacacctgttaacatcagccgcagaacaagtctgcccgtcaaaaatgttattatttcattgggtatttaaatgccacagaatttgaggaactataattaaacatgacaatgttgatttttatatttggatttataggagagagaaaagaactttaattcactaataaaaatataatctgctcatatcctcgaagaattctttaaaaattcattatgtatttagcacatrgcatttaaatacatgtattttgggggcagggagaatctgttatttatttacaaacatttttagagattctaaaggtaaaaattacaactgtgattagaaggctcattcagaatttattgacacacaactctgctttctaagatggttcaatgtttagaggctggaggactgggcaaaaatagtaatcgtaatgaatagctcaactctagtttcatgcacgtgcaatttattaatggggcctaaagttgtaaatttgtgatgaattaacaaataagtgacatgagaggaaatgataggggaggagagaggaaagcattgggttatttcagagaaaagtaggcagagaaaggcagtttaggaggtgacacaagagggaagcctaaggagagagaactggatggagcttcccaggtgatgacagggttgaactccagggctatacccagctgagcarggagagctttgcctcttcaggagactggaagttggggaagactccaacaggcttgtggtcagaagctcaggagactgggaaggaaaagtgaatttctgaggagtcctagttcatttcattaatttgttcaattctttaacgtatgtttattatggacctactatgtgccagacgctgtgctagctgttagggacacaatgatgaacaaaataggcatagttttttaccccatgagagttagagggtggtggggagagtcattaatcaaatggcacaaacacatgtaaaattaccataaagcgggtgatacagaaaggcgactggtgttaggatagctaaaaaagagggatttcacctggtcaggtgggtcagggaaagcttcttagagaaagagggacttgggctgatgaatgaaaggtgaatatgccaggcaaagaagagagggaggaggcttctaggcagaaggaacttcctgtgcaatgattctctgagaatgaaagattaacaaaggccaatgtaagtagaacagagtgagccaggaggcgcagagtgagagagaggccagggcagggccatacgtggagccaaaacatacggggctttgtaggtcatgctgaagagtttacttttgtcctcagagcaatgggaagtaattgcacagctttgagccaggaagggaaagacaggtactaggccccatcctcagtggaattaggtaggtttggggtgggacctgagaagtacatttctaaggttcttaggtgtcagtgccgctacttcaggaccacagtctgagaacctggctttaattaattgatattagagtgagtgagaagctgggggaaattttaggaagggtgcatgcatgcataggagtgttgggattaaaatgaagcctattgattaaatagtctcaggcataaattggagaaactatttgtaaataagcctttcttataattaccatttgtaataggtatcaaagacaaagcagaatgaggctcttgtacgaatgctacttgatgctggygtcgaagttaatgctacagattgtgtaagtttatacttttagccattttgaaaaaatattcaaaatggtatttgtaggtagcgtatttgtcatctgtacagttgctttattttcctagacaattttacatttagttttcttttattttctccttttttttcccactgacaggcaaccttgaggttatttatattctgctgaactcatgggaataatacctctattgattataaagcatttttaaaataattggctttaatgttgttgagacgttaaggaaaactaaggctccgataacaaaataccagccataatagttaagaagctggagtgagaatgcccatgagtaaactctgggcttgccactttttacttctatgagtttgagcaagttgtaaacttattttactttcagtgtcctcatcggtaaaatggggatatggataatacttatctcattgggcttgttcaygtaaagcacttagcacatgctcagaatgtagtaagtgctcattgaatggcaacagctgccactgcagccaaaatcccaacccactgatgagaggccccgtgtgcaaactacagataaataagacaaaggtcaaagaaaaatcccactgatggtaagagcagtgataacaacagtagcagcatccgctcacttcttcctgtttatgagcrtaaggtgttgttttcactttcacctctgtgctcttgcactcatctttctttctcaatgatcacagaaagacaaaagtttatttctatggtgttttgcttatggtgattgaataaaattttggattcccagttccttattgaaaaagtaggcaagtggaaatttgattccaaaatactaacattctatttgtgatgcctaacatattttacgtgtgtgcacatctgtgtgtattaccattgttttatgatagagaccatggccccattcctgtttctatcaattatttacatcatttcggttttgcctatgctggtatcatgtttaaatgcaggcagttgtgtgtgtgtgtgtgtgtgtgtgtgtgtgtgtgtgwgtgwgwgagagagagagagagagagcaaaagaaaataactttatgaaatttatattcccttttatttcaaatagaacttttggataaatttgtattgacagttactgtgcattaccatttctttagatagctttgaaatatattaagtaagagattattaaagatgaagttaaaagtttgttgaaggtttttcttggtcttttcatttaaattcaatagatttaatattcctgcctgtgaccaaaatttctctaggatattttctcagcaatttatgtgtatttctctctctagatagagatattgcattccttcagctaggcacagtgacactagcctgtagtcccagctacttggaaggctgagatgggaggatcccttgaactcaggagtttgagacacatgcaggtacacacacagacaccacttctaataccaaaattttttcaaaaactatctgagtattaaaatctactttctaggtaagacagtgttttgtatttttggataattagactctatttcacatgacaaaattcagagccagaacttccatttgtcatgccaccacttaataaaaataaataattgcaacatgatctcctataattttagaggtgtttctagggaatgggatccagagctaaacctgtcttgatagccaaaggtactatttcttcactcaccagcaccatggttgcttggctacttttccaaaggccaaattttggacactaatgccctagctataatttttttgacctgtagtgttttaaattagtaccaacagagtagatgcactagcttataacacataatataagctataacaaatcacgtttgggaaatgtctctgtagaactgcactgatcttgcaggtgtcctgcagcaagagcacccgacttcttcagtaggaatcatcaccaaaaccatagaggataatgtttatgtaaagggccatgtggagactctttaagggaaagatggtgacatgatcaaggtgatgatcaccgaggcatatagcatgcgacaaagaaactttggcacaattcagcatcagcttttttaagttgcattctttagaacagaaaatggaaaacaaaaaggcagagattgatggcttatatgacactaacatacatatacattgagacagagaagaaatttttttttttttttttttgagacggagtctcgctctgtcgcccaggctggagcgcagtggcgcaatctcggctcactgcaagctccgcctcccgggttcgagccattctcctgcctcagcctccggagtagctgcgactacaggcacccgccaccgcgcccggctaattttttgtatcttttagtagagacagggtttcaccgtgttagccaggacggtctcgatcctctgacctcgtgatccgcccgcctcggcctcccaaagtgctgggattacaggcgtgagccaccgcgcccggcgaaaaattttttaagtactagaaatagttgtctatcaatggtttgcagactatttttctgcttagttgtatactacaaagtgtgaaaaggatttgccaatgaagccacatgctatggtctgtggagggcccgacttatgagctgaagttttggccctttgtgtttcagtatggctgtaccgcattacattatgcctgtgaaatgaaaaaccmgtctcttatccctctgctcttggaagcccgtgcagaccccacaataaagaataaggtaagggagggtggaccgtggtctgaggttcctctagcagcagcatcttctaatctaggccttatgttgaagtaaattatttgcctctgacgtaaacaacagtaaaattaatcatcctcattaaggaatgaagttatcctattactattaggactgattgccttttaaagcccttgccaacacagagagtcaattggtctaagctaygtacgagatcttgggcactctattggaaataactgtatatttttcccccctcagcatggtgagagctcactggatattgcacggakatwaaaattttcccagattgaattaatgctaaggaaagcattgtaatccttgtgaccacaccgatggagatacagaaaaagttaacgactggattctatcttcattttagacttttggtctgtgggccatttaacctggatgccaccattttatggggataatgatgcttaccatggttaatgttttggaagagctttttatttatagcattgtttactcagtcaagttcaccatggccgtaatccttctaagggaaacactaaagttgttgtagtctccacttcagtcagaaactgatgtttcagctaggcacagtggtacatgcctgtaatcccagctacttgggaggctgaggtgggaggatcacttgaactcaggagtttgaaagcagccagggcaacacagcgagaccctgtctcaaaaaaaaaaaaaaaaaaaaaaaaaaaaaaaaaaaaaaaaaaaagccctggkgttccaaactcagtctttcctgaagaagaggatctgagttatcttctgaaacagcgttctcccttcccagttgtatcactcttataaaaagactgtccagtctatgtcatgccctaggagayaaactgttcctcccagccccctttgagtattgagcagaagaatcaaattattaaatacgtatgtttgtacagaatggtatttgtgtatgtgtgtgggcttagagattcacaagtaaatattcctttggtgaaggaatttcaataaaaacatctatcaagtgtcagcggtgagtgtgtttacaccacagaaattggcaaattgacaaatcagagtttgtttttgtttttttgttttttactttccataaagttcgtttaccagcataccactagagatttcggtttacaaataaaagccatcttggtttgagcaagactatgcaactatgaaaatgttcgtttaaaaaaatcttcatgatccttttgtaaatacaaggtggttgccaagcttgttagttttgtttattttattgatagatgtaaaatattattgtaacttatttggataaagttcttcaaaagaaacagagctatacaatgaggtaggatctggattatttgtctaagtgagagattgcgaatatcaaaatatctgtctcacttcttctgtgaatgacacagagtagaaataaattcactttaaaaatatgactgaattttgaaaatcaagactgaatctcacatagctgcagacaggaactaagccagcctctttgtatgtggtaacaagtacagtataagaatgaaagatttaccatccttgaaagctctaatgaaaatcaaatccagcaatatatattcaactgtgtacaggatttaagaaacttattttatgaaggaagtaatagtgtgtagatatagattctgaagtctttaaacgtgtcttaataaattaagattcactggcattgagctgagctaccaggtgacccttggggacaaaaaacccacacaagtgaatttcacacaccagtataccttcaacaatatacttttgacacacacaaacctttgatttggtttcagagattttgcaaaatagtaccaatgtaatttacaactgtcatctttgaaattgtgtaaaagtggaataattttctgaagaaataaatcatggtttgtcaatgagttgcagagactgtctgacattaactttgtcaagattaaaggataaagtatatgacaatttgtttcatcatgctcatgacattatgcaattttctccctagcttttaatttttggaggcagaaaattgagccagaaatttttagtcattaggtctcctagcaacaagctgtaaaccttccaacaagcttggactagaatctagacactgaaatgcacatacatgctttatgtaatgcagaatgcatttattggagaactcataaacatcctataaaattttcttccctgagatgcaactataaaacttggccttattctgagaatgcttaacatagatttcatccatactgtaacactgattttgttgttgttgtccttaaagcagctcagcttcctgaggtagtgttatgtctctgtggcaacaaggtgaaaatgtctagcttattttgtcaaagtcaacaataatccacagactccagacctcaatatctgtcccaatttgccattttactttagtgctccaaaaatatggcttatagaaaaaacaataggtgttttaaagagatttacctgaatgatatagagaatgtctagatattttctggctatcaggtaaaacctacccttcaagatggtagaatatataatagcatacaaaacctctatttacctaataagtactttaatttacagaaaaaaaatgtaaatgtaagtgtcggatttagtgccaagtgcagggaatctgaaaaatgtatactaggtctctgctctccgtaattctgccttcatgggtcctagccccatccctcaggaggttgtcctaagatcgtcagtgtcagatgcttcacaatacggcctcacaccgtccctgggaaaggttggtctcctcctgctgcatcagatggatgatttcattgtacatacggtgaggagcatccaaaccccagatgaaatccacgtgagcccattcaggaatattcttatggtagatgaggttggtcacctcagagagcagcattttcacgtcttctggatttgaaagccagtcctgacctcctgtccacattgctgtagggaccgtcatatctctgactctgtaccttacaggagttggctagagaaaaggaatagttcttaactctaggtaacatttggactttcaggctcataatttatgtttcaaatagacataataaacatgccatctgttgtggtgaagggtacatgggtgttagagccacacaactctgttaagaatttctgttcccgcccttactttaaggtaaaattacttaacattattgaacctcagtttcttcttctgtgactggggataatatctgtaataacttgctagatcaaatgacaaaacacataaaaacatgtaatgccttgtatttcttttttcttcctattaaatattttgtaaataaattgtttttaaaaataatgcccctgttcttttaaaagataatttcacaaacatttcatgaaagaagaattatattccacagagaaaagcaaggaatctgctgggaagggctctgcatcttcacagtctttatgtgatcccaggcagcctttgaggcagacccggcttgactgcatttgccagaaccatggcctatggcactcaggtaatttgagctaaagggaagtaaaagttaaatacctgctccaatccttattcctcacccttccccaccaaatataccaattagtattcctaatacctgggaactttccgtatttatgcagtgttagtagaattagcctagccggctgagcccttgagattaatcagcatccagaactttcctcagaagtggtaaggcccatttcttactcaggaaatccaccatggagtcttggctccaatcctagatgctctggtttctctttgtggctcagttatggcctaatttggataaggaaggttgaaaaattctatggggctagtaattttttttgtcatcttacaggtgaaaagattgaactgaatgtcatatctcgctctgagtttctgtgattctatgattttttttgtgtgtttgtttactcttcccttccactcccattttctggtgcctattctgcatgaatcaatttctctagaactcagtccattaaatgttgataaattaaagccatcttagggccgggcacagtggctcacgcctgtaatcccagcactttgggaggctgaggtaggtggatcacttgaggtcaggagtttgagaccagcctgaccaacatggtgaaaccccatccctaaaagtacaaaaaaaaaattagctgagcatggtggcgtgcacctgtagtcccagctactcgggaggctgaggcaagagaatggctcaaagctaggaggcagagttttcagtgagccgagactgcgccactgcactccagcctgggtgacagagcaagattctgtctcaaaagtaaataaatataattaaaaaaacatctttgaacagaaatactttctctaaagacatattttgggaaacagtgaagaaagacttcaagagaagcagctgataccagagattgagagttcgctatccaggggcactgcacagtttgtccagtttcctagcattttacatctagatagacatatggcagcggatgttaatttatgatgtgagggtctcaaagaaagactaagctgtgtctaatctgccccttccagtattgtttctatggtaaatatttatttacattcatacacatgattaccaaaaatcttcagaagattttatgttctaaagggcatacctgtgcaattctgaatctccacactttgatatctaattttagttcatagcattagctacatattttcttgggtaatgtaataacatttttaaaaaatgtaacttgcaaattacagattcatttaaagtataactagggagaatgcctatggattttctaagcccaaaatttttattttcaaggtaaagaaattgaagcctgaaaaattaaagcagcctccctcctattacagaagtttatagtgcagaggcaaaacttacacagcaatcctcacttgccatttaatgttccttttactgtgccatgaaacaaacttactgccaccatcccattttttttaattctaaaataatccttctagtatccaccatagactacactcttctcttgactaaatctacttcatcttgctcctgagaagcccagtaccttgtttagggagacagcctcagctaaaaaggcctcctactccattgtaaaagcagagaggtttcttggatcagctgtgaacttaaccattttcaaatggagtcaaacatgaaccattattttctgcttaaattttcatattttattcccatatctagaataaactgtcattataacgtccctgtcatacatttccaatgtatatattttcagcagatggtatttgattttcttacctgattgcatttttccagatttttggtctcactcccccagtcaaatgcccggagttcaccagaattcactgcctaaaaggagacaaaaatttacaaggaattccaacgtctcagtggataagcgtggtggggtggtggaaatgtgctacccagtgtgcactcatgagggaaggagagagcaatggttgagctgctcttccattcaatgttgggataagcgtctcaggaaaatggtaagacaagaatgaggccttttgagaagaaagagggactacataaattcttgatcattgcattagcaactccaggaagtgcatcttcattgtaattaatgtgagtgggtatcctccacaactgtgtgggctacaatggggaatcgtgccctggaattgtgcaatgtggtgatcctggaagatagcaaccaaaatttaattgaacttataattcttctctggttttgatggtacaattgctctctctctctctgtctctccctacctgtcaacagagagaactctctccttcccccatccctctctttcacacacaccacatagacacacagaggtgtgtgtttcctgtaattgcaggtaaagtttgcagtgtgaaggactcctgtgaatatctcttttgacagaccccacattagcatttttgtttctacttgactgtattgttggaggagctgaagagaagatgtagaaacataattatctccagccacatctttgaggtgtctagagacagagagaagtctcacttggatcatctaaattcatacttttaagatctaaagaagttcttaggctacttctgtcctttcttcccatttcttgagaagtttcagtgatctagatcaaattctccatcaaaatagcatcgacgatactgcatttcatcttagaataagtgtgaaataatccctggcttatctaaatggtgtcctttgactattctacacaaaatataacaggacatttagcaaagactgcaaattcaacattcttacctggctccagtgtagaatattttgcacagatgttccagcaagagtgtgggcagcatatacacttgctcggctctgtaacaaaccatgagtattctgggggacatagaaaaactcacaagatgtataccctgtcaagaccaaatctccagggtgtcagactaagaaatggtaacattattaagttatcagcaattatctatgaaacaaaaatatgtacatgcacgtaaataaaatgtcattaaatgtattgccagacaccggtatttttcatctgagaataggttctcatcagagatctggcccctaattaaaaaaaattttactagtgatatttaggatgagggctctagcattgggcctgtattcaaatcctagttctgcagtttaatttttaggtgaatttgagtgagtcacttaatctactaaatcttagtatactaatctgcaaagtggggatattaataacactcataggcttggtataggtaataaattagcctgatacataatatatacttttcatatccttactataaatcaaattattaatcttaaagaagaagaaaaaatattcagaattaaggaaatgttgccccagctgctgggagtgctgctggcaaacagccctccactctcagtct

SEQ ID NO: 96288 - DNA, 12790 bp, Homo sapiens
tggtgctcctgtaattccagctactcgggaggctgaggtaggaaaatcacttgaatccaggaggcggaggttgcagtgagctgagatcacaccattgcactccagccagggcaacaagagcaaaactctgtccaaaaaaaaaaaagtgaagaaaaggaacagaaatgtgtatgtcagaaaatacaccactaattctccttggcgggagagtatgagtaaagtagcagggttgtgtgaactatgcatgactaggtgggacagctgggagcctcttctgtagcacagagtgggtctcttagtgaacatgcaggagaacattgcaaatgggtcacaaacaggttggggagagattctgggaagccaaggttcacatgtaaaccatggtgtcaatgtctccagtgaaggaggttatggttctagaaatgcgcaatgcatgacctgtgttatcacatgtacctctaggacagattgcctttattatttatatgytttaatktcagcaggcaagtcagggactctgcttggaagaggcttaaatagaaaaatcctcctacattaaggaatgcatataagaatatattcagataagtagagtcaataaaacaatattatcttttctctctagaattggttccagaataaaagagccagacttccacctgcagaaagacgcagaatatttgttcttcagaaaaagcatgattttccagtccaagcccattcatttttaagctgccaggagacccaggctgcagctcacaactatgccaccaagcagagcctctctggtgcccagagggctctgatgagaagagctggttgctcccatctggagaaacagtggattcccagtcaagaaatgggctataattgtttctctttggagaaccaagagactcccagtcaacaggtgggcccccagtgctcttatctggagaaaccagggattcccagtcaacaggtgggttcccagtgctcctatctggagaaactagggattcccagtcaacaggtggcctcccagagttcctatctggtcacaggcactgaaaagcatccaggctgtgctatggggtatggaggtgacacaggaagtgggcattctggaagtgggcattctactgcctatcattttctcagctacaactctgcagaatgccttcatcctcccccatcttctgtgccatattttcatggagaaaggactgaaaccaaggaaagccagcatgcaagtcctttccttttggattacgctcaaggtgcatatggggtgaagaaagaccattgtctttgctcattctgtctctcactgctgggacaacagcagcagaatgattggcagtatcacctgcagcagcaccaacagcctcagaattacttagaggggatgatgttgcaggaacagctcccaatggactcgggtccttgggatctagggaagcagtggtcctcggctcagtcacagctgcagagtcaactgcctcagaataatggaaagccgttgtgctctcaactgcagcacatgtctctccaaatagctgccgactcacccctgctgcctctggggcaagatatgcaggaaagggcttcagagcaacccaggacccaaatgcagcaactttaagttgaagagtggacaagggtctgcagcagggaaccaaggatgcaactctgcaaagtagtgctaagtgtcagagaaacacagtcgcaggtcaggcccacagtcacccacacagtagcacaaggcagagcccttaccagaagcctccacattaagaaaagaaagaaagaaagaaagaaaaaagccaggtgacattgtttgagcccaggagttcaagaaaagcctgggcaacatggtgagtccctgtctctataaaaaaactttttaaaaaattagctgggcatgatggtgtgctcctgtggtcccagctactcaggaggctgaggtgggaggatcacttgagcccagcagtttgagaccagccagggcaatattggaagatcccatctctacagaaaaataaaaaaaaataaaaaatttagccaggcatagtggcttgtgcctatggtcccagctacttcagaggctgaagtgaaaggatcacttgaacctcagaggtggaggctgcagtgagccgtgatcattccactacactccagccggggtgacagagtaagaccctgtctatgaaaaattaaaaagaagaagaaaaataagactgtctacaggaaggctccatgagctcttggtcccttctcatacagaagcggtgtccacatgtgttacagctcctgagctcctgaccatatagtttacagtggccttgaaaagactgactccatagaatatggattgaaaaaccaacgagcacaaagattgcaggagcactgctcaaatcacatcatgcaaagtctaatgacattttgccttcagaagaaggaggctcttgcccagcccttcaggcattgttcccctgagaggcaatatagccaacaagaacagagtaaccacaaagccccacagcagtgacaattggatgggggattctaaaggctactcttgcaaaactctctcctccatggaccagagcagtatctgcaggttgtgaagcgtggcctaccaggacccagctgtatctcctcagcagccagccccaccgaagaagctctgcctgtgaagggtgctgcagcaacatcagcctggcctttgcacatctcaaagtcagcccagtataaaggcaggagcttttaattgaaaggcatttaaagacacagtacataaagccaggcacaatggctcacacctgtaatcttagcactttgggaagccagggcaggaagatctctctgagcccagggattcaagaccagcctgggtaccatggcaagatcttgtctctagaaaaaggaagaaaaaaaaaaccatgcaagaggacctgaaaatcctcaggaagatgctgtgctgaagcagcccccaccagccctcttagctgacagctgctgcccaggaatccagagtgttgtgaccaagtcatctagggatgtgatgccaaggccaacaaacatctgaaatacccaggtgagtctctgaatgccaggtgctgacctgatttttttttagaaaagatcaagtgtctttgaacctctaggtctttttaatagttttgagctttgacatgtagaattatttctcaaagattccagagttttgtcaaataaagcatatattgtaatattaattaggcaacttgctttaaaagctgaaatttcccaccaattctctctctatttgatgtgtcctacatagaaattcttccaagtgttccaaagaatatacagctatagaaacacagtatatcaagttgactgatgaagaatcaaaataaagtataaagtaataagctagcacagttaataagaatgaactagatctatagatacatgtgagatttatgaggcacaatgtttcattcttttttccagagcaggagtggatatttatttaaaagggctttagaacaggaaagaaaggaaagtaagtttggaagaaacctaagttgggacatgaaggtcaagtgtggtctttaaccttgatcttaggactttataggctgaccccttttccatgattcttctcttagggcagtctgtccacatgtgcagtgccttccttctgcttgaaaaataagcacacaaagtgtgtttaggaagttgtatatgtaccaatctgaggtttttcttcccctttctggtggagtgtccccaggacatattccactgttttgtctcttgatgcacatgccctggaagttgctcctccctggcatctgcattcaattaacactttagtgtaacaggtatggaccatcagaaaatggcctctccctggccctggcagccagtttatcacctttacagaggcgatgtgatacttgctgaaccatcacctgactttcctagggggtgggggagagccctctcctgcctggctcatgcctgtctaactacctgtaaaattttccccctcaagagcccaagacctcagatctttgaaggaaattagacaaagttcagtcttctgtaactgcttcccactgacaaaggggctgtggtggttctgcaggtcttggcctcttgctagctgtcagggcagcagggtgactccatgggttggtgaaagtggtatctagcaaggtctaagggagacaggggcaggagtttgccttcctgtcccactgatgggcagtctaggggtcccatgtagaggggtgcctcttgaatattgagaggacagtatcccacactgatctgaagcttgatggcctgaaggcaacaggagacaaatcatgttactagatttagaagacatggaccaaagtaaaataagggaatgaggacagctccaaaaaattgaggctgccaacacacccaggtaactggtggccatggtcctgcctgctaagacttgggctgccaacttatttcagtgtgcccagaactcgaatattggtgcagatttctaaataacccatctcctttgtttcttctgacctgcagcgagggatcgctggttggttcacagaaataagcagggttaggctaaaatgcagacaaaaacttaaaaacaactaatgacgttagaatgtaatagtaggtgtaccataaattgtgaaacataggttttctctttacaatcctcctttttattaaaatcaggataggaatgatttgtttgcaaaataaactttagtcttattatatttggcctgattgtttgcataaagtgcagcaaggataattatttttacataggcttttaaaattggcttcgatggaactccgttccataagaaatctcagataagacattttaaaagccaagcacagccatgggtttgtaccctcaaatacctgtgaggagggtagatttctctcctctgaggtctctagaaaacttggggcacctgggcctgttagacagtgacattctttactcaccacaggttaggtccctgtacagggactgtgtagacaagttatgaggcctgactccccaagggacttgtattggcactataagtcaagcttgattccttaaaggaaagcatgccattccagtcaaagccctggtaaaacagccagtttctcccatggtgtactgttgcaaaagaaaacattctaattgcacttatgccaataactatattgccacgcattaagaatactcacaaatagtttccaaattctggagaaatcaggtaaagagaaacaaatatgtgaaatttttgttcacaggagtatactgaattgtgaaaagctgtagtaaatagctcaaaagaaaagttttcttggctctgaaaaacaaagattttgcaaaaagtcaaaaagattacttcactcttctattagttcagtccattcagttaactctcattctgcttgatattcatgaacatttacactgtaatatatgtatccgcttggctatctgcttttaattaagctgacttttaaccatagcgctcttaaaaaaatgctcttacatctcttattaccctactttatccaggccaaacgaacaatatttctggcctttgaacattatcaaaagtaacctcacaggtgaaaccaataagtcttaactaaggttatgacttaaccatgagcatatgaggtatttttaaagaggtggtaaggagtttttaaaacatttaaagtctccagaggtagctcagagaaaggaaaattcaagaagggaagtcagaagtcattcatggaggggcagagaatacggtgatttttaccattcctacaactggtttgcatagagagagagaggcctgaagtctgactggtaaaaatttttatgcttttgccggcatgccaggcttctgggttccctttccctgatgagccctagtgaccctggagtcctgtgaagggggcgcagataaagaggttatctgcatactgcagaagttatctcccctctcacagggatgctaagattgctgcctggaccttcactgaccatgctgtcctgggtggtactttttgctgccaccacagtggccctctctctgaagaatgcagccttcctaggtccaggggtattgcaggcaacaaggacatttcacacagtgcagccacaccttgcccttctaccacctcttcctgaatacggaggaaaagttcatcctggactgatccctgaggaattcttcctgtttctttatcctaaagctggtgtaacaggactctatgtgctcggaattgggcttattttgtatgctttatccaaagaaatatatgtgattaccacagagaccttctctaccatatcagtagtagggttacttgtctatgcaattaaaaaatatggtgcctctcttgcagaatttgctgataaactcaatgagcaaaaacttgtccaactagaagaggcgaagcaggcttccatcaaacaaatccaggatgcaactgatttggagaagtcacagcaggtactgccattactttttgatgtgcagaggaaaaacattcctatggcttcagagtttacttaccaggaacagctgtatagagtacataaggaagtaaagaattgcctagactatcatatatccgtgcagaacatgatgcatcaaaaggaacaagagcacattataaattgggtggagaagcatgtggttcagagcatctctgcacagtaggaaaaaggagacaattcccaagtgcattacagacctaaagctgctggcaaagaaggctcaagcacagccagttatgtaaaggtatctatcccaattgagacagctagaaacagttgactgactaaatggaaggtagtctatgtgacaaaatatttctgtattggtgtctactgaagttatagtttacctctcctaaaaatgaaaagtttatttcatacagtgagagaattaatatatcagccagttagatgtttctcatccttcttactctgcatttgagttgttccctgatcacttctgaataagcagtttgcctttattaaaacttgctgcctgactaaagattaccaggttatagtttaaatttgtaattcaaccatcttgcaataaagcgacaattgaatgaaaaaaaaaagaagttatcccccctgaagagactgctcagttagattttttttgctagggcttttctgaataagtgtgggatatttctaaacctctgaggtaagactatctaggttgaagctattagttaatgatttaggtagcttttctgggagaaatagggctattagaaagatgtattcagaggacaggtaaatattaagtgagcactgatcttggagattatatgtttgccccaaagaggtatgaggtatttagacattaccaaggaccagtgggagaatggtaattggtcccttaagtaataaaaaggggtgttaatcttttatttgaggggaagggatgccatttgccctacccaacaggcttagccctgttcttcctcttctgctctcagttatgaaagactgaagaggctaatctgaggacttcctgcacaggggcactgggttccaaggctgacttttgtaattttctcctagttcatttataagccaaacagtttaaggtttggggaaattaaacttttcccacttttaggggatgcatccaaggggcgtgtcctgtggtatgaagacataactacccatctgggaagagagaacagaggaggaagaaaggaaaaagaaaacagaaggcatcccccctttcttctgttatcctgaagggggtgtttcccatcatcctgggttccggacttaaccagtctttaccatctacccttagtaaccatctcatcacaattacccacttgagaacagtgggcccttgtccatccctgggattctggaattaactagtccttaccagagacacaatgtttaattttaaagcaagttgcctaattaatgtatggtacaataattatcaaaatgaaacaaagtaaagcttgctattaattattcttgaatacacataaatatatgcatacacacatagtaaaaatatttctaaaaatatagttagatattgtgttgatattctttaaattactgaaagttgaatttggacaagataagaaagaatagcttttctcctctgttatgaaactgagaaataaaaataaaattttaagagcccaacctactgaacagaccacgtcttaaccaaggggacctaagagttaacctagaaaactgagttctcggccatgacaggatgggaagtcagacacagctcgttaatacctgctctttcactgaccatcattaagctttcttctgtaagagctaaacagaaaccagccctttcaaaagattccgccattgtgtcaactgcttgactgctctcccttcttttagcagtttcaacataacaactgatgagcttttcttcctgatgagagaccaccaaccatggaatgattctggccagtctatgacgaatgcccagtgagggtttttgtgtctctacttcacctttggatgtcaaagagcacaacactccaccctgggatcacgctgatgccgccgttttttgaacgtgggtcctacggagaggcatgaagctcaattgcatatatatttgtttctcttcataaatatgcattattttttctatagctcattgaatatgtatatctggccatcccattcagcataaattcctgtcttattctttggacccttgaagtgtctattcctagtttctggctggggagctatgcttcccagcttgtcagaacggccaccctgcaggctataatcctttatgaaaaacaaagctctcctttccatatttatgaaccttattcttcagttgacaaaacatagcatatatcaacagaaatttgaaaaaaacagtcaatctgtggattcactggattttgtatgcacacaatcacaccatctgccaataaaagtattcttatttatttccaatacttctactttgattttcttcctaactatttggctgagaactgcagtaaaatactaaattggggtagaaacaacatcattgccacatctccaagcttcacattaggtatatctccaaatatgtattaccaaataggggcttaaggggttcccttttatttctattgttctcagcttcttccctcaaaaatccaaagtctctctgaatttttaagtttttaaatgttttcatctgttgtgatgatggtattatttttcttccataatctgttcatgtgattattttaaaacattgtgattttagaaaaatccaactagcttatgacataccctttttatgtatttctagattagaggtgccagtagtttaagattttggtatctatgttcatgactgatattggcttcatttattcctttattaaatgcttgaaatttaaagtgactctgcctggctctgacattattttcatggaaacattgttaactactgattctgtactttaaacaattagaagacaaccgtttatctttagatcagttttgggaagttgaaattttctaagaatatatccatttcatctaaatcttcaaatgtattatcaaatcactccaacatcctcttaactttttcattcctagggcatatgtagcagcgtactgtttgtaatgtttcatatttggactttctatgtctgttcttgattgtttgccagatatttgttctctcaaacaaccaatgtctgcaggaaagaccatagtgacctcaaggctccttgtgggcatgactttctggggcagtgggggctgctgagggccagggggcctgtctgtttagggtcctgggcctctcccaggtggctcaggtgtcccagcttctgtcagtcctctgagcccgagctaagccatcatatcccctgtgacctgcaagtatacctccagatggcctggagcaactgaagatccacaaaagaagtgaaaataaccttaactgatgatattccacccttgtgatttgtttctgccccaccctaactgatcaatgtactttgtaatctctcccacccttaagaaggttctttgtaatctcccccatccttaagaaggttctttgtaattctccccacccttgagaatgtacttggtgagatccaccccctgcccacaaaacattgctcctaactccaccacctatcccaaaacctataagaactaatgataatcccaccaccctttgctgactctctttttggactcagcctgcctgcacccaggtgaaataaacagccttgttgctcacacaaagcctgtttggtggtctcttcacacggatgtgcgtgacagctcccgccagcaggtgcccacatcccctagccactgagggcctctgtgaaaaggcgtctgcacgtttcagggaggccctgacactgcacaaaggattcctgaggccctgggactcaggctaagcaaggacttagttaagagcgagtcatgtcgcaggcttgcgtgcagcaagatcccagtttcctccacaaagacaatcgctcacaggaaggcccagaggccccaaaaagccccttttacttgtgtcctcctcagacttctagtgcctaaaaacccagggaggggaagcctcaaggttgaggtcccggatccaacaaggcatgttccagtcctggtcacgtggacactaaagccttaggagacagaaatagggactcaagctcaggggtcaaaatcaggatttaacccttggagggctgtcatggcctgaattctgcccaatcccccattcatacgattcatatgttgaagtccaaacccctagtaccttcaaatgtgagggtgtttggagatagggccttcaaagaggtaattaaggtaaaattgtaataaccagttgggtttatcttgcctgctgcccagaaagccagatgccctgagaacaacaggtattacagcaaagaaagaggttaatcatcacagggccagccaggtgagaacaaggagaaacttctcaaacccatctccctgataattccgaggccagggctttttaggatattttggccggcagggtgctgagaaacaattgatgaaatcacaggggtgtgtaaaactgtctttatgcagctgagttagtttctgggagggcggtctcacagaccaggaggggcttttgatctgctaaagtgccaaatctgaaaaatatctcacacactcattctttgagttttacatttgcaatgctatttataggggtagctggggaagttataaattttgtaacccctggctacgtgactccagagcactcaacacttatagaaaaacaagctgattgatggcaggttattggttaactatgcctattttttagaaaattaggccgggcgtggtggctcaygcctgtaatcccagcactttgggaggctaaggcaggcggatcacgaggtcaggatattgagaccatcctggcaaacatggtgaaaccctgtctctaataaaaatacaaaaaaattagccaggcatggtggygagcacctgtagtcccagctactcaggaggctgagccaggagaatggcgtgaacccaggaggcagcagagcttgcagtgagcggagatcacgccactgcactccagcctgggcgacagagcaagactccgtctcaaaaaaaaaagaaaagaaaagaaaagaaaagtttaagtccctgccataattttaaccttgtcttatgaatgttgctttaacctccgaattggcgggggcaagaagtggaagggctcagtttttcttgcctcatgtttaattataaactaaatatttttcatggttatctatgagaactctgtgttagaaaaaggaaaaaaaaaaaggatgrgggggggggcctgtcaggttagaagcaagttgaagtctgtcatattagattattcttattatcattctgcaaaaggctgggcacagtggctcagtcctttaatccctgtaccttggcctggccaaaaccacttttaaacactcaaactatacagcaaaaaatcattaataaaaatgttgaccaggctgggcatggtggttcacacctgtaatcccaacactttgggaggccgaagcagatgtatcatctgaggccaggagttcgagaccagcttggccatcatggtgaaaccccgtctctactgaaaatacaaaaattagcctggtgtggtggcacaagtctgtaatcccaactactcggaaggctgaggctggaaagtcgcttgaacctggcagatggagattgcagtgggcagagactgagtcactgcactccagcctgagtcacagagccatacttcatctcaaaaaaaaaaaaaagaaaatgttggccagaaatagtggctaatgcctataatcccagcactttcagaggccaaggcagggggatcactttagccctggagtttgaggctccagtgacagagccagtccctgtctctaaaaaaagaaaaataatgctatattagaaactattcatttaatgcaaaagaaagcagtaaatgtcaggcctctgagcccaagctaagccatcatatcccctgtgacctgcacgtatacatccagatggccagaagcaactgaagatccacaaaacaagtgaaaatagccttaactgatgacattccaccattgtgattcgtttctgtcccaccctaactgatcaatgtactttgtaatctcccccatccttaagaaggttctttgtaattctccccacccttgagaatgtactttgtgagatccaccc

SEQ ID NO: 96289 - DNA, 13018 bp, Homo sapiens
atgtttgaactttttgtttgagacagaatctcactctgtccagattcaagcgattctcctgcctcagcctccctagcagctgggattacaggcacatgccaccacacccagctaattttttgtatttctagtagagacagggcattaccatgttgttcaggctggtgtcgaactcctgacctcaaaggatccgcctccctgggcctcccaaagtgctggattacaggctagagccaccatgccaggccttatgtttgaacatcttttatgtgcttattggacatttgtgtatcttctttggagaaatgtctgttcaaagtctttgtccatttttaattggattgtctttttgtcttttgatgtgtaagagttctttatgtgttttggatacaagtttgttagatatatgatttgcaaatcttttctccaatttttgtggacttttgctttctttttttgttttgtttttgttgttgttgttgttgttgttgttttggtcgggggacagtcttgctctgaccacccaggctggaatggagtggcgcgatcttggttcactgcaacctctgcctcctgagttcaagctatcctgcttcagcctcccgagtagctgggacccaggtgtgtgccaccactcccagctaattttttatttttagtagagaccgggtttcaccatgttggccaggctggtcttgaactactgacctcaggtgatctgcctgcctcagcctcccaaagtgctgggattacagtcatgagccactacaccctgattctttttgctggctttctttctttttttttctttttttttttgagacggagtctcgctctgttgccaggctggagtgcagtggcatgatctcggctcactgcaacctctgcctcccgggttcaagccattctcctgcctcagcctcccgagtagctaggactataggcacatgccaccatgcgcagctaatttttgtatttttagtagagacggggtttcaccatgttggccaggatagtctcgatctcttgacctcgtgatccgtccgcctgggcctcccaaagtgctaggattacagacgtgagccaccacactcagcctctttttgctttcttgatggtgtcttttgaaacaaaagtttttacttttgataaagtccaatttgtctattttgtttgtttgtttttgttaagaagctttgcctaacccaaagtcacgagaattttctcttaggttttcttctaagagttttatagttttagctgtttctgtgatccattttgagtgaatttttgtgaatggtatgagggagtgatccaacttcattcttttgtgtgtggatatcaagttgtcccagcactatttgtttaaaccactgttcttttcccccattgaattatcttggcatcattgtcagagataaattgaccgtaaatgtgagggttttatttctgaactctcaagtccatttcattggtctacatgtccctatgccagtaatacactatcttggttactgtagctttttagtacgttttgaaatgtttttaaaatttgtttttcatctaaattttaggattaatttgtcaatttctgcacaaaaggcacctgggtttctataggggttatgcagaatctgtagatcaactgggggagtattacaggcatgagccaccgtgcctggctgactgagtttttcatagatgtactctatcaggtttaggaagttcccttttattcctaggttgttgagtctattttatattacttttttagagacagtcttgctctgtccctcaggctgtagcacagtggctcaatcatagctcactgcagccttgaactcctaggttcaagagatccgcctgcctcagccttcttagtagctgggattacatgcatgcaccaccatactgggctaattttttaaaattttttatagagacagggtcttattactatgttgcccagactggcattgagtctttttatcattaatgagcactgaattttgtcaagtgcctttataatacctattgtgatgatcatagggttttgttctttagtctaccgatacgctatattgcattaagtgatttttttgaatgttaaaccaaccttgcatttttttggtgtataagtcttatttgatcaatgtgtattatccttttatatggtgctggatttagtttgctactattttgttgaggatttttgtgtctatattcataagagatattggtctgtagtttcttgtgatgtctttgtctggttttagaatcagggtaatgctggcctcatagaatgaattgggaagtgttgtcttcttttctatgtgatgggagagtttgtgaatcattggtattaatttttctgtaaatgtttggtagaattcacaaataaaggcatctgagcctgggctcttctttgtgggaagtttttggctttttttttctttaaaaattttcattgtggctgggcatggtggctcacgcctgtaatcccagcactttggggggccaagacgggtgaatcacctgaggtcgggagtttgagaccagcctgagcaacgtggagaaaccccatctctactaaaaatacaaaattagctgggcatgatggtgcatgcatgtaatctcagctaattggaaggctgaggagggagaatcacttgaaccacggaggcagaggttgcagtgagcctagatcgtgccattgtactccagcctgggcaacaagagcaaaactctgtttcaagggaaacaaagttttcataacataaaaattaccatcttagtcatttcttttctttttttttttttgttggagacggagtcttgctctgtcacctatgctggagtgcaatgattgcagtcttggctcactgcaacctctgccacctgggctcaagagattctcctgcctcagcctcctgagtagctgggattacaggcatgcgccaccatgcccagttaatttttgtatttttagtagagacggggtttctccatgttgaccaggctggtctctaactcctcacctcaagtgatccgcccgcctcggcctcccaaagtgctgggattacaggcatgagccaccacgcccggccttaaaaatttttttaatgtacagttgagtagtatttaatacattcacattgttgtgtacccagtttccagaactcttcatcctacagaactgaaactccatacccattaaatgagtccccattctctttcccccagctcatggcaaacagcattctattttcagtctctatgaatttgattagtttagatacttcatactgtaagtggaatcatatggtatttgtcttttagtgactgcctaatttaaaaaaaatttttttgagacggagtcctgctctgtcgcccaggctggagtgcagtggcaccatctctgctcactgcaacctccacctcccaggttcaagtgattgtcctgcctcggcctcccacgtagctgggattacaggtgctcgccacaacacccggctaatttttgtatttttaggtagagactgggtttcaccatgttggccaggctggtctcgaactcctgacctcaaattatccacctgccttggcctcccaaagtgctgggattacaggcgtgagccactgtgcccagcctccatgttgtttttcacaacacctgtatcatttacatttccaccaacagtacacaagaatttcagtttctccacatccttgctagcagttgttattatctgtttttttttaatggtttcttttttcctttttctttttttttttttttgagacggtcttattcttgctcatgctggagtgcagtggtgcaatgtgatagctcactgcagcctcaacctctgggctcaagcagtcctgccacctcagcctccacataggtgggactgcaggtgtgcaccaccacttgtggctaatttaaaaaattttttcgtagagacagagtctcacagtgttacccaggctggtcttgaacttctgagcacaagtgatcctcccacctcagcctcccaaaataatgagattagagacatgagccaacatgcccaaccagttttgtttgtttgttttgttttgtgtttttgagacagagtctcactctattgcccaggctggagtgcagcggcatgatctcagctcactgcaacctccgcctcccaggttcaagtgattctcatgccccagcctcctgagaagctgggattacaggtgtaccaccacacccagttatttttgtatttttagtagacatggggttttgccatgttggccaggctggtcccgaactcctgacctcaagtgatctgctcccctcagcctcccaaggtgctagaattaagtttttctttctttctttctttctttttttttttttttttgagacagagtctcactctgtcacccaggcaggagtgcaatggcacggtcttggctcattgtaacctctgcctcccagattcaagtagtgattctcctgtctcagcctcccaagtagctgggattacaggcatgcaccaccacgcccagctaattttttgtatttttagtagaaacggggtttcaccatgttggtcaggctgatctcaaactcctgaccccaagtgatccacccgccttggcctcccaaagtgttgggattacaggcgtgagccactgtgcctggttttatttttattattattatttttaatagttcctattctaatgggtatgaggtagtgaggtgggtggttgtggtgtttttatgaatgtttaattggaaatgggtggccattgtgtgcaggaaaaacctcctaaattgtgtcaaactcctggaaaatgaaatatcattccagttgcaagaatatctttttttttttttttttttttttaagacagagtctcactctgtcaccaggcgggagtgcagtggcacgatctcggctcactgcaacctccgcctcctggtccgcctcccgggttcaagtgattcttctgccttagcctcccaagtagctgggactacaggcgcgtgccaccactcctggctaatttttttgtatttttagtagagatggggtttcaccatgttggccaggatggtctcaatctcttgacctagagatccgcctgcctcggcctcccaaagtggtgggattacaggggggtcaccgtgcccagccacaagaagatcttgagcatgtgaatgatcagaaatgatttagcctatgtaggcactaggccaggtagtgaaattcagggaaaataattcagatgcttctgagctatcacttatgaactaagaaacagcttaaagccattatagtgtgtttcctgaagatgaaagcatatggtaagatgaaatagtgattattttttaaaaattactactccagaaaggaaaagtttactaatttttattactaaagtttactgttggtgggtgcggtggctcacacctgtaatcccagcactttgggaggccgaggcaggcggatcacctgaggtcaggagttcgagaccagcctgaccaatatggtgaaaccccatctctgctaaaaataaaaaattaggccgggcgcggtggctcatgcctgtaatcccagcactttgggaggccgaggcaggtggatcacgaggtcaggagattgagaccatcctggctaacacggtgaaaccccgtctctgctaaaaatacaaaaatcagccgggcgtcttggcaggcacctgtagtcccaggtactcaggagttttgagacgggagaatggcgtgaacccggaaggcggagcttgaagtgagccgagattgcgccgcttcagtccagcctggacgacagagtgagactctgtctctaaaaaaataaataaataaaaataaaaaattagctgggtgtggtggcacgcacctgtactcccagctactcgggaggctgaggcaggagaattgcttgaacccgggagatggaggttgcggggagccaagattgcgccactgcactccagcctggcgacagagtgagactctttctcagaaaaaaatatgataattaaaagttgagacgttcttcgccgagagtggtcggggtttcctgcttcaacagtgcttggacggaacccggcgctcgtcctgcaccccggccggccgcccatagccagccctccgtcacctcttcaccatgccctcggactgccccaaggcccccgccgcagctccagcgccgcgtagccaccactgccgctgccgccgcctctccttagtcgccggcatgacgaccgcgtctacctcgcaggtgcgccagaactaccaccaagactcagaggccgccatcaaccgccagatcaacctggagctctacgcctcctccatttacctgtgcgtggcttactactttgacagcgatgatgtggctttgaagaactttgccaaatactttcttcaccaatctcatgaggagagggaacatgctgagaaattgatgaagctgtagaaccaacgaggtggccgaatcttccytcaggatatcaagaaaccagactgtgcggggagaatgcgatgggagagcgggctgaatgcgatggattacatttggaaaaaattgtgcattttgcattacatttggaaaaaaatgtgaatcagtcactactggaactgcacaaactggccactgacaaaaatgacccccatttgtgtgacttcattgagacacattacctgaatgaacaagtgaaggccatcaaagaattgggtgaccacgtgaccaacatgcacgagatgggagcgcccgawtctggcgtggcagaatacctctttgacaagcacaccctgggagacagtgataatgaaagctaagcctcaggctaatttccccatagccatagggtgacttaccttgtcaccaaggcagcgcatgtatgttggggtttcctttaccttttctataagttgttccaagacacccacttaagttctttgatttgtaccattccttcaaataaataaatttggtaccctccccccccccaaaaaaaaaatgtactgtgggctggcgtagtggctcatgcctaaatctcagcactttgggaggctgaggcgggaggatcacctgaggtcgggagtttgagaccagcctgggcaacatggtgaaaccccgtgtctactaaaaatataaaaactagccagtcatggtggcacacacctgtaatcccggctacttgggaggctgaggcatgagaatcacttgaacctgggctgcggaggttgtagtaagctgagatcatgccactgtactccagcctgggtgacagggagacattctctctctcaaaaaaaaaaaaaaaaaaaaaaaaacaaaacaaaccaacaaaacaaagtaatccaggaacaacaacatgatgaaggactgcatgcaggactcagtgatggatggtggaagacagccaggaagttaagcatgactctggtattaagtgttgtctgggagagttaagattccatttacagaaataagacctgtaggggaagctcttgatttttttttttttgcagactgctgatttcctgattacatgtgttaagtttgaggtatagagagaaagaacatcctggccgggtgcagtggctcacacccgtaatcccagcactttgggaggccaaggtgggcagatcacgaggtccaggagatcgagaccatcctggccaacatggtgaaaccccgtctctactaaaaatacaaaaattagctgggcgtggcggcgcgtgcctgttatcccagctactcaggaggctgaggcaggagaattgcttgaacccgagaggcagaggttgtgatgagccgagatcgcgccactgcactccaccctggcaacagagctagactctgtctcaaaaaaaaaaaaaagaaagaaaaaaagaacatcctgtagaaacaggcagtcagaggtatagaactacacagaatccaagagatctttcaagaaaagtgacatgcagcaagagaaactatcaagggggtaaacaacctatagaatgggagaaaatattcacaaagtatacatccaacaaaagtctaatatccaaaatctataaggaacctaacaagcaaaaagcaaataacccccttaaaaagtgggcaaaggacatgaacagatacttctcaaaagacgtacatgtggcccacaaacatgaaaaaacgcccatttctaatcatcagacaaatgcaaattagaaccacaaagagataccatctcacaccagtcagaacagcttttgttaaaatgtcaaaaaatgagaaacgttggtgaggctgcagaggaaagcagacacttgtacactgttggtgaaggtgtaaattaatttagcgtaggcacagtcagtttggagatttctcagagaactaagagtggaactaccattagacccagcaatctgatggctggatatacggccaaaggaaaataaatcattctgccaaaagaacatatgtacctgtatgttcattgtggcaccattcacaatagcaaaaacattgaatcaactcatgtgcccatcagtggcggactagaaaagaaaagaaaatatggtacatagccatcatggaatactatgcacccattaaaaataatgaaataatgtctttgcaacaacatgaatgtagctggagggcattatcctaagcaaactaacacagaaacagaaaaccaaatactgcgtgttctcacgcagtgagagtgggagctgaacatcaagtacacatggatgtaaagatggcaacaatagacatgggtctactagaggtggtggtgcggcagggtgggggtgggggttgtgtggcagaggaacagctgaaaaactacctatttgatactatacccagcacctgggaaacgggttcagtcataccccaaacctcagcatcacacagtatacctttctaacaaacttacacatgtattctgtgattctaaaataaacattgaaaaataaaaaaaaaactgacatggtttgtactgtttaatctgacataatggctaggggaaatgaagtctgcagaatggctgtttacggatgttgttgttgttgttgagatgaggtctcactatgttgcccaggcttgaactcctggcctcaagcagtcctcctgccttgacctcccaaaatgttgagattacatgcatgagccattgccaaaacggctatttggattgctgttaaggttattacattctctgtgtagtaagaccttgaaggagaaggatttgagatcaggagtttaagaaaaaatgttaatctaggaagagaggataatttctgtgtttggccagttgcaatggctcacgcctgtaatcccagcgttttgggaggccgagctgggcagatcacttgagctcaggagtttgagaagagcctgggcaacatggtgaagccccgtctctactgaaaatacaaaaattggctgggcgtggtggcaggtgcccactgtaatttcagccactcaggagactgaggcaggagaattgcttgaacctggaaagtggaggatatggtgagcctagatcgcgccactctactccagcctgggagactccatctcaaaaaaaaaagaaaacaagatgctgaaatgaagtaattaccacagtcaatgtgatcctataactttgttttcttttagagatggggtctccctctgtcacccaggctggagtgcagtggtgcatcatagctttctgcagcctccacctcctgggctcaggtggtcctcttgcctcagtgttccgagtagttaggactgactgcaggtgcatgctgctatgcctggctaactttaaaatttttttgtagaggcggggtcttgctatgttgcctaggctggtctccaactcctgatctcaatcagtcctcctgcctaccttcccagagcgctgggattacaggtgtgagccatcgcacctagccaatctcataacattttatgactagcaaacttagtagttctgattcaggcataaatcagttggtggggttatacaaggttgggtgagtttttctagatttctaagagaccatgttgaaatacttggctctgtctcagtaagggatagagagaagcaaaggtgtgggtaaaggttatgagcagacatgtaaagggggcaaattaaagtgtttagggaaggtgaaacagttccaaatcataatatagatcccaagcctcaccaagaagtgaaggagagggtaattgtgcgatagttctcaggactgagacctcaaggtgtaagacgaatctttattgtgggtggtcctctttgagaaaaagaacaaaaaagaaaaatgtgaaatgggtgctaaatttcagagcagaatatacatatatgtgtatgtgtgtgtgtatatatatatatatttttatgtagcaaattccagtttacaaagggcttttatgtgttttgcatcattacaacagttctgtgatgatgtggatgtggtggatattgtaattccacatcacagaggataaaattgaggcacaccataaggtagctgaccagagatcatgcagtatatggtagaatggcaacttgaggccagttcttaggtgtgtttgttgtccttattcagaatggaacaatgtggtttattgtacaaaaatttaaaaatgaatgtcgaaaagtagaaattattacccaaatctcaccctctgtggttgtttgctatgtgatcttccagactcacatatacatgtagataattttttttttttttttttgagacggagtcttgctctgtcgccctggctggagtgcagtggcgcaatctcggctcactgcaggctctgcctcctgggttcacgccattctcctgcctcagcctcccaagtagctgggactacaggcgcccaccatcacctccagctaattttttgtatttttagtagagacggggtttcaccatgttagccaggatggtctcgatctcctgacctcatgatccgcctgcctgggcctcccaaagtgctgggattacaggagtgagccactgtggccgtcctcacatgtagatacttttttaactttttgcttttaaccacttaagatattgtgaactcatttccaaattaacatatatttgcttttaacagctacatttccactggagttacgtaccatttgtaatctattcctggaaatttagatggttacaactgttttttattttatttatttatttatttagagacggagtctgactctgtcacccaggctggagcgcagtggtgtgatcttggctcactgcaacttccacctccggggttcaagtgattctcctgcctcacccttccgagtagctgggactacgggcgcacaccaccacgcctggctaatttttgtatttttagtagagacggggtttcaccatgttggccaggatggtattgatctcttgacttcatgatctgccggccttagcctcccaaagtgctgggattacaggtgtgagccaccacgcctggcctcaactgttttttattataaataatgctgtaggcccggcgcggtggctcacttatgtaatcccagcactttgggagactgaggcgggtggatccctagatcaggagatcgagaccattctggctaacaaggtgaaaccccgtctctactaaaaatacaaaaaattagccgggtgtggtggtgggtgcctgtagtcccagctacttgggaggctgaggcaggagaatggcgtgaacctgggaggcgaagcttgcagtgagcagagatcgcaccactgccctccaggctgggcgacagagcgagactccgtctcaaaaaataataataaataaataaataaataaagctgtgtacagcctggccaacactttgggaggccgaggcaggcagatcacaaggtcaggagttcgagaccagcctgaccaacatggtgaaaccccatctctactaaaaatacaaaagttagccgggcatggtggcacatgcctgtaatctcagctattcagcaggcggaggcaggagaatcgcttgaacccacgaggcggaggttgcagtgagccaagatcgcgccactgcactccagcttgggtgacagggcgagactctgtctcaaaaaaaaaaagaagaaaaaatcctttattctggttttcccgtagcttccacagatccaaaagggtcaggtttatttccagtagccaaatattctgccatctggactgagatatctcctaggttgaggttattatagaggtagtaacctgattctttcttccttttctccttcccctttcctcctttgcctccctcctcttttcttcctctgtatttattttatcattccttcttcctttcttatttctaggccatataggccagccagggaaaggttagtaaggggtgacattgatccctatgacctgaggaatattcttcgaccttgagacatgccgattatgctcttcttttcctaggatgctcacaactgtattcctgagctggacagtgagacagccatgttttctgtctacgatggacatggaggtaactttaacagatcatattggtaacattctaggaccccaattccagacgttccagggcaagaacaggtccctttgttcatttactttccagggtctggccctcattatcatttcctgcgtggtgctgtttttctgtattctgtcattcttttttcccagtaggtactgtattggtttataatctcaccaggacttgttttaatccaaagagcctctatctttttttatttttattttttaaaatttttaggctgggcacgcggtaggtcacacctgtaatcccggcacagtggatcacgaggtcaggagttcgagaccagcctgaccaatatggtgaaaccccatctctactaaaaatacaaaaattagctgggcgtagtggtgggcgcctgtggtcccagctgctcggaaggctgaggcaggagaatcgcttgaacctgggaggtggaggttgcagtgagcca

SEQ ID NO: 96290 - DNA, 91462 bp, Homo sapiens
  misc_feature (1)...(91462): n = A,T,C or G
ttgctctgttgcccaggctggaatgcagtggcctgatctcggctcactgcaacctctgcctcctgggttcagcaattctcctgcctcagcctccaaagtagctgggattacaggtgagtgccactacgtccagccaatttttttgtatttttggtagaggtggggtttcaccttgttggccaggctggtctcgaactcctggcctcgtaatccgcctgccttggccttccaaagtgctgtgattacaggcgtgagccaccacacctggccagcatacaaatcttaagatacagaatttcttcaatccaggagctcctaagatattttagtcttgtttttttcttagagacacggtcttgctgtgtcacccaggctggagtacagtggcaccattgcagctctctgcagcattgacccaccccactgcactcaagtgattctcccactgcagcctcccaagtagcaggggctacaggcacgtgccactgctctcagccaatattttagtcttgaattgcagcctagacctggctaaatgtgagactgatagttaatatttcactcacttgtttgatacactttttttttttttgagacggagcctcactctgtcgcccaggctgcagtgcagtggggcgatctcggctcactgcaacctctgcctcctgggttcaagtaattctcctacctcagcctccggagtagctgggactgcaggcacgtgccaccacacccggctaatttttgtatttttattagagacagggtttcaccatgctgaccaggctggtcttgaactcctgacttcaagtcattcccccacctctgcctccctaagtgctgggattataggtatgagccactactcctggctgcttgtttgataaacttttaaaaaagctttattaaaggaaggaaatgtccttcctggccaagcaaactgccggtgccaatgtctggagttgaaatagccccgctggccaggcgcggtggctcaagcctgtaatcccagcactttgggaggccaaggcgggcagatcacgaggtcaggagattgagaccattctggccaacgtggtgtctctactaaaaatacaaaaaaattagccgggcgtggtggcacacgcctgtagtcctagctacatgggaagctgaggcaggagaatggcgtgaacccaggaggtggagcttgcagtgagctgagatcgcgccactgcactccaacctgggtgacagagcaagactccatctcaaaaaaagaaaaaagaaataggcccggagctgcctagaacatgcaagttatgacatggtccggggacagggaggagagaggccccgaatggccagactaggagtgtgaaattgaatgtggttattcactcggccacttcatcctcaaaggtctgagctggttgtgggtggtgagctggagcatccagcacgtgtgacgctgcagttgtgttgaaggcatgggatgcctttaatgggtggtgaagggtatcccttgtggatggcatagctgtgcaaggtatgccagctggaccatgtgtggtacctttggagaacgacggggatggctttgtctttcataccaaagcatttactaacacctcccatatacctggccttgagcagtgactcaggagggccttacccgacttgccatgggctgtgaattggaagtgagcactgcggaaggaattttgtatgtgtacgcgagctcacaattctggaagacttgaacagggcgagctacacatgtccttgtctcatgtcattgtcacagaagaatcaggtagatgctgttacactccctgttttctggatgagcaaactgaggaacagagatggcaagatgtgtccaagaccacacacggggtaaggggcagggtggggtcactgcttccatcagagagctcaccaggtggactatgtgtccggggggcaccccagggtgatcaactcacttgcaatattgtgggtgacctagttcctttttttttttttttgagatggagtctcgctgtgtcacccaggctggagtgcagtggcgcgatctcggctcactgcaaactccgcctcccaggttcacgccattctcctgcctcagcctccggagtagctgggcctacaggcgcctgccacaatgcctggctaatttttttgtatttttagtagagacggggtttcactgtgttagccaggatggtttcgatctcctgacctcaagtgatccacccgcctcggcctcccaaagtgctgagattacaggcgtgagccaccatgcctggccatgggtaacctagttcttaaaaatttctgcagacaaagccggacacggtggctcacgcctgtaatcccaccactttgggaggccgaggcgggtggatcacttgaggtcaggagttcgagacctacatggtgaaatcccgtctctactaaaaatacaaaattagctgggtgtggtggcgtgtgcctgtaatcccagctactcaggaggctgaggcaggagaatcacttgaaccaggaggcagaggttgcagtgagccgagatcgtgccactgcactccagcctgggcaacaagagcaaaactccgtctcaaaacaaagaaacaaaaatgtctgcagacggccaggtgcagtggcttatggcctataatcctagcacttcctagcactttgggaggctaggcgacaggatcttttgaacccaggagttagagaccagcctgggcaacatggaaaaatcccatctcttcaaaaaatacaaaagattggcccagtatggtggagcatgcctgtaatttcagctacttgggaggctgaggtgggaggatgggttgagcccaggagttggaggctgcagtgagccgagatcatgccactgcactccagcctgggtgacagagtgagaacttgtctccaaaaaaaaaaaaaaaaaaaaggccaggcacggtggctcacgcctgtaatcccagcactttgggaggctgaggcaggcggatcatcggatcatgaggtcaggagatcgagaccatcctggctaacacggtgaaaccccgtctactaaatatacaaaaaattagccaggcgtggtggcacgtgcctgtaacccgagctactcgggcggctgaggcaggagaatcgcttggacccaggaggcggaggctgcagtgaacccgagattgtgccactgcactccagcctgggcgacagagtgagactccgtctcaaaaaaaaaaaaaaaaaagaaacttctgcagagcatgccaacgtctgataagttctgccttatttttcctggggtctcattgagatccactggggaatcaaatgtaaagtagacgtggagaaatactttttttttttgggaccgagtcttgctctgtcacccaggctggagtgcagtggcacgatctcggctcactgcaagctctgcttcctgggtccaagctattctcctgcctcagccttctgagtagctgggattacaggcgtgtgccaccatgcctggctaattttagtgtttttagcagagacggggtttcaccatgttggtcgtggtggtctcgaactcctgacctcatgatccagccccctcggccttcaaaagtgctgggattacaggcgtgagccactgggggcctggctttttttttttttttttttttttttttttggagacagggtcttactctgtcactcaggctggagtgctggaatatagtggtgcgaacatagttcactacagcctcaacctcccatgggcttgagagagcctcccatgtcagcctccggagtagctgggaccacaggggtgctccaccatgcccggctaatttttttaattttttaaatttttttgtagagagggggcttagccctgttacccaggctggtctcaagcccttgggtgcaagcgatcctcccgtcatggcatcccaaaatgctgggatttcaggtgtgagacaccttgctaggtcctgagtactgctcttattgctgtttcctgtttccgaagtgaatccacagaggctcagaagcaggaggtgcctttcacaagatcacagagcgagctggttggccctccaagccagctcctcccttggccaggcgcagtggctcacgcctgtagtcccagcactttggtagccctaggcaggcggatcacctgaggttgggagttagagacctgatcaatatggtgaaaccccgtctctactgaaaatacaaaaattagctgggcgtggtggtgggcatctgtaatcccagctactcgggaggctgaggcaggagaatcgcttgaacctgggaggcggaggttgcaacgagctgagatggcaccgttgcactccaggttgggcaacaagagtgaaactctgtctcaaagaaaaagaaaaaaaaatctcggaaattagatagtggtgacagctacacagcattgggaatatattttatatgtaaaatgtgactcaatgaagttgctttttagaaaatggaaggctggccgggcacagtggctcatgcttgtaatcccagcactttgggaggccgaggtgggtgcatcacttgaggtcaggagttccagaccagcctgactaacatggtgaaatcccgtctctactaaaaatacaaaaaattagctgggcgttgtgatgggcgcctgcagtcccagctactactcgggaggctgaggcaggagaattgcttgaatccaggaggcggtggttgcagtgagccgagatcacaccactgcactccagcctgggcaaggaaatcgaaactctgtctaaaaacaaacaaacaaacaaaaactgggggaggtggctcacgcctgtaatcctagcactttgggagggcgaggcgcgcggatcacctgaggtcaggagttcaagaccagcctggtcaacatggtgaaaccccatctctactaaaatacaaaaattagctgggcatgatggcgggcgcctgtaatcccagctactcgagaggctgagacaggagaatcgcttgaattcaggagacgatggttgcattgagccgagatagcgccactgttctccagtctgggctgatgagcaagactccgtctcaaaaaaaaaaaaaaagaaaagaaaagaaaatggaagtctgggcttggtggctcactcctgtaatcctagcatttcagcagacccagacaaggaggatcagtttgagttcaggaggtcgagggtgcagtgagccatgatggcgccattgcactccagcctgggcaacacagcaagacccctcaaaaaaaaattaaaataggaaaatgaagctggactgcaccatcgctcagggactgtggggatgtaggattttatcctattaaaagtactcatctcataagaaaaagtttaccagctcctcttccacctaccggtccagcaccttccctgggtggaagtcccatccaccccgcctaagggatgccttatgtgtccaacccagcgtccaacgcgcgcgctccgtttacatagccacgcccaccctcccggcccgcggcggggcctacccacccacgtgtttcgagccggctccgcccctccacgccctctctgcggctttccacagaagccaaagacggaagactgtagagatctcataaataatgcatcacgtcagcggctgtaggggcggggctttgacgcgcctggctggctgagtcagggttatgtataatactatggaggcggggcctggaggggtgcgcgtgttgaggcggagttcgttcacggaagtggccacccctagggcctgaagaggcggggccataagtgccttatgaatatgcaacaacttggggcgttgactgtgggccttgtggggccctcatggggcgtggccaggcgcgtctcctgaataatgtagtgcgctgcctgccggtgtggcggcgactgttggtttggtcggactcggggggcgtggccagccgcgtctcatgaataatgcagcgcgtcagcgggcggcggggcggggcgtggccggcgtggcggcgctggagccgggaagggggcgcgggggagagatggtcgcaagatggcggcgctgaaggaggataggagctacgggctgtcgtgcgggcgggttagcgacggcagcaaggtgtcggtgttccacgtgaagctcaccgacagtgccctgagggccttcgagagctaccgcgccagacaggtgagtggcatggcgcccggcgcgccagtggggaacgtccggacgcgggccggcctcgcgctcccctcactgaggcgtccgggctcggagacgctaggtctgtggtgctgctcgcgggtccctgggccggcggggcgcggagtgggcgccagtccggcctggagcgctgagaaccgcgttccttctcagcactaggaggcaatacaggcgggtggcccggggctgctgaggggcccagactcgcgcgccgggcccggggggcgtcggtgtcggcacctggcggcgtccggggcctttctggcctgctgggcacctgggcagggtccagtttgcgcacctggcggcggggcgaggaggcggtgggccgcacggtcccggcaccgtgatagggggaagctgggggcttttccatctggggccggggcagcgccgttggtgggggtgactgtgtctgtcctcctgggaagcagcgatcgtctgggtgcccggcagggggtggtcagcgrggcacttgtgggggtctgttctgtctgggtggaaggctttgcagctgggggctggctttgacgcgttccgatgaagccactcaggttgggccactttggttcttgggacggggagtttgggcagaaactgacagcttgtcccagctttctgctccccttacccccaggtgaccctctctctccggagagaggttccttggagagtggaagtgttgggggcggctgtgatgttatcctcagggcacatgtaggggatccctgccacccaggaggaagctctggctaccacatctggccgctgactctggaacttctcagaggccgatttgggcccatctgggggaagtttgaggcgtttcggttctgccacctggctggtggtggggaggggaggctgctgtgtatgttctcttgggcctgactttggggcgcatctggggccgtggtcagaaacctgcctttttcatttctgtttgtgtcatggccccccctccccccgtctgtgctgggtcagaagttgcagatgaccagtggtcaggtcccgaggggaagtggtttaggaaccttgtaactccttttctggaaattgggggyttcattgccctaaagggagtgggggtgggtctagtctcgggctcagagagccctgctccctgcgtgtgtgtgtgtttgtgtatactgttgatggtgggggtgggggggtgccgcgggcgggggaggagggagactaactaggaaggaatgtggctttcttcctgccccgaacttgttcagctccattagctaagccgagaatttcttccccctgtttcgtttccaccactctcccggtgcccaccccttccgtgcttcttcccatgtctttgggcaatttcctccctgtcccggtgtckcagttttccccttcatggaatgaggatttcatttttttttgaaagagcaagttcgcaccttgtcaaaaagactccccaagatgaggctaaggcgcccctgcaggtgaggaggagacagtggcagcgacagcagctgctggcccatgaccagccagagcctctcttcctggtagaattctggccctgggtctttttccctgagcgattctgacttgtcctgcaggaaggcaggctttcctagaaacagctgggggagagctcgtgagtcatataactacgatggacttggtacctggtcaccactgtcttctgtgctttaggaaccaggagctccgccttctctctgatgctgccctcgcttgcttttcagtccagaaggtccgcctgtgtgtccacctcatgctgtcacactgctatttttactttagggtattggttacatcccctctctaagctggatcttcctcatgttagggtgaaggtaactgtggactgttaaactcctctggctcggagcccagctgtgtagggcagtgtgttgaccagccaggaggggcttcctagaagaacttttccaagccatccagagcaacttggctggctggattatattttggggtgattcaaacttggatttttctcaaaaagctgtctggtaatttaagtggcttggccactttctttctttctttctttcttttttttttttttttttgagatggagtttcactctgctgcccaggcttcattgmggtggcgcgatcccggctcactgcagcttctgcctcccgggttcaagcgattctcctgcctcagcctcccgagtagctgggactacaggcacgtgccaccacacccggctaatttttgtatttttagtagagacagggttttgccatgttggccaggctggtcttgaactcctgacctccagtgatccgtccttctcagcctctaaaagtgctgggactacaggcatgagccactgctcccagccagcttggctactttcgaatttaatcttgcccatggggcagtatagtggatggacttttctaaggcacggcagctccgtgctctctgtggttttgggtagtgagcttgaggaaggtggcttgaagaacttgattgtgtaaccagagaaatatactggttatggacaaactctcatgtggacaactctatcacccagaagccagagttttgtattcctcgatgctgtggttatatagtttgccaattgcaacttgtggagagggcttttatttttaatttcttttttttttttttgagacggagtcttgctctgttgtccaggctggagtgcagtggtgcgatttttcgtgttagccaggatggtttcgatctcctgactttgtgatctgcccacctcggcctcccaaagtgctgggattacaggcrtgaccaaccgtgcccggcctatttttagtttttaattgtgaagaggcttttacaaattcaggtgtggcaggggctagaarggaacttgctgtggaactttctctgtggctcccaggagcaggtaatcctagctctgggaacagcccaggtagaagccctcctgttttctctccccagagggctctggtgttgacctggtagccagctggagcagcgtggtggaaggtaaaggcgcagcagtacacatagctgctggccttctcactctaccttggactttgtgcagtttttctttccttttttttttttgagrcagggtcttgccctgtcgcccaagctggattgcgctggcgtgatctcagctcactgcaacctccgcctcccgggttcaagtgattctcctgcctcagcctaccaagtagctgggattacaggcacgcatcaccgtgcctggctaatttttgtatttttggtagagatggggttttaccatgtggtcaggatggtctcaaactcctgacccctcaagtgatccatctgcctcagcctcccaaagtgctgggattataagcttgagtcgccacgctgggccccctttttttttttttttgagacagggttttgctccattgyccaggctggagtgcaatggcatgatcatagctcactgcagcctcgaactaccaccctcctgcttcagtctcctgagtagctggggccacaggtgtgcaccactgcacctggctaagttttaaatttttttgtagagacggggtctcactatgttgccaaggctgrtttcaaacgccggggctcaagtgatttccctgcctcagcctcccaaagtgctgtaattacaagagtgagccatcgtgcctggcctagtttttgttgttgttgttgttgttttttgagacagagtttcactcttgttgctaggctggagtgtaatggtgttatctyggctcactgcaacctcagcctcccaaatagctgggattacaggcatgcaccaccatgccctacaaattttgtacttttagtggagacggggttttaccatgttggtcaggctggtctcgaactcctgacctcaggtgatcctcctcccttggcctcccaaagtgctgggattataggagtgagccttcgtgcctggcctagtttttctcttttcttttcttcttcttctccttcttttttttttttttttgagacaaggtcttactctgtcacccaggctggagtacagtggtgtgatcatagctcactgcggccttgaactcctgggcttaagtgatcttcccacctcagctgcccagagtgccgggactacaggcatgagccattgtgcctggcccagtttttttctttttcttttaattaaaaaaaawttttttttgtagagatggggtttccccattttgcctaagctggtcttgaactcctgggcttaagggatcctcctgtgtcggcctcccaaagtgctgggcttacaggcatgaactacgtgtctgtttttctttgaatataaaaacctgcatgggatggccgggcgtggtggctcacacctgtaatcccagcactttgggaggctgaggtgggaggatcccttgaggtcaggagtttgagaccagcctggacaatatggtgaaaacctgtctctactaaaaatacaaaaaaattagccaggcgtggtggtgcrtgcctgtaatcccagctacttgggaggctgaggcaggagaatctgggagatggaggttgcagtgaaccgagatcgcaccactgcactccagcctgggtaacagagggagaccctgtgtcaaaaaacaaaacgaaaccttcatgggttgtgaggtggctgttcttgtggatctcccggtttgctctgatgagtgatttctgggagaggggagagtggaagcatggacacaccccctccttccaggacagtgtyactcacctgcttggaaaagtagcctctggtcagtctgaggaagtgaccctcccaggggcacttgggttgtagttcatcattaggtgtttgcatgggctctgttgctgagtgacctcttttggatcacaagctccttggtggagaggagcacaccgttgttcagaaaaaaatgagggcccaggaagtgcttcaggaggcctggggattagagcctctctccatttgaatctcagctccacctgcctcctgaggccatgggtgagtgcctgacccctcccatctccgaatccttctcagaactggggtcagcagtacttgacctgctccctcaagttccagatccttctctcagggctgtgaggatcctggtgcctgaccctttctgagttccagattctcttcctcttgggaggagaataacctgacccctcttgtgctctgagcccttagtgaatggacccagagctggctcctgsggggctggtccctgcctggaggttcgtacagagccggtgggagactccagatcactcatctaacctggtatgattgagcctctggtcagtgcccatggctcagggcgggatacccaccagtgattgagatgggcccctcatgtcacgagctgacattctagtggcaggagacagaattcatgaacaggaaggatggcacagaaattagcaagagtaactcaccggcggtcaacgttaatgatggtgaggggtataggtggggcagtcagtgagtgcttccagcaggtgacacggagctgcagtctgctgggggaagggtcccaggcatggccggtgtgctgtcscagggaagggtgtgaagggagtggaggtagaggggtgctgtgcctcaggcctgtggccagtactcrgctcttctgggtggccctggagctgtgctgggggctactgtctgctgctaagtgggtgggctgtgtggatgtcacccttggcaccggtggcaggaggagccttacttcagcctgtgatccattctcacagcagggccccagaggcccgacttatcttcccttcccggtgggcaccccccttggttctgagsagggcagcttcttgccagccctgcctgcttttcagagaaggccttctttagagacctagtgctagtgctgcccctgttggccctgggctagacccccatcccttcccatgggtgcacatcatcttgaccacttgccgggagaggaagtttatggtcccccttcacgacagggacagatgaggctctgagaggcggcatcacctgtccaagggtgctcggctgtcctcactggcccatactgcctcttgagtgctcaagccaaactatcttttgaggttgcaggggtcttgacctgaaggggagtcacactggggtcctgagcctcacttaaatgcaactttccgcgtccccaagaggcccgaaccttggtgacgtgagtgactgagcagattcctccggttgctggctatgctggaccccctcccccaagaaagtggaaaggtgatgggcacctacacctgtggagggtgccccaccccgccagtgctggctgtgccacccacagtactgcatttcatcccatcttccccgtggtgggagcagttcccatttcttaggtgaggatatgggtggagactctggaggaggctgaatcaccaggcaggatctcccagctgggaagtagctgagaactcagaatccaagtgtcatggcctgggctctgccacctctgaaggactgtggccgctggatgggctggggtggaacaggtgggctgccaggaggcatcaggagtggcccactggtgcaccagggtatggtttgcctgtgtgtttcaaggtgagcatttggtggttctgggtggattctcccagaaggtgctagaagaggacaagccagcttgagtctgtgggcccgagctggcagtctctgcaggaggcaggcaagagtgtgtgtgagggactgagctctgcactcggcatcgtgacccttgactgtgctttcagctggttgccgtggctgtgattgtgtgtaaacagcaggcagcgctcactcggaaacccacccctctgttgactcacggccaaggccgtagttcatcacctttgaagcagttttgacatcacacccggattgtgacatcccgactgggagaccttgagggaggaacccgccagcctgacaaacaggattgcctctctgctccacgtagccctgggctcgaagcagctgcccagggaagagaccctagttttcagaggtctgcttctcagggggcatcagccttgtttaaggcacctggcagggcacagacttgtgattgatactgcacattttgggtttggcctcttctgtgtcctttgttttagggtcttgctccccgttgtgctttctgccttgatgaattcagttgttacactttctccttggtctctgaatctcatggacagggttgtcttcaatctcacctgtgtagtcagccacagagtccaaagggaaatgtagaacaatgcatccaaatggcctgtgacctgcaggtgcagtgaatgacagagatggccatgacatgtggttattttgtcactttgcttttttttttttttttttttttgagatggagtctcrctctgttgcccaggctggagtgcagtggtgtgatctcagctcactgcaaactctgcctcccaggttcacgccattctcctgcctcagccttctgagtagctgggactacaggcgcccgtcaccacacccggctaatttttttgtatttttagtagagatggggtttcaccgtgttagccaggatggtctcgatctcttgacctcgtgatctgcttgccttggcctcccaaagtgctgggattaacaggtgcgagccaccgtgcccggctgtcactttgctttttaatgaaaaaagctggtgtccaaataaaccatccgcagggagactattctcccagataaaagygtcctagagacctcccgcctccatctgacctggcagtgggccccagagtctgatgctaattatatcctccagggctggaccctcctgaccaagtggagacacggctcctgactgaggcagccaggccagcagatgtgtttgtgaaggggtagggcttcgagttctggtcaagtttgtggaataactgaattccgatttttttgttttgttttgttttgtttttgagatggagtctcgctctgtcgcccagtctggagtgcagtggtgtgatcttggctcactgcaacctctgcctcccaggttcatgccattctcctgcctcagcctcttgcgtagctgggactacaggcgcccgccaccacgcccggctaattttttgtgtttttagtagagacagggtttcaccgtgttagccaggatggtctccatctcctgaccttgtgatccgcccgcctcagcctcccaaagtgctgggattacaggcrtgagccactgggcccagcctgaactcctgttttaaaagcatcctgtgaagttttttttttcctttttactatataagcagtataactcagggtagaaagcctgcaatgtacctaaaattagcaagtctgttctcattgccccaggyaatttctgttgacacctttgcaccctcctctgtctcgcctgggtgtaccgtgttgtcatagtggcacaatcatatggttttgcgtctcttcttccctgaacactttatgttttaatgctgcaccttctgtgcatcgtggagcctgacaggtcagtattcttcgggcatttttgtgttcttggcactatgcttggttctggggatgtccggatgctgcaggccttgtgtgtgtacaggccagtccactgtcccgtagtgaggctacatagagcgatgaggtgaggtgaggcaggtgacccagcacaggccacggcctggcatgcccatgtgtctgtgagtggagcctggagtatgaggctgcgattttgaggccagggaaggcagctcagccccgcttggcttgctcctctttggacaaattgagctgctggtgatggagggctgtggtcagtccttctcaccgttcttcagatggggagaccgcaagtatataccctactgttaacacccctgtccttcccccaggcccatcgggggcctcagctcttcatgagatgctgttgttgcgccccgtgtcctttttatatgttggtgaaaatgttttcacaaagaggcgtctctcttgaaggatgctgagaactgcatattggggatcaggtacattggtggcgctgctcccactgacaatttggggctccaggctgctggcaccctccctgagcctcaacttcccaattcaggtgaaggtgttgtcctagaggtgagacaggcttgttctccctggctgtgcacgaggtgtcagctgctctcctcgttgacccaaaaaatgatcccagaaagcaaagcctccaaaatttaaaatagcttctcctatagctctgctgttagggttttattgttttttttctgaaatagagaactggcttcctagttttggctcattgcaacctctgcctcccaggctcaagcaatcctcccacctcagcctcctaaatagctggtactacagacacccatcatcacgcctggttgctttttgtatgtttttgtagagatggggtttcaccatgttgcccagggtggtcttgaacttctgagctgaagcgacctgcccgccttggcctcccaaaatgcygggattacaggcgtgagtcaccgcacctggcctgtttctttatttttatttctttatttttgagayggagctttctgctctgttgcccagactggagtgcaatcacgtgatcacagctcactgcagcctcaacatcctgggctcaagcgatcctcccacctcagcctccccagtagttgggactacaggcatatgctatcacactcaactaattttttttcttttttttttttgagacggagtcttactctgtcgcctagactggagtgcagtggcatgatcttggctcactgcaacctctgccccctgggttcaagcgattcccctgcctcagcctccccagtagctgggattacaggcatctgccaccatgcccggctaatttttgtatttttagtagagacggggtttcaccatcttggccaggctggttttgaactcctgacctcatgatccatccacctcggcctcccagagtgctgggattacaggcgtgagtcactgtgcccggcccattttttttttttaatttgtagaggcagggtctcactgtgttgcgcaggctggtctcgaactcctgggctcaagcagtcctccaacctcagcctcccaaaatgctgggattacaagcttgagccactgtgcctggccagcttcctggtttctttagcaattttcccactggaaagcccacagcactgtcagagggagctggggccccctgtacttccaccttctccatcaggccccctccrgtggtatggtgggtggtgggcagtgggcagggaaccagactgatgtcctgtggtgtggatggaccacatcgtgctcatccattcctctgtccatgggcatttgggttgcttccacctcttgactgtagtgaaccatgctactgtgaacagggcatgtaagtatctgttcaaacccctgctttcagttcttttggatacatacccagaagtagacctgttggatcgccsaggctggagtgcagtgacgtgatcttgactcactgcaacctctgcctcccaggttgaagcaattctcctgcctcagcctcccaagtagctgggattacaggcgcccaccaccacgccaagttaattttttttttttttgagacggagtttcgctctgtcacccaggctggagtgcagtggtgctatctcagctcactgcaagctctacctcccgggttcatgccattctcctacctcagcctcccgagtagctgggactacaggcgcccaccaccatgcctggctaattttttatatttttagtagagatggggtttcaccatgttaaccaggatggtctcgatctcctgacctcatgatctgcccgcctcagcctcccaaagtgctgggattacaggcatgagccaccgcacccggcccatgcgtagctaatttttatatttttagtagagacggggtttcaccatgttggccatgctggtcttgaactcctgacctcaggttatctgtccacctcggcctcccaaagtgctgggattagaggygtgagacactgctcccggcctcatttggtcattctgtgtttaattttttgaggatttgccagattgttttccacagcggctgcagcattttacattcccaccagccgtgcacaagggttgtggtttcgccacgtccttgcccgaactggttattttttgatggtagccatcttaatgggtgtggggtggtcttggagccatttaaatgccctcatgtatgtgactgtcctgtgagagctaggacctgcagggcctctgatgcccctggatggacccaggagtcacctggtcacaggtgacagaggaaggtctcgagcaggatcacctgggctcaggtgagagaaagggacagggagagcccggtgtggctctgcagtgagggaagctggggctgagtggagatgacagtggctacgtgccctgcttctgcatagccagtgtgcggttgcccggcctgtgttgggatgcaggtttctctttttgttttgagaccgagtctcactctgtcacccaggctggagtgtgcagtggtgtgattcttggctcactgcaacctccacctcccaggttcaagcaattctcgtgcctcagcctccaaattagctgggattacaggcttgcgccacaatgcccagctaagttttttgtgtttttagtagagacggggtttcaccatgctggccaggctggcctcaaactcctggcctcaagtgatccacccaccttggcctcccaaagtgctgggattacaggcgtgagccatcgtgcccagctgggacatgggtttctgtaagcagtgagggttaggaagggccttgggtgaggttggccagggtggttgagcctctcagtggcaggacttctgagccctgcaggtactgaggcttcagggcccttctcaggcaaagagctcagatgggtgcagaatctctatttttagccctttttggattaagcttttgtggaaaatgaggtctcttccaggtgagaagtggcctggaggtcctgcaggtcagggacagcccactggggggcactggctgggcgggggggtccagctgctgcccttggcctagccctgaggcatttgctgaaggtgggtgggagggaagaggaggagcagagttttcttaggatcctgtgggcaggtggaatccacctacttccaggaggagccccaggcctccagttggggaggggagtgtgtgtgtgtgtgtgtgtgtgtgtgtgtgtgtgtgtgtgtgtgtgtgtgtgtgtgtgtgtgtgcgcgcgcgcgcacgtgcattggcctgtgtctccatctgtgttcaccctggagaccttaggttgggcccctctatccagggtaggctgattagtgggggcctgtgggccaaggggccgggtgggggcggccaccccatcacattgcccttctttcggaagggtgactccccaccaggaacccaaagggcttggggtggccttgtctcctcccacaggcctgaggagggtaagctgggttgggaagttcctttttcctttctgaaaacagtgacttttcggggtacaatgagcttcctgctgtggatcttgtagcccctacacctggagggagtgaccttagggtctcagtgggcactgtgataaggatgcctgctggattgcatcagggcgcctggttcacaggacctccaacctggctgctgtggggaagggccctggtgggtgcctcctgctcacggctactctgaaatattattcccgagatcttgaggggaacctgggctgcgtccacctcatgtttgctccatttccccatggaattagtggtagaggtgactcacagggtctctttttgtgtcctcaaggaaactgaggcctataggctctgcccagggtcactgctatagttgcttatccccacaacaaggcttgctgccttgttaggacrcggacagagtgggctgtagtgtgatctttttcagcagcaaccctagagactatagcgtgttggtaaactgtggccaaagggctgggtctggcctgccacctgtctttgtaaataaagttttatagggacacagctgcccacttgcttacctgtaatttatggctgctcttgccctgtgacggcagccaaggctgcaactgtctagctcacaaagcctgaaataccaactctttggcccttcataaaagaagcttgctggccgctggtctagggtgtccagctgggtgtgtggcaggaagagttggtgtgttaatggaaccactgtcgtggggccaggctcgggccttgggctcccaggcccctgtgcagtgccaggcagccctgtgaagccttgctgttggccagggccagttgagactttggagggtccttttgttctggcccctttatttcactaatgggacatctagaagataatggctaacttgagatcacacagttagtgcagatgatgtcaaaccttgaacctgagggcatccactctgggacaggctaccctcctggctgctgactcttgtattgtattttattttattctatttttgtttttattttttagagagagggtcttgctgtgctgtccaggctggagtggagtggtgtgatcatagctcactgcagtctgttaactcctggcctcaagtgatcctcccgccttggcctcccaaagtgctataggcgtgagccaccacactcagctgtgactcctattttgatctcatgcaaactcaaaatgtttctcagcccgcatgggagtccctgggttttccgggagtttttctcagggactgcatcaatcctgacatagcytccagtgggaaccggcctctttatttgtgacctgtatgtgacctttgaaacaaaacacagtcatgtgcagcctggatgggaagggctggcttgtgtgtcccttgtggagttgggagcagctgccgcatggagtcagcctcagcctgctgcatcctcatctctggggatggagctgggggtcaggcgtctgcctccagatgggtagtggggcccgcagaacctgtgtctgattctagttgggctctgaatgcagtctctgagctgagcctcagctgcgtggttgttcagcggggcacaacctacacagtgcaatctcctacacagagggattgcacccagtgagggttcggctgcctccaggagtgtttctccagtaagaagcaggagggatgaagcccctgcgctcacatggcccacttcttcgcagcggggaggtgcaccataaaccagcaacagccagatcatggtggcttcagactggcttggtgtgcagtggtggtggacatgggcaggcaggcatctccctccacagaagcaagctcaccttgggctggggagacctaggagacccttccagaactttcttagctcggggcaagtgccgtgtgcagattagattctttgttagataccagtggcttraaagactcagaggaggacttcctgagcagttctctgccaaggggctgtgggtctgtggccaggctctggcagcagacttggcctgttttcactcttcttatctggggatgttatctctcccttttcagagttgggtgtgacccttgaactgccacaggccaggcacagactgtgcagggaggtatctgagggcagggagcgggtgcagctagaagagcgtgttccttcctctcctggtggcactatttttggagttggatgctctcagacgcctgcttgttccagtgaaatgtgctcagctcacactggatttggcaagtgggaggggacagccagtgctggcagcctgtgtccagctcatctccaggctgccctggctctcttacctgtgcacaggctcccactggtcgagggccatgtgcctggagccacatgaccccataatgtaggaatcgcttccatcttgtaggccagctccttgtagataggaagtggagccgtgttgagaaggattctgaggcgatgtctggcgtagagcgtaggatcaatgagacagggtccctggccctctgatcatagcatctctgtggggagagttccctctaatctctgagctgaggagggtaacgaactcctaggtgtgcaaggtgaggttcacatgctgttgaacggaagtctgcttttgttttttcagacgaggtcttgctctgtcatccaggctggggtgcagtggtgtgatcatagctcactgcagccttggctcccgggctcaagtgatcctcctacctcagcctcccaaatagctgggactacaagtgcgtggcaccacacctggctaattttttatttatatggagacagagtctccctgtgttgctcagcctggtctcaaacccctgacctcaaacgaacttcctgccttggcctcccaatgtgctgggcttacaggcgtgagccatggcacccagccgagcagaagtctgggctgatgctgcaccccagaggcacaggagctttggatccctttccccctgggggagagggtaacttgccacagtctgctctgaagcagcmcgggtgtccctccactgtgggaggcggcttaggagcaggcgcaccttgagggtggcccaggcaggtcgctggagggtgcgggagacagggcccaggcctggggcggtgccagcagggctgtctccatgttgactgtggggggctggttccaagccaggcttcagacccagctgctgcgtgtggcatggcctgagtgccaggggcagcagcctgggcacacatgggcacccagggcttggagggaggctgggtcagtgggcctaggtgcagagcttctgggtgtctagactgttgtcccagggatggctgagggccagcatggggggcccaggctgccacctttgcctcactggtattggccacatgtgtgctgggtggtctgtgtagtacagagcaggacacagggtgggggtacctgactgtacagtggtgccaccctctgggcctcagtttctccctctgctgtgtggggtcatcctgtgggtgggaggtcaggtcagtgcctgcagcccctcctgcaactcacattcacctctccttactttgctttcctgtccgtggggtgttttggggttcagggagctgtgtcccaggacatcaggggaacacaagccgcatcccgtggcycccactcctctcccgtcctcttctcccctcccctgtgtgtgcctggtgccttaggtggcttgcaaggcgccagtcacacactgtttcctttcccggcttagccctttcccatcacagaaaccccrgctctctcccaggctatctcatagtaaggagcctgcgttactgagggctgttgaagcaccaaaacctaggaaactctggatgaggtgaagagcatgtgtgtgtgtggcacaggtactatggccctgcccagtgctctgcacacctgccttcctgcctgcctgggaagtgggatgagtaatggcagtagctggggcttattgccgggtgcccttgcccgtgggagggtgtgactggccacagcatccttaggatgaagaattgagtagagaagaatagcaaaagctatcttcagtcctaacaagagcctaactagttgggattgcatttgctgttgggtgagctgtggcagatgcagaagaaagcacaccacagaggagaggggaggggaggagaggatgggagaggagtgggggctacgggacagtggcttgtgttcccctgatgtcctggtatgtcactgccctctggcacacagaagttgcccatcgttctcagtcgcctgaggtttggccatgatggcaggagggtgagatgtcctgaaccttgacctgctgctcccacagccctggcagcccagaatagtcaaagcctgggttgtctccacaaggcaagagttttttcctctgctggagctgtgggctgagagcctcctgtgcgcaggcatcacacatccccaggccaggtggctcctcgggtgctcagggctgtgggggctttgtgtccctcaggccctgtccactggacaggtggtggcagggctccgtggagagtgtcccagagtaaatgggttctggtatatgcagtgtttctcatgacagcccatggggtgtgttggtggggggagatatagctcatgtgccagtgtcactctcgggccttggcagggatgcagctgggagagttctgtttatttaaagtcgagcctcaggttttctgctgtgacttattaacccgttgatccaccctgtgggcggtgccaggctcttctgaggcctgacaggtgggcctaacctctgctgaccaatgacagagagcatcactgctctgatgaccggacccaggctgcaggttctggagtctgtagccacttccccttcctcccaggcagagatgaacgtgacagggatsagatgtacatggcaatttcagatgggagttgaagaatgctgagctctgtagaaaatgtaggggaaatttagcaaagcaagccacgcgtcatggatttcaatcaggatgtgacttgagatgtgggtaatcccgagagtcacagattgctttggaaaaacagagcaggagtggcctctgtgcgtcagtgagcacacccttaggtagatggctgacagatgccctttgcccacctcccctcctcctcagcctcacccctccagcctctctgtgccgtccctggcctgttggcacaagtggctgaggaggccaaaatgaagtgatgcatgcttagcagrggtgccagcacagttgacccctgcatccgccgtgacagcccgcagatcctctgcacgctgcagccaccaggcgaggcctccctggatgccgaggagtcagtgcttcagtgagccccttggatcaggcggggggatgtgagtgagcgggttgtccacatggataggagtggggtcagacctagcgtctggccagagtgtgtgtccttaaccttggccaggcagcagccaggcccccacgtgtgactccagttagccaggtgcattctgaacgggagtgatgagtgacagtcccgtgggccctcatccagcctgcagcagggaaggctccctgaggagggaagctcggcaggacccaaggaagggtggtgtttctgagccctaggcgggtgcttgggaacagcccattctccactcccgctggctccaggtggccagagtaacaggtcccgtcccttcccaccactgctcagacatctcctcacagcccctgagtgctcagcagccgtggctctgcacgtaccctgagctctgggtgtctggggccacatcagctcacttggtgaactgttactagatgaacatgtggtggggccgggtgaggaggaacgtgtgtcctgcaatagcctgttctgtctgttccatcacctccaagagcccacatcctgcctgggattcccagtacgggcagctcagttcctcagagcctggccagacgtgccccccacttgctggggctccctcgctcctatgggtctgcttcactcccttgctgttctccagctttgccagttgccttttccagaaataagacagaaaaactctgtcaccttcttttcatcccacttatcaccccagggtgggggtgctccctcccagatgccataaagatacccgcggccctgactgctgggcgggcggtgccactggacactctccagaccacggatgcttacagggatgtccctgcgctgggtgccagcctggcacagtgcgagttcccttttctttttaagccaggttcctgttttaccacattaaaccagctgtaaagtgccactttataaaataagcaagtgatagggagccactctggcagggcccagggagccgagcagtgcctcccagccctgtgcctgtgtgtggtgggtgtgcagccactggaagtgccgagctgcctgcctggagcgctggcctgccctgttaataaccgaagctctgctgggcattggcacacccggccaggtggccccgtggtttcccaagacaggggcttttggattccgcattgatggcccaaaactccttccctaagttgtctcagaagcaaaaacaggaaggtcattgggtttctttgcagaacactaacccatgctgccaccccgtgttcccactcctcctcctggcatctgcaacatgacaagtggcaggtgtctggtgtccgttgtcattgggccctctctctcatttaaacaccgtctcttcctcctcggcttcttcagttgtcatctctcagagatgggattttgggaagtcccatgtgtggattactgggacttttgtggttggggatatttgatcttttagttataaacgtctgctcctgatgcggctggttgcaggatttccctggtggtgggggtgcccgctggcagaattgactaaggtgagctcactgctgggttctggcagccctgcccactgcgaggcacagtcaccacaggcctggccctcacctgggacacctccctcccctcctggcctgcccacaactcagaagacgtagttggtgctctccacggatgatggctccagggagcctttgtgtacccacagctgttccatggtccaccctagggtggtcatgtgtctcccttgctgtcctggaatccttcattcacctctgggtgctggactgggggtgtgcgtcctcaatgggctatctggctgtggtggtaggagcctcccgggtgctcctgccccgtggagctgtggggcaccaggcagcttagcgtagagcaccagagcacctcccacttgctgtaagctccttgtccccatgccaggtgctgctcatgcctctgtgggacgcactccagcagcctctgggggtgacgcctggttcctgatcgtgtgtcttctgaccccaaaccaccctcatgaggccccaggacctgccygccaggcccyagtgtttcttcctcttcctcttgactgtgttcagggccttcttttggaaagggctgtcctggtcactggtgcccatgctgcctcccctccttcctgcccacccgcagacacgtagctggaggttgaggatgtgggggagatgctccccaaggatggaccatttgtgggagagtccgaatttgcctggattggtggtttcaagtttcttttgcttttatgtgatgccatcacctcttgggcccccaggtgtgtcagatggaccagtgggaagtgcctgggattgggcagatcctgtcctagtgaatcctggctgtcctcgtgtgcactcgtgagtagccggcccctggcttggcccccgtctcatccgcctggctctgagctggctgtgccgtggacsagtgtcttgctcccttctgccagtggcccctcactccaaggccccggctggcctggaagagctgccttgaagtgtgaggcacgttggagggtcygcctcattgttgaggcgtgggcccctcctcgccaacagtgggcccatcccaggccctttcccacgttctctcgctcagcagggtttttgattcctcttaatttggtgttggtgctgggcacacacagtattgctctcatccgggtctgcttggtggcttctcatgtgttttgcccacttgcgttactctctgtggtccatggctgtgctcaccactgtttcccattgggtggtttggcgtggagtggggttcactgtgtcacaggttgtctacgtggcccctggaggtgtgctgcttgctgcccacaggcatagctggcgagaacagtgtcgtggcccgctcgttcttctcctgggtgtgcrcccacatgcttgggatgggacggcattgcctctcctgctgtgagttttggcccaagttcggtggttggaggttggcctgcttccctgcaggttctgctctgtggagtcacagagtcaactctgtggagttgaatttggcgagcagccgccatgtgttcactttcctgagtgtgatctgtgtgcaaattggctggtattttttgaagcactcaaactgtattaggctgtttttgagagtcttgggtatgcttcagtgtacctcagtgacgtattaaaaagctaaagcagtgtttttgagttgaaaaatagtgagctttgtatggcccctgacagttcccagagctattttrcacaatggtatgttccagcccaagaccaccctctgccatgctgcccggggcctggcacagggagagctcgccaagaggttgcagggcaccagtgttatgccgaccttcccaggggaccagtcgacctctccatcggccccaacacacagctgcttccttgagggaacctcccagttcccgtctctccttttgtgagaatggactctctgggaacaaagctgtgccaggtcctgcctggagaaaactggattctgtgtgtaagatttcaaatgtcacaagcagccagttgatggagcggctgtgaaggtggtaggagaagtggacctcttgaagggcacttggtacagcccagtggggttcatttacaaacccacgatatgcacaggaagcctcatggycacacctgtctcaggagtgaggaaggcgggaacaggaacgtggctggtggtctcactttttttttttttttttttgagacggagtcttgctctgtcacccaggctggagtgcaatggcacgatctcagctcactgcaacctccgcctcccaggttcaagcaattctcctgcctcagccccctgagtagctggggttacaggcacccgccaccatgcccagataatttttgtatttttagtagagatggcattttgccatgttggccaggctggtctcaaactcctggcctcaagtgatctgctcgcctcggcttcccaaagtgttgggatwacaggcgtgagccaccacacctggcctcgtgttttgcttaagcacttaatgggtttgctctcaccttgctaaatattatttggggtcattgatgcagttttgagaaaggtcactgagcatgttctgtggtcagatggctccctcggccccgctcttcctccatttgtggggcctgtcccatcagccatccctggtgggttctcctagagacccagagagccccccagtgtcctttctcccagcccttgtcccctgtgcccctctgttcctctgtctcgggagcagatgccgtgaggtggtgtggctgtggctactcatgccctgactgtggcccctgaaagggaggatggggttattcccattttacagatgagaaaactgatgagttcagatgtcaagtccatcattcacagccacacggtgggctgagggaccatctccccaaccctgggaagtctacaggggcccgagaccttgcccccttcctcgtggcaggatttgtatttgtgttttgttttgttttaaagaatgttgctttatttccagcatttagaagcttacaggcagatgctggaggtcacgggtatgttagggtccagtttgtgctgttaatatgttgtttcagcagccttgcaagttagatcatcaccctgtgtgacaaagcccagagaggttaagtgtcttactgaggtcacacagcttttaaatggcagatcataagttggaagtgaatcttctgatctcagttcttgggccccaagatagaagttttgctttcacttcccagcagctgctggtggcccttgtgtcattcctgttgagccctcccatccytgctgggatgagtgaagtgtgctgctgggatctccagctaggagaggtcgttgacactgcctcaagagctgcctcagctttaaggctgaggccaggcttccctcctggcatcctgggcttgagaatgagtggcctagggtggcgtgcaggagggagccagcctttagctttgtccctagtgcacacatttgtgtgggtttttgttgttgttgttgttttttggagaaggagtctcgctctgttgcccaggctggagtgcagtggtgtgatctcgactcactgcaacctctgcctcctggtttcaagcgattctcctgcctcagcctcccaagtaactgggactataggcgcctgccaccacacctggctaatttttgtatttttagtagagacagggtttcaccatgttgtccaggctggtctcgaactcctgagctcaagcgatcctcccgccttggcttcccaagtgccacaggcatgagccaccacacccagctttctgtgttcttaacccagcctgtctacccatccgggggcagcratgtcctgagaggccagcccagctgctggtcattggggagggtctcacagggtccctgaagctaaaccggaccttctgtcctggtcgtgacactgccgattctgttttcccagaatcatagaaatccaggagtttggatggtactgtgcagtctcacaccgttgagtgcagctgcctggcatcagaaagacagttttgttttcccttcctaactgaatagacctcctggttgtcttctagctgaggcgactgccctagggtcccgtcaggtcctgctactatgaagcccttctcgaaatctaattttaggtcagaaatagttttagtgatccgggttggctctggccaatrctgagcaaagttgagtggaaggtagagttcctatatacttctccccgcctccccgcacctgcagcctcccccattctcagtgtcccatccaccccacagagtggcacatttgtttccaatggatgagcctgcactgacatttttttttttttgagaccaagtttcgctcttgttgcccaggatggagtgcaatggtgcaatctcggctcatccaacctccacctcctgggttcaagtgattctcctgcctcagcatccctagtggctgggattacaggcatgagccaccacacccggctaattttgtatttttagtagagacagggtttctccaagttggtcaggctggtctcgaactcccgacctcaggcgatctgctctcctcagcctcccaaagtgctggaattacaggcatgagccatcacatctggctgacatctttttttttttttttttttttttttgagatgagatctcactcttttgcctaggctggagtcagtagcataaycatagctcactgcagccttgatctcctaggcttaggtgatcctcccaccccagcctcccgkgtagctgggaccacaggtgtatgccaccatgcccagctaatttaaaaaaaatttttttagacagtcttgctgtgttgctcaggctggtctgaaactctgggctcaagtgatcttcccacccaggcctcctaaagtgctgggattacaggtgtgagccaccacacccagcctgacgtctttatcatctggagccctgagtttccactgggacacactcttggtgctgtacattctgtgggtttagacaaatgtataatgacatgtccaccatggtagtgccacacagtcatgtcactgccccaaaaatcctccaagctctacctactcatccccttcctcccctctgcccgctggcatccaccgatgctctyactgtctccatagttttgtttttctccagcgtgttctgtagttggaactgtgcagtgtgcagcctttctagactggctgatttagtcgtatgcttttaaggccccttcatgtctttgcatggtttcctagctcatttcttgttatatcctgttgtctggatgtgacatggtttatttatccattcatctactgaaggacatcttgtttgcttctgagtttaggcaatgacaaataaagctgctgtaattagtatttttcatgtggacgcacgtttccagtgcctctgggcaaataccaaggcgtgcaattattgcattggatggtgagagtatgttagtttagtttttcaggaatctgttgaggccrcaccattttgcatgtccaccggcagtgaatgaggttcctgttgccccatgtcctcaccagcacttggtgctgtctgttctgagttttgggcattctaataagcatgtggtggtatctcattgtcatttcagactagacttttccttctggattttttatattattgaagtgatgtttgcccatagtggaagacttggtatgacgggccacagccacaggttcctgtgctacccgcctggccttggcaaggacctcccccagtccgcaccacctgagtggacagcagcagcctggagctggccccacctgctggcaggggacactggggaagggcctgtgcctggacttgtgccaaaccccaaccctactccacgcctccaacccatgatctctgtagctcctgccaaactatatgtttctaataaggtaaaaaaaaaaaaaagttgttacctgcacttgacctggttttatttattctcgagcccaggaagacaggctctgttaccacaggaagtagaggaagcactctgggtgcagtgtgaggctgagtctggtcaggtctctgtctcctgagtcatccctcagggagattttgagctctttcctcacccagtgtctctgcacagcagcccttgagctcttcctgcatgcaggggagttttctggatgaggcagtggcccggccacctcttggggctcacgggtggctcttttcacaaccacgcccacacactcaggcatggccgtcacagctctggtatcaagttctaatgtttggcccagtagtactgaaaggtgcttttgtggggcgcagccatggcctcacctgagcctcagtttccccatccataaggagggagtaaccccatctgtccgggaggttgtggggaccgagtggagtgtcggtggcactgtgcctgcatctccacgccctctgcagtccccatataaacctcccacatcacctccaaacgcccactgtgtggagcaggtagggtaggggctcacggaggctagcccctttcaggcccatgtggcgggagcctgctcctcagccctccaccctaagcctcatagtccaaggtaagatcagaagaggcctcagtgggcctgccctggctggcgctgtccatgtccaagtctcccctacagcccaggtcttggtcagtattgggaagctgaggcgcgtgggacctgcctgcctccccatccctccactgcagtgcatactgccccagagtggccactcgtacagggggcagggggactggcttctgctcactcagccagggcttgtggctcctcctyttctcctcagtggggcagccactgccgcctgtcactctgcctaccagccctgtctccgcaggctctcggccctcctccttcagctgcagtgggagctgggcaccctcatgcggggcgctgcttccaagaagcctttagggtcctcctgacgcctgaagcaaggaagttgcaagctgtgctactcagggcagctgggtgggtgttgygccctccctgatggggatgcgagtgagtgggtgggaatggtggggcccaccaactcctgcttgggctttttgctgctgttgccagttcctctccacaccccagcagcccagggtgctggtgatgtgcacgtggggccaggccctcccccagatgctcccgagccttgtcatgccagacactgaccctccccactcctccacagaccaccccacaaggcctgcagtctcctggggtcagctcgcctcctgcacttctgctctcggctctcggctcagtggtccctaacccttggcagttagaacagccctgccaggggtccctgtgtcactctagtttttgtctactccaacatttgtgcccaggggctctgaatgggcagggccacatctgtctccttggctgatgagttcccagggcctaacatgttatagcccacaccttgattgagttagcgccagccatatgccctggacttctgccttgctgtctttttcaactctcaaatcctgggcacatggtggttctgagatcacatctgcctagaggtacagggtagagttgtccagatgccacccggctagggaagtggaggaaggtgaggctccagctcaggtacgggtggggcctcccaagctctgaaggcagagacaggaagatgccccacctggtcagagcccagaaggctggacagtggggtctgtcatcagcacaggtggggagggggaggggagggcagagagtgggaatcagaaattaacttctggcctggtgcggtggctcatatgcctgcaatcccagcactttgggaggccaaggtgggcggatcacttgaggtcagattatcgagaccagcctggccaacacggcaaaaccctgtctctactaaaagtacaaaaattagtcaggtgtggtggcaggcatccgtaatcccagctacttgggaggctgtgacagaattgcttgaacctgggaggaggaggctgcagtgagcagagatcgcgccactgcattcccatctgggtgacagagcaagactccgtctcaaaaaaaaaaacaaaaaaacaaaaaagaaactaactttcttcctttccttcctacgtgggctgggagctgatgctgtcatggctggcaccgtctacatccaaatctctcctttttctctctctctctttgaccctccccttcccttcccctccccttcccctcccctctttttaaaatttttttcgtggcagggtcttgctctgttgcctaggctggagtggagtagcttgatcacagctcactataaccttgaactcctgggctcaaacgatcctcctrcctcagtctccaaacagaaacttttttttgtggcgattcactctgggcagtggagaggaggagtgaggttggaataagggagaaagacctggagatatcttgggggcctctggtctgtgtggacctgcctgtccttggatggatttctggtactgattgttgtttctgtctacctgcttgggacaagaggccatgaactcactttactgtgccctcgtaggttagatcacctttcaattgtcttcaggattgtccccactggtggacatctgtgtgtgcagacaagagagcaaagagctatgaggagtggtcagtgacccagcaggcctttcccgggccatgagaaagggatggggttgctggtgggcctgtaggccactttcttccctagcccctgttagggagctgggcacttctggggcagggcctgaggcagggccaactgagccttgggagtccaggtggagacagctggacacacgcctcccttccaggcgtctgtggagtgtggggccgtctggctgcagtcgttctgcgtgccttgcctgtcgggttgccggtatgggtcagaggttgagagtacaccatgttcatgtcactctctcctcccaagtgcggcagctcactcccagttcagggtctctgttttccacccaagttggagcaccaggccctgcatttggggagccagccctccctgccctggccagcagtgacagcacagccctggcttcagaggggccagatgcattgttatgctgcccagggcccagggcaagcccctcagggccgcagcacagagcccatcttttctggaaggtgtgggcacagcttccccctggcctggtgggccactstggtgacagcggcccttcttttcaccagggtttctgaattgccctgatgggatccccagccccattcctttattatctcagacaaatccctggacttgtagaagtggcttgtctccatgggataagctccatctttccttctcggtcacccttgtggtctggtctcggaggggaagatgaaggcagcctgctcttccctctgcttgtcactgttggctttagaagccacctggggattaggagcagcaggtgacaaggtcatggtttttcatttggagagtgggaagcaaatgaaatggcttttcatttggaggggaggaatcatgagaggagtgggggaatgaacttgtcctagcttttcctggtgtcatcgcagcctggccagtgggacttcacggccccmtttttccagaagagaaaactgaggctcagagaggctcactcatccacccaaggccatgccgcttagagggcagtggagctgggcctgggcctggctgctggactccagccctgctttctgacttgagctgccctctgccagcttcagcttctgtcacctcccctccttggtagttgagaggtctggggatgcctttggcagagaggaggagagggcacacttgtgtgtcaggagagttatcagtcgctcaaaagaaatatgtgacccagtaacagattgactcttttaacacattaataatgagattgagtagcgagtctcactgccataattagtggtgagctgaagtggcatttccagatagcagcacagccatcgttggatgcactaacagcacgtcagaggcacagatagtgctgataccactgtagcttattgcttatgtttcaaatggaaggaaatgctacgttttagtttatgaaaaacagatatgttccttcatcccactcaaattcaaggacacccctaggctgagccatgcaggaatggccgtccttgcacatagggcagtggggagctgtcccgtgcaggagacctctgtaagcagcgtcaccatgacggatgaggaagcttccaggtcaccgaatgtggcctcctcacagaggtaggtaaccccatggtgtggccagaacaggccgggtggagcctggatcctctcctagtgtcatggtctcagtgggggctcagaggaggttggggaagagccaggagccagtacaaaaagccagcctgggacaatctgaacatgaagactttaagggcagtgtcgtgctccaggccatttgcaaaaggtagcctgtgagtctgtattggtcagggctctcamaacagaatctaaagggagtgtgtgtatatgtatatttagagagaagagaggtaggtaggtaaatataaagtcatctttattttatttattttttagactgggtctcacactttcacccaggctgtactgcaatctcaacctcccaggctcaagcaatcctcctgcctcagtctcctgcatagctgggaccacaggtgtgtgccatcacacccagctaatcttttgtttttttttgtagagacagggtctcactatgttgcccaggctggtctccaactcctgggctcaaacgatcctcctgctttggcttcccaaagtgctgggattataggcatgagcccctgtgcctggtccatctttattttaatgaatcggcttaagcatttatggggttggggggacaaggtcaaaatctgcagggcaggacggcaggctggagacctaggttacagtggatgttgcagctcaagcctagagtccttctgccagaggccctccaggccttcgactgattggacgaggcccacccatacgttggagggtgatctgctttactcaaagtctactgattttggcctggcagagtgactcacacctgtaatcccagcattttatggggctgaggcaaaaggattgctaaagcccaggagttcaagaccagcctgggcaacacagtaagactccatctctactaaaaaaaaaaaaaaaaaaaaaaaaaaaattagccaggtgtggtggtgagcacctgtagtcccagctacttgggaggctgaggtgggaggattgcttgagccagggaggtcaaggctgcagcgagctgtgatcacaccactgcactccagactgggcgacagagcaagaccctgtctcaaaggaaaaaacaaaacagtctactgatttaaatgttaatctcatctgaaaaataccttcatggcaacatctagactgttgtttggccaaacagctggatactgtagcctaaccacattgatgtgtgatgctagccatcctgctgctggtggtgagcatgtgtgagaatgtcacctgctgccggtggtgagcatgtgtgagaccggggagagagggggctcctccccaggccagtggagatagaaccagggttttatggccaccatagccaaactgcagatggcaggcactacacctggggctgcgggtgtgcagtgggtacctgctgggagatttgaggggaggagggttgtggcacggggcagcgctgtctgggccgtcagagctcacggctgatgagggtgggatgccttccgagggccgtggtcactgtgtggctcttggccgggaagataccatgcatttggtctcaggagacaccaagcagacccaaaatccagcacactctgatgaagaaagtgaggaggggtctatgttacccaaaaacattgaatgttgaagaatggccaagaaacttgcagattagaggcagctgatgagggcagctgagtgcagtgtgccactgcccatgggctcccgctgcggggaggacaatgtgaggtcaccaccaagtcaggcaatgacctgggagacagacggtggcttgaagtgtcatattaataataaatgtgaagctggtccctgctgtgtcggcccagaagagtatttttactctcaggaaacatgctgcgtttaggggcacagtgtggcaaagtctccagccggccctcaaatggttcaagaagcaagtgtgttgctacatctaagtatgtggataataggcgtgggtgggggsgaggggcaggtggcagaaacgtcacagaatatggctgttctttgtactgttcttgcaggttttttgtaagttgagattgttttagattgcgtccaggagagaaggcgacagcagggttctctgctctcagacgcagctggcgtgtaagcaaggctgtgtctcacctggcctggctggccccgcgtgcaggtggctggaggcttgagggaccagcacgggctccacagcgtggtcagggccagctccatatctctgctcagtgcgcgtctgggcccttattctgttgtcctagtgctaggccatcagccccaggggtcagcagaaacaggagggactgctcctcctggaactcccctttaggtgggaagagaccaacctcgcaccccaatcagtgagatgctcacagccagaggccggggccccagtgagccctcacagttggaaagcctctctgatgacgccttgggggaggtgttggccaggtggatcccaggaggatctagactgcagtaggcacaggggtcacacagcactgagtgtgagtaccatgaaggggccagygtgggctgctgggggctgcagggctaagcctgccggccttatcaggcagctggggtgtgcagggagtgatccaatagatacttgggtaagattcccctctgaggaaactagagaaggtgccagagctggctgggagaggctcaggtcttggatggcagcagccaagaacctggggctcttgacgtcccagcaggagtgagtggtggttgggggaaccaggggctaacatgagggggatgggagcacccggggcggccagcccgaggtctgccyaggcctgcatgactttctctaaatctgtccgcggtcaagtggttgtctgacctggctgaacttcagcattctcttgaaacttctggaattgtgctagcgttcctgggaggacgccccctcgctcacacctgcaccatgttctgacctagatccacagcacacttggcagagctcctgctgtctcctgctttctggtgtgtgtcagctgctaggcaaatacccaatccatgtcaccttgagccgaaattgggcgcttttatttgaaggcaggtgacaaaacgttctgtaaaaagagcagctgagatttcagactccagctccctccggctgtcaggcaaggctcctccacaccccctgcaggtgggatgacggaagtcggtctgcagatgyagggacccgcgcctgcacagcttcagttcaggacwctggtcagccggtccaggacgcatgacctgcgcctgtgaagagtcagtttgtcagtttggaaggagaaaagacacattctgacatagcagggtgccattgcctcgtcattttgggagagtcctgtgtttcagctcaagccctgccacttactgagctggtggccttaagcaaggcacctggcttccctgagcctcagtctcctcctttgcttaaagttggcccccaagatgcgcagccctgtccatagaaggtccctgtgatcaggctttcctttgcttgaagttggccctcaagatgcacagcccggtccatagaaggtccctgcgatcagacttttgagggtgtgtgggcgctgagcacctggcagagcatgttctgttctagcccccgccccgtggatgctgggagcatgcagcccctccctagagccctggatcctgagccccagggcctcctgggtactctgaggtttggggacttgccctgggccagccctggccagcacatgccctgctggtcacaggctgcctctgcagctcctatccagcttggcagtgccacgtgcttcctgctgtgtggtctccttttggctctgtgggagctgtgctctgggttctatgctgctggtggggaggagtccagtttggtgacatttcttgtcaggccgtttgctctgaaggacgggcatctttctgggaagaagtcagttggcggatcttggtgtacgcttacccacgacctaacccaataacagggccgatccttttgtgagataagacccaggtggagaggcgggctgggacctacctctctccctgctcacctgccgggtgccttcaggcatgtttctcaggatgggcccaccaggtgaggatgtccacaccataccacactgctgaggttattactgggcagagaccacggtggacacttgccagcctggttgtggccagagtgaggtggggccggcaggcacagggctcctgtcagggtaggttggagtctggtggctgggaccacagctggatggggcagagcaggccctgccagccaggttctgagcacagctcctgagtgttcggattctgaaagtacagattgtaccgggaaggctctactttgtttttctgggtaatagaagatcccgttgttccgaaggtaagcacctgggcctgttagaagccatgtgctcaactttcaggaggatgaggatctgaagggactgattcattctctccagaggaacaacttggtgctgttggtgatgaacctgagcatcaggcagctgcacgggtcctcgtcccagagatgttcctcagtggaagatgcaggcagtgcttatctggcctggggcctccctgaggggctagtgcagcctggccgtggccacatcaggttctgtctctaaagttaaaagtgggctggtttcatgcagctgcctctgtcagacccagcaaggtggaggattttcctgagacagcacattcagggatctgtgcgcatcctaagcactcaaggtggtttatggccatgctgagggcaactgtcccccaaacccagctgctcctcaagcacgaaggaagactggggcctggctctcgtggcacctccttgatgcccacctcaggacacatatgtaacgcttgctctgtcctcactgggcctgcccatttgaggggtgaccctactctctggggtggttggattgtccagatgttcccagaagcctctggagccctcaatgggtttttatggggaatgccagcccatatgggcaatggctcagaagcagttactcctttctcagggggtctcctggtggggggtagcggggtctgagcagcagggtctacacgcacagggccttctttgtgttcctgagtgattaggatttacccactgcgtggtggtggaagcatcggaggtgtcagcatggcatgtagctgacggtggaggccagcatcttggaaggctttggttggctgcagaggcgcatgtgggtgaggtggcaggcaggacccgatgccaacctttgtggctggcaaggtcacatccctgaggtccagatgtggcagctcccaggttgcaggttcaaactgggaaggggacctaagagcacccttgcagtgagtactggctggggaccacgggtcatgccttgaagggtgccagattctcttggcatcctcttatttttctgtgatctttgcctatcttctgggacaggggtttgggtgctttgcagaggttgcagtgagcagacaatgagatgaggcggtaagagccgagtccggtgcggagctgtgaatcatccaggcggctgacgtgacacaggggccccgtgaaagggcgtggtttctgcttcagagacaggctcccttctcagaaccgcctgggtctctgagggcctcaggggcagccttggtgagtgtggccgaccaccggaggaggaaggacggtcctcctgggtcctgagtgtgtgccttggtagcttggcaagctgccatctccttctgacctgggtcacatccacagtggacactcccaggaccgcacccccactctgggtcacagagtacatcttgggtgggtctgttgtacatagactgttagaaacggggcagagtggcctgaggacgaggtgctcagcagcctctctcttcctgcccctgttgagccagtgcctgacactgaccgcccttggggccctgagctaagcttcacacagaagcccctccccagattccttcccaggttgcagggctcccacccgaggtggagccccctctgcagggcagcctgggggtgtttgtgctgtggggcttgttgcttcctgccaaggtcagcagggggtggctgtgctctcagggagaaacagtggctgaggggcttcgtgatgcatccaggagagtgccttaactgttttcatccccgtagcttgctttcttttttttttttttgagacagagtctcgctctgtcgcccaggctggagtgcagtggtgtgatcttggctcactgccacctctgcctcctgggttcaagcaattctcctgcctcagcctcccaaatagctgggactataggcgtgtgctaccacgcccggctaattttttgtatttttagtagagatggggyttcaccgtgttaaccaggatggtctcaatctcctgacctcgtgatccgctcgtcttggctctcaaagtgctgggattacaggtgtgagccacygcgcccggcccatccccgtagctttcccagtgactgtgaatgtggcacgaatttgggcaagggataccctctgcctccaaccaccaggcctcatggggcaccctgggctgggcctgaatctcgcctctaagatgagccttagagttgggggccagacctggtctccctggtctccctggtctccctggccctgggaggagatgggctcccatagtggagtgttagctgttttcaggggagaggtggaggcagctggaaagcttgggtgcactggggctcggcagaaggggccagtctgctctgtggtgaggctgaggacgggtggccttgggagtgtggcagagaggaggcgctctaatagcagttgagcttggaaggcccaaaagtgaggtggccctacagactgacaggtcgaaggcacacacatggccttgtctgcaggggagttgagatggaggcctggaggggcctcctggggagaggagagcccatgggccgcttctgctgggctccaaatagtcccatggaggtgaatggggtttgggacctcctagctgcctgagcaggaagcacagtggcaaggcagagctgcattctcagggacccaacccccacagaggcctggcctgggctctgatgaggggatggcccatgtcaggccctagagcgttctcattcacctcagaaacgtcaggaacccagggctaggagaggcccatgctgtgccctggaggaccccagtgacctaggtcagtcccttagcttcttccattgtcagatgtgatcagatcatggtcactgttgtctgggggaaagcagttgttatctggcaccgcagaccatgggcagaaggcaggtttggtgagagggcagtttctcgaaggccttcckttcaaaattcctaggtccagtacctgttgttggtgagttttagtgaatgattaaaaagaaaaacaaaaccccaccaaactcttgcactcctcttgaggagcacaggtggaggcaaaagagcattggttgtgaagcctcatgtgcttccttgccggttttgttatgttttgttttgttttgttctaaagacagtatctctctctgtcacccctgccggagtgcagtggtggaaccatggctcactgcagcctcgatcgcctgtgcttaggtgatccttctgcctcagcacctgagtagctgggactgcaggtgcgcattaccacacctggctaatttttaaattttttatttttctttcttgagactgagtctcactctgttgcccaggctggagtgcagtggtatgatcttggctcactgcaacctccccctcccaggttcaagcgattttcttgcctcagcctcccgggtagctggaatttcaggcacctgccaccacgcctggccaaagtttgtgtttttagtagagatgggggtttcaccacgttggccaggctggtctcgaactcttgacttcaagtgatccacccacctcggcttcccaaagtgctgggattacaggcgtgagccaccacagcgtctggctgccaaacgggattctgtgcccatcacactggcacttgcagatttgctctgtttcagacactgcagagtgcgctagaggggacagaggggcctgacactgtggcccaggtgcccatggagtgtacttgtgcagcaggtgcccacatacgacagygtctttccctgtttgaagaaaggcagatgcaaaaggtggaataataagggggaaaggcaaagttaaggtgttggcaggagggcttgtgccaggcatgggttgcatggctctgagatgcactstcctggaagcaggcctgggccatgcctggagattgacccatggaggtgcaggcagggtgggcagggcaggcagggtgcttgtccctcccttggagggagacttctgtctgtctgatgaagcagggctcagggacatagaagcactgtaacttgaagaattgtgtagtaaatgtttgtcatatcctgctaccctgggatcatgtgaggttggataagttgtgaaatcttcatggggaccccagggctcagttttcctgtgaggttgggatgaggtctgctgtgacctcgggcagccctgtcctctctcagtacctcattttcctcagttgtaacaaccggaacccgatcccatgcagtttaggatgagagtgggttagtgatggaggctggccgtctgtggtaccacgagtccttgcgtgtgatttggctgtgatttctacggacagggagtccaagcagctcccccacccccagctatgacgcaggaatggacagacatctgaggggcttcccatgagacacaggccactttctgctcacctgctgagcgccttctggaagaaggacctggatagtgtccaaaaaccctgcactgcaactgccaggtgggcggtggcatccggggaatatccagggagcatctgtggtcatgacccagggtgcatgcagacaaaggaatctgagagacccttcactgggggctgtggcagccacgggtgtaggcaggagttacccagagctgctagtttgggaggggagaggggagttggtaaagaatggcagtttggaggattttcctaaaatagagctatttaaaaaaaagatgggagtgtgatggctcacgcttataatcccagcactttgagaagttgaggtgagaggatcgcttgagcccaggagtttgagaccagcctgggcaacacagggagacccccacctctacaaaagagttaaaaaaacaacgtagctgggcatggtggcacagctrcttggggataaggtgggaggattcttgagcccaggagactgtggctgcagtgagctgtgatagtgccactgcccactgcctgggcaacagagtgaggccctgtctcaaaacaacagcagcagcagcaacaacaacaacaacaacaacaacaacaacaacaacaaaaaccaaaaagatgggaggarctaagacacaaaatcaagacccacccataaaagaaaaaaattgaaaaattccactccatcaaaattaagaacttctgtattttgagagatactgttaagagaatggaaaggcagtccaggcgcagtggctcacgcctgtaatcccagcattttgggaggccgaaatcacttgaggtcaggagtttgagatcagcctggccaacatggtgaaaacccgtctcgactaaaaatacaaaaaaataagctgggtgtggtagtacgcacctgtagtcccagctacttgggaggcagaggcagaggcagaggcagaggcaggagaattgcttcaacccaggaggcggaggttgcagtgagctgagatcacaccactgcacttcagcctaggtgacagggcgagaccctgtttaaaaaaaaaaaaaaaaaaaaaaaaaaaaggaatgaaaagacaagccatggactaggagtaaaatgtaaaatttatctgataaagctcttgtatataaaaaaaaaaacctcaaaacttagtaagaaaatgacccaatttttaaaaatgggataaagatttgtacagcttcaccactgaagctagaagaatggcacattagcctgtaaaaagatgctcaacatgcttaatcagcagggaaacccaaacatgaacctccacgagctgtcactgcaccacacacctaccagaatggctgacattttaaataagctgacagcactaaatgttgacgtggatggggagcaacaggaactctcattcgctgccggcggcagtacaaaatggtacagcaactttgggagccagcctggcagtttcatattaaattaaatgtacacctactctgtaacccagcagtcgggctcctgggtgttcaccaagtgaaatgaaaacacgtccacagaaaaacctgtccatgagtatttatagctgcttgattcattaattctccagactggaaacaacctgtgtccttcatccagcaaatggatgcacgggaaggtggcgtatttatactgcggggcaacacacaggatggatctcaaaggcgtcatgctgagtaggtggttggctgaatcatggccacagcagattccaggaacctgtgagtgtaaccttctgtggaaaaagggactttgcagatgagattaggttaaggatcttgagatggggaggttaccctgcattatctgggtggtccctgtttgtcatcacaagtgtcctcgtaagagagggacagatttaatgtagacagaagaggacttgaaggctgcatgaccccagtgggcagagattagggtgatgcagccacaagccagggagtgcctgagcctgcagcaggtgaagaggccaggaaaggtcctcccctagagcccccaaaaggagggagcctgctaacacttggatttcagacttctggcccccagtccgtgagagaaccagtttccattgttttaagccacaagtttatgctcagttgttgcaaggaccacgggaaactcatcttatgtgattccattgataagactttctggaaaggcaaaaccatagggacaaaaaaacagatccaggattgctgagggtgcggggagggtcagtctccaagtggggatgcaggaaattgggcagaaaggaaggtggcctgctcagcgtgctgtcctgggaaaagcaagcaaggtgcgtggagcgtgtagaggccacagttttgggcaatctgcatatttttgtctacaagatttctgaaaaacccttttccataagctttctatgcaccttcgtgaatgcagatagaaatatctgctgygggctgggtgcggtggctcacacctgtaatcctggcactttgggaggctgagtctgtcgagttgcttgaacctaggagttcaagtccagcctgggcaacatggcaaaaccctatctctacagaaaatagaaaaattagccaggtgtgttggtgtgtgcctgtggtcccagctactcgggagctgaggcaggaggatcacctgagcctagaaggtcgaagctgcagtgagccgtgttcacaccaccgcactccagcctgggtgacagagtgagagcttatctccaaaaagaaagaaagaaaaaaaatacttgctatgccggccactgaattacacttggcttgtagccagttggagtccctttcctgctcttacaggcccacctggcctgctgaacacaccatctgtcctcccaggctggcagaggagctgccgtgggtcctgccctctgctctgccctgaccgtggccacctggttccctaggctggaaccagtgaggtccacaatgtgtctgtccaagttccctagctcgtccctgagccaaccaagctcactgggcagatcttcctttgttttgtagttcacggagacagccccactcagtcactgtctaaactctccgtggcctcaatgtcctgctccagtcctgccaggaagtctcaaggaggattcctgaatagcgtttcccaatcatttgtgctttactggaaagggggggcctgttgtggggaggccaccgtccagggctcttcccgggacttcaccttccctctgctggaccacacgccgtggcttggcagggtgacccagctctgtaagatcaggacgtgtgtgctgacactggtgcttgggagagtcagcaagatggacttctgaagaaggaacagatgcattcctttctgtcatttcctgcatcaggggtggggtggcaggccttgcccagtagacagcagggagaacgtgctgcctggggagagtgggcacttctgctgagtgggtgcttctggagggtggtgggaaggatcatgtgtctttggggcagccttggcacctgctgccttgggcctcattgtccccaggctggtagcaggtatcctgggacctggccagattgggccccgtccatctgtctgtgtgtctcatctcttcactgtgccctctccctagtttctgtctttgctggagagtttttaaaacaatcctagatttttttttttttttttttttgagatggagtctcactctgtcgtgcaggctggagtgcagtggcttgatctcagctcactgcaacctccgcctaccgggttcaagcagttctcctgcctcaggctcccgagtagctaggattataggcgtatgccaccatgcctggctaatttttgtatttttagtagagatggagtttcaccatgttggtcaggctggtcttgaactcctgacctcaagcagtccacctgcctcagcctcccaaaatgctgggattacaggtgtgaggtaccatgcctggccaacaatcagataccttcttcttcacccgtaacttttccatttatattttatatttgttgaagggagcaggtcttttttcccatagatttttctgctttctgctctgatggtcgcttcccgtggcagggtcagcccagggcttctcagcccctgcactgcttgacatttggggcaggaggttctgtgttgcctgcagtgtgctgagcagcatccctggcctcccccgagccagatggtggggactgtccccgccctcagtggtgaggaccagaaatggctccagacattgcctcgtgccctggggaagattcacccaccacacttcctgtaaactggtcactcggcctggaggtggatttcgtaagccacttcctgttgcttcatccccggaagtgctctttgccggaggggagaggatcaggggattctggccctggagaggttcctcctcaccctttcctctgtctcagcattgaggactctcactgcctcccaggctctgcaccctcgacccttttcccaaaggcattgctgtctttacaggagtgtcctcattgagggggagctgcctacaggagtctcccagtctgtgttcagtagccccagtgggcgcccaggccaagtgaccgcagggcgcaggcatcactgccctgctgtgttgaggtctgttctccgagtcagggtctgaagtccagttgggtctggggagcaccagcctcggcacagctcagtgcctgcctgtccggccttgaagacccagctgacctgctgactgtgtcaggccagctgtggcggccctaccaggctccccagctcccacctggggccctggcctgaagtacagcagcgggggtgactttgtatctcaggagctcscagttccatacctcatgctgggtaatgaaagttggatttttgccactcgagggcctgagaggacttgtgggggtgatgacccctcagagggtctacagagactgggcaggcggtggcctgaggcatggctctcccctgctgggtgttcttgggtgtgagatgggcagtaccctgcaggtgtcatgtgctactgagttaccccgttatttaattaatgcagcctgaggccaaccccaaagcttctaaggcagcagggaaatcacctgtgctacrgtctgttcctgaccctctgtcctgcttcatagatgaggtaacraggcgcttggcccccctgacaagggttcggccatgacaccacgcatgttggctctggagggagcagccagaagagggtgtggtgggccacatgctgtcaggcgtccccaccaggccaggctggtgagcacagagggtgacagctggtcccaccgtgaagggacctagctggctctgcctgtctgcagccgacactcacctcctgggcccttgattggcttgtcagggcactgcaccccagctgcwttctgtgttttttctcatcccccccacccagtccttgtgttctcatcaccatctatttagcaccccacattcaaaaccccagcctcactaccgtaatttatgccttgaatgatcttttgcagaaacatcataagaaaaaagccttttctattcatgcatgctcactgtgcccgcgtcatcctctgcaaatccataggtccatttagggtcactctccctccttctgaagaacttctagaaccttcctcacagtgcaggccagatgctgacagaagattctctcagcatttgtttgagcgaatctttatttccctttctcttttcactgggcatggaattgtggtctggcggtgtttctccctcagcactttgaagatgccctcccagtgtcggggctggctcctgatgtgcagtgtcggcacctcggcacttggggcgactgttgtggctgtgctgatttgctcatgatgcgccacgacctggtagttttcctgctgggggttgacaaggcttcttgggtctgtggatttatagcatttgttacatttgggaatctctggccactcttttctcagatcccccgcctgccctcaggactccagttacttgcacgtgggatcccctgctgtcgtccgcaggtcaccgaggtggtgttcgtttcctgtaggcttcttactgtgggattcatctaggtggctcctgtggctttgtcttcaagttcgctgcccttttcttctgtggtgcctgctgtgacttccacctagtggccgtttcattccgatcctccgtgtctcagctccagaagcccctcgtggctctctcacgatacccgtacgtcttcctcttcagctgttttcctttaggcttggagcattccaagttcacagtagctgtcccaaagcccctgtctgttcagtcggcatctctgtgcttcccacgtctttgtgccgactcattttccccctggcttaggagtctcgttttcctgctgcttcacgtgtctgtagggttctgcttatagataccacatggcgttcttatgaggtgggtccctgcccgatggtccgcacagggctggccatgatttagacgggagttagccttagtgcccgtgtctgttaatggctgggtgcgtcctgtgtctgtcaccctcatgcgtgcgtgatgttaggagtgaattgctctgttgttaacaagggcctggtctcctgctggagggtggggatacagtgtgagccagagtggctgggagcctggccatgatgacggccacctctcatggggacaggcacttgaggttagccctcctggcatcatagagaaaggctggctctgtggcccctcagcccttctcctctgaggcatgaagtcttgttctccatacccttgggggataagcgacttggcaagaaaggagtcttgaaggtgacccacctgacagtcagctaccagaacctggttaaatgcctcactggatggcgtggcccacagggagcatggagccacggggtgggtgggagggccagtgtgttcaaggcctgtcaccctcagccttgcacagctggggctgccctggcacagttccttgggggggttgtgcaccctaactggttcctgtcccttgtcaccctaactggcctcascatcatcactgttttctgagccctcatccctggctcacagctgcacatgcagaggcctcgcatggacagtagacagggtgcttgtgttagccccgggccgacccctctgcagaggtttgcaccgcgagagacggggcccacctgctctctgcagctgctgcactgagttcctgctccagtcccctgctgctccctcctccagaatacccttcccacctggccttggtcgtgtgctcctggggcccatgaggactggtgccatgagtttgtgggggctccctgagtggggtgggctgggccattctgccttggtgcttcctttgctccgtgtggttcttgtgtcttacgccagttccctttcactcrtgcattgaaaatggttaacggacaggactctmctccgtctgttccagaactcgccgtgtgtgtgtcagagaatgttgctcctgtgccctgagtcaacaaagacggcccctgtgagctcaagggcagttgggaaggtgtagcgaacatcctgtaaaacgtcccatcttgtgagttttgaccctctaccctcgcccggctgcagccactccccactcccacctccagccctggacacctgctggtcggctttctgtctctttggttttgccttwcctggggatttatagaaatggagtcatacagcctgtggcatgacgtgcagccttctttcacttggcatggtcctctgtattccattgtttgattctctctccaccagttgacggacatttgggctactgccgctttttggattctctaaataattctgctataaatgttcaggtgtaagtttttgtacggaagtgtgtttttgtgggtgtatacccgggagtggaattgctgggtgtgtttaaccctttgtttaaccttttagaaaactgccaggtggcttccacagtggctgagccttgtccactcccgcccacgacggcagaggttctgggtcctcgccaacacttgctcttgtcagcttcttttagattagctgctctgatgggtacagagctatctcagtgtggttatgtttttttttattttttaaaatatttttatggctatcaatctargtcactatggttacagtttgcatttccttgatgagtaatggcatccggtgtcttttcacaccttaattggtccctataggtctctttttcatgtctgtgtttaaccaaattcttttttgttgctgttgttgagacaggatctcactctgttgcccaggctggagtgcagtggtgcaatctcagctcactgcaacctccacttcctgggttgaagtgattctcctgccttggcctcccaagtagttgggattacaggtgcccactgccacgcccagctaatttttgtatttttagtacagatgggggtttcaccatgttggccagactggtctcgaactcctgacgtcaagtgatctgcccacctcggcctcccaaagtgctgggattacaggcgtgaaccacctggcctgtttaaccaaatttgtagcaaaggtcattcagatgctgcttccccaaggtcccagccaggccgaggtcccctgttctctgcagtagcagcacaggctggtggttgagtcgtgttttggggtacagggctagcccttcctgagctgctctagacgagccccccttgtcgcagtagcacagtggcccttgtgactgcagcagctgtttcctggtcttggaacaggacaagggagtgggccatggacrtgttgcaccatggacagtggtggcttgcgccgtgaatcgtgctcgctgtggagtgggcccatgtatttgttgaggggtggcgtgyttgagaagcatggggcagtttctggggcatcacggcctgggtggtgttagcgtgcaggggcaccatccctctgttctcccctaaacagcagaatccttggggagtcttggcaaaatccttggagagacttggcaaagaagggggctcctggtagaccaaagtgaggcactcggtgcctcccactctgggcactatgcatgtcatatgtatacagctgcgtggtctaagctggccaagcagacccatggctcagggcacacatggagcaggtgctgaaaggccagccatctctcatgtcccaggcggcttccgctgctcctagcagctcctgtctttcccaactgatgggcactggatgtgagcagttggagggccctgtgccatctcaagctggagtcctggaacagtgctgagtggctccagagggcggaccctgggctgacccatggggtaggtgttgtctctgatactgtcgcaggtgtggagctgctccgcttaccccgggtcttccgacaggcctctccagactcaagtagtgctttgycctctggggagagctatgggcagaccagggtgggagggagtgagacctgagcagtggagacggagcccaggacggggtactatgaggacaggagcaaggcctgggtgggagggcatctcagtgggctggacctgagtggggcagtggggccaggtggtgcaggggtgggtttggggaccaagaatcatggtgatcagccagggctatgctgtggggtagcatctgggacactgagatctacgcttagggccccaggttgggaagagggaagaagatgcagaggtgcagtcctcctctggctcgcagttctttctcagatactgccagaaggctggtctctgaatagctgaagcgtcagtatttattttgagctcttttgtatattttttccttggaaattccactgctccaagctcagtgaccagctgtccagaagccatgtgactgccccaaggccgtgtggtggagctgtgcaggcctcaggctcccaccccaggctccaaggtggccccaccgcacctgctctgatagacagtgctcacccacctggttgttaaaagccagtgtttgtgagacaggacttagcctggttggtggtttcaggggatcagctggggctgtgagagtggagggggctgcttttgcctgtatgggtccttgggagagtcatgatccagggtcaaccctgacctgtctttgctttttcctggcagggctgtgagcaccttgagccttgcccttctctcccggtggattcacaggctggtggtggctttccaaggatggcacactccccgcccctgcatcctgggccttccgccagcctgttgcctgtgtctggaggccccattcttacctgtcatgtgtccccagccctctgtccatctgaggaactcctactgatccttctaaaaccctgctccggtgaccttgcctataattttcagagtgtgtgcatttcctttcccctctcctgagaacaccatcttcaccctgctccttctatacctggggagggagtctttgggtttcccaatgtctttattgatgttcccctcacctttttttttttttttttttttttataggattctgtttcactgaggccatctatccgatttcaaggaagccaaggggtaagtttttgtcttaatcattcatatttggaatcttgggactggtatagtctcaggtctgtccttgctcgctgggtacagcagcagctcatggcagtgtttgggccctgtctgccaccatgcaaggctgggttctaggcccccaggatagccccttggctggggccacaccaggacgtgtcgggtgcacgtcacaggctgcttgggcaatgggcggctctcctctcccagtggctcccttcatgcagcgatgtgcacctagcttccactctgatagggcaggggcccccaacccccagcactggactggttaggaactgcccacacagcaggaggtgagctgtgggtgagtgagcacgaccacctgagctctgcctcctgtcagctgagcctgttattagattcttacaggagcgcgaaccctattgtgaactgcgcatgccagggatctaggttgcgtgctccttatgagaatctaatgcctgatctgaggtggatcagtttcagccggaaaccatcctcccctatggctccctgtcccccttccaccatccatagaaaaattgtcttctggccaggtgtggtggttcacacctataatcccaggactttgggatgctgaggcaggcagatcacctgagagatctggagtttgagaccagcctgaccaacgtagagaaacgcgtctctactaaaaatacaaaattagctgggtgtggtggtgcatgcctataatcttagctactcaggaggctgaggcaggagaattgcttgaacctgggaggtggaggttgcagtgagccgagatcgcaccattgtactacagcccgggcaacaagagcgaaactctgtctcaaaaaaaaaaagaaaaagaaaaattgtcttccacgaaactagtcgctggtgccaaaaaggtaggggactgctgcattagggcacacaaggaccttggacatttgtctggattttggttgggagagaggttcatagaaactcagcaccctcatttttttgaaatatgttttcttctaaatgaccatcttatagaaaaatcagggaatgagagaaagggtgagtcatctaccttctttgaccccctgttttaggactcttcatctcccctaacctacccgatatgccttagaatggtttgatttttcttctagcctttattgcaggttcccctgcatctaggctggagtgcagtggtgcaatcttggctcactgcaacttcggcctcctggattcaagtaattctcctgcctaagcctcccaagtagctgagattacagacgcctgccaccatgcctggctaatttttgtacttttagtagagatagggtttcaccatgttggccaggctggtctcaaactcctgacctcaggtgatccacctgctgcagcctcccaaagtgctgggattacaggtgagccaccacgcccagccttgttttgttttttaagagatgagtctctctgttgccgaggctggagtgcagtggcacaaccatagcttacttcagctttgaactcttgggctcaagggatcctcccacctcagcttctcaagtagttgggactactggtgtacactaccatgctaggcaaattttatttttatttttgtaaagacggagtctcattatgttgtccaggctggtcttgaacttctaggctcaaatgatcttcccaccttggcctcccaaagtgctagaattacaggtgtgagccactgcacccaactttttttttttcttttagagttaccatgttgtacctaaatcaatttctgtccacagcctgagagctctgcacagctggatgtggggatatggacatgatgatccatgggcttccaggtgcagcccagggttctgcagagacatggagcctctaggagacgtgtgtctgtgtgtgctgataaaaagatgcattgcaagcagtgggctcagacgactgtgggctggggagtctgtaaccctcagggctggctgcagacctccagtaggagctgatggagcagtcctcaggcagagtttcttcctcctcctgccaaaccccagccagtttccctcttaaggccttgggctgattcgatgggaccacccagaccatcgagggtcatctcctttacttgctttcagtatctggtttgtggatggtaaccatgtccacagagtacctccagggcacccctagacgggatgtcatggaataatgaatctccaggggctgcagcctagccagttgacacaaccccacacttccatcagccccagttgggtcttgtggtcaccctttggccacctcctttttaccttccccaggacattctctcaggggtcagaggttgggggcaggggcgggctggcctgggcttgctgccagagcagccccacagtgccctctggtgtcctacagcagtcactctgtgccttctgctgctgcctgaccacccatgcccctctaccccaacctgagcagtgggggggcccctcatccccaacccccatctcagcgagcccgtcagatgacacactgcagcctggccatggccgaagcacacagtggtgtccttgcgtkcagcatgccatgtgccttgacctggagcctaataacatgtgtagcaggggcccaagtcactgagagagacctggggtggctacacagctaacctccttctagagacagggttttgccatgttggccaggctggtctcgaactcctgacctcaggtgatccacccacctcagcctcccaaagtgctgggattataggcgggagccaccgcgcctggccagctgcttcactttagtgggctgttagctttggggctcttggtcctsggccatgctgccggcagcctgccacagagcctgcactgggctcatcgttgtcggaacgccccctggatggtgttccttcatggatccagtcagccagcatcgcccaagctcctgtctggggtcaggtggggagtgcagcaggccccaatttgggatggatttcaaagggaagagatgaacggactctggcagggacttgagcggtggtggaagcaacgccccctggtggccatggtcaggtcagcgggaagggcagagcgggcctttgggccctgcggaagcgcctaggatgagcccctgtggcctgggctctgtgtctgtgagcatggactagtgcttaggtttatggcaactcctccccacaccctataacctggagccgggactgacctcagacatacccagacctgctgtgcgtgggccatctgagggccccatggcagcccactggtacgtgggtcactgggcccatgagcagtccccaaggagcaaccaagaccccattcagaaggctgagcaggggctgcgtttcaaaccttgtcccagaacccgggcaagctcttggctagtgcgaagaaagtggccgcattcctgggctgctcccatcccgctggcttccccacggtcccgggctggtaaccattaaccagcagcaaaacagcccgttaatcagagggctccatagcgcttcgtgtgctaggggaggcagggcctgtgagaacctcggtgtctggctccgggaaacctttcctaacactctccccaccttctcacccctgcatcctgaaggacgccaaccgccatgccctctgtgtgtcttccccttttcgccagcagcacgacactctcccgagcatcagctttgaggcctgtgtcaccccccttcatgcagcccctactccccgccacagctgcacacctggccctgggctctgcacctggcccctgcttctaggatggagtttggggggcagatgtctacacctgtgtggaaaagatccaagcagggtgaagggccactatgaagcccctacccacagagaagcaaggttgctgggcaggctcaggcaggggggccctgtcagtgctgactgggtgtacagctgccccaggccacaggcagtggcctggtctcactgccagctctctgctgagtggcatctcccctgaagccagggtgacagaatgagtcctgccaacctgggtggagctggggttttcctgggacagggctgcacgtgagggtgcccagcccttagtcactgtggggcaggagccactggcaacttgggcctcaggccaggaccacagggggcagtgggggttaaagagatgacagaggagggcgggagagccacccaggccaggctcaggttcccacagccactctttttggtttccctggacgtgtggtccccagcttccctggctggctcattctgggtcaccatgtcacctgtgcacctggccaccacagagcctctcacaaacttgagcttccctcatcccagcagcgtgtttccagtttcttgtatgaacgagaataaaagtcacatctgggaagggaggtgcaggcagggcagggtggcacctgtgtgtgttgggtgaaaaaacacctcagtggcgtcgaagcaggacagatctggatggccagggtcacccacatggctctggctgaggcttcagggcgtgtgtggttgtttgtgtgtgggaggttgtgtttctgtgtgtatggattgtgtttgtgtgtgtgtgtgtgtatggattgtttgtgtgtgtgggggttgtgtttgtgtgggttgtggttgtgtgtgtggttatgtgtgagttgtgtttgtgtggctgtgtgggggtttatgtctgggttgtgtttgtgtggttgtgtgtaggggtttgtgtgtggaggggtttggtgtggaggggtttgtgtgtggctgtgtgtgtgggggttgtgcatgtgtgggttgtgtgtgtgggttgtgtttgtgtgtgggggaggttgtgtgtggtgctgtcggggtggttgtatgtgtggcgctatgtgttgggtattgtgtgtgtatggttgtgtgtggggagattgtgtatggaggggttgtgtttgtgtgtgggggggattgtgtggttgtggggggttgtgtgtagggagatcgtgtgtggaggggttgtgtttgtgtgtgtggggggattgtgtggttgtggggggttgtgtgtggggagattgtgtgtggaggggttgtgtttgtgtgtgtgtggggattgtgtggttgtgggggattgtgtgtggggagattgtgtgtggaggggttgtgtttgtgtgtgtgtgtgtgtgtgtgtgtgtgtgtgtgtgtgtgtggttgtgtggtgggggcgggtggggagggtttctctgtccgagggtgaatcatcagaggctatatgtgtgtgatttctccgatgctgagtgcaggccgtttctgccttctctgaccctgatagagatgtgtgtttgtgttcaggtgtggcctggcatggtgggcccacaatggactttggccttgccctccaccagcacgctgtttgggccctgacccctcagcttgtgtttctgtatcagcatgacagggacaagggcacctgccttagggggacatgttcgaggctgagaggggatgctgggcagaccccagcagatgggacggcttttttcctggggcagtgttcagcctggggaaggggcaggatgggcctctggagaagggtctgcaggccgggcagactggctggtacagggactgcctgcaagcccagaccagactcttcctgccccaagtggccgaacccaggaactgttcttgtcttgggagcagggactggcactgggctgggtgcagccatggcttcccttgtgtgtccaaacactaccccaggggacaagtcccagtsaaggccacacagcagggccggggattggtgctcctccacgtgtctggtggcaggagccccgtcctgtctcacaggtgaggcacaggcaggcaaagcctcccatgggcgtatgaggcagctcagcaggggcgagggggcaggagattcagccacagtctctcccgcgctcatggtgtcacagaggaggagacggggcttgggtgccaagggggtgctgcagccaggggacaagacctgagggctccccccatgttgtcccctccttgtggactatttgagcgcccttcatgtgtcagtctaactgtgaggagctcatgccaaagcccaggcattagtttaggaagggccaactctgttgacagagggtctggggtcagcctggaatgcaatggcctctgatgtgatgccgccctgcactgagcctggccgggaccagcgcagtccgtccatccgcctgcctgcccctggctgtccgtcctcccagacagggctggagctttgcccagctgggctgcaggggcacagccaaagtcaggctggtgtgacccatgacaggcttgttgggggccagtgcttctgatctgtgagcccctgggacacaagcctacctgattcacagctgcagcaaatggagactcacgtggagtccatgtcctttgtggggggatgctgagagggggtcgccaaggaggggcgccagagttgcgcgtggctgcccaagcccctcttgttgcattttacctcatagggtgtcgcaggccaggtctgtccatttggtggtggggaaagtgagtcatggtccagacaaaccactttccaggggtcacacgattggggtgggggccctgcatctgggcaggtgctgagcactgtcctcagacagcagtgctgttgctgctgaaaacggcccctggccccatgcccacccgcataggtgcctgagtcccctctctacgcagtgtgtgttgctgaggatgggctgcctgtcccgtcactggctgaagagcaggggtgtgttttagggaaaagggccagcacattcctgttgtgagggttgcactgtggggactcatgcaggaagatgcaggctggggacctgtcctgccgaggacctcccagtgacaccccctccccctccacgcagcacatctccatcccccagcctgactgccccgcagaggcgcggacgttctccttctacctctccaacatcggccgcgacaacccccagggcagcttcgactgcatccagcagtatgtctccaggtgaggcgccgccccaccccagagcaccccgccggctcttgaggtcaccctgccacctctggcccagggttgagatgtgccccattgaaaccwtattgcctgagatggtgttgacagagtccrttttccaggccaggtggtgggctgggggcttgggccctcaacggatcctccctgcattgtcccagctgctgaccccagctcctggccttgtcttgcagtcatggggaagttcacctggactgcctgggcagcatacaggacaagatcacggtgtgtgccaccgacgactcctaccagaaggcgcggcagagcatggcccaggcggaggaggagacgcggagccgaagtgccattgtcatcaaggctggaggccgctacctgggtgagcagtgggtttggcagggctgtagggcagccgggcagctgccagtgtcgggagacatttggggyctgtycaggctgggcactggctgtgccctgcacagaaatgatgggtcaaccgaggagtcggtccctgagcaggacgtgcctggaccagagtctgggttgggaagagaggtatggccacatgggcctgggggctatgtgagggatagggggttgggttatggcagctgctggcttgtgaagcctgaggtggacaaaggggcctgagaactccaggagctgtgagttggtggtccctgctttcaggctgcagccttggggaccttcacctgtcagggagatcaacaggctccctgaagatgggcatgcagcctagggcaaggcccatgtctgtctctggaggctgcccccaccctcacctgaccagccagctcctgcccaacgccaccacagccggcaacaggcaggaaatgagcctcacaggccctgttgccagcgacccagcactgcaggaaagctctggccactcagcatcaacttggaaacggtttcagcagttgagaagccaacaggccttgacagtgggaagcacagtgctgtttgtttacagagctgcagcaccccgcctcttagtccaggcagagctccaggagtcatgggaactcattacggcaggagtagggtgccgggcttcagggaggagggagatggctcagagcagacgacagccttgatggctttttgagttttatctttaagaaaaggcrggggcatttcaattcctctctctcctccttccgaagaaagcacgtgatttccctttgctgagcagaggggttccctctgagtgaaaccccagatgtgggtgcaggggttggtcttcctggtcaacactgagtccgggtggacatgkatggccagggagcccgggttgtccatgatgttgaggccctgggctgtaagccccaagcacagggctgctgtggggagaacagttgaagagacagcgtgttttgttttttgttttttctttttttaaagacaggacctttctctgtcactcaggctggagtgcggtggcacaatcatagctcactgcagcctcaaactcctaggctcaagtgatcctacctcagcctccagagtagctgggaccacaggtgtgtgccaccacacatggctaacttttagattttttgtagagacagagcctcgctatgttgcacaggctggtgtctgactcctgggctcaaatgatcctttcgcctgggcctcccacaatgctgggattacaggcatgagtcagcgcacctggccccatatacatgttaataaatctgtgggtccttcagccaaaaacttgatcagaaatgtatcttagcacaccactttgggtacagtgagggtttttttttttttgagatggagtcgcggtctgtcgcccaggctggagtgcagtggcgcgatctcggctcactgcaacctccgcctcccgggttcacgccattctcctgcctcagcctcccgagtagctgggactacaggtgcctgccaccacgcccggctaattttctttttttttgtatttttaatagagacggggtttcaccgtgttagccaggacggtctcgatctcctgacctcgtaatccgcccacctcagcatcccaaagtgctgggattacaggtgtgagccaccgcccctggcccagtgagggtttttgaaacagtttatgttctggtaggggacgctgtctgttaagatgtgaatgtggccagatgcagtggctcacacctgtaatctcagcactttgagagtccaaggcagggagatcacaaggtcaggagttcgagaccagcctggccaatatggtgaaaccccatctctactaaaaatacaaaaattagccagttgtggtggcgtgcgcctggagtcccagctactcgggaggctgaggcaggagaatctcttgaacctggaaggcggaggttgcagtgagctgagattgtgccattgcactccagcctgcgcaacagagtgagactctgtctcaaaaaaaaaaaaaaaaaaaaaaaaaaagatgtgaatgtgcgtgttcctctgtctcacagtgcccccctcaggttgctcctcctccctgtcaatcagcctggccctatatgggtgagtccagccctgctgtcaggaccccactgaacagaccccagaggtgtgagcactggccctgggtattctgaaagcaaggctttctgggttaatttgacagatcagattttgagagataagatcagagtgatgttgttacgaagagcttttgggggaaggatttgaggcactgttgagcttgctcggccgaccctgttcccaaggatgccggggcatcattgttcaggacagagcaggggagcagcgtgctggaccctgcccacgtctctgcgttggggatagaggggaacctgctctccccagggctctgggcacagccacgcctgccagaggagagcttgaccaggcctaaggctggggtgccacttgcaccycagggtcttcagagcagctgctgaaagtggctccgacatctttactgactttagaaaaacaaaaatggcagccacatggggccagcataggactctgaagtgcaggcttgggagtgactgcctcttgcagttcagggacccccagtttaacatcagaagggtttacaaacagcccctgcctcaggttgggcaggatggctctggtttataataccagcactttggaaagctgaggtgggagggtcctttgggcccatgagtttgagaccagtctgggcagcatagtgagaccccatctctacaaataatataaattagccaggcatggtggtgcacacctgtggtcccagctactccagaggctgaggtgggaggatcgcttgagcccagaagtttggggctgcaatgagccatgattgtattacactccagcctgggtgacagagcaggatcctgtctcaaaaaacaaaacaatccttccccccccsccccccrcmcamacacacacacacacacacacacacacacagcccactagagtgatcaggtgatttcatacacgcacacacacattgcccaccagagtgatcaggtgatttctcacacacacayactgcccaccagagtgatcaggtgattacatacacacacacacacacacacacacacacacacacacacacactgcccaccagagtgagagtgatcaggtgattttgctgtccaggatttaggttgcctgtgatgaagtaagtaaggctctaacacagttctgccgcctgcacctcccacttctgaggctgggtgccctgcaggtgcctgccttgggcagcaggtggcgctcttggtcgcccagggtccccaaggagcaagctggcttttgctgtggttggtgtggtgcctcccaccagcactgtctatagtctcaaacctctgggcacctggtcagcagcactggcttaggacacggcagcgccctctctgttccctaaagcttggattcttgttgcaggcaagaaggttcagtttcggaaaccagccccaggtgcaacagacgckgtgccctcccggaagcgggcaacccccatcaacttggcgagtgccatcaggaagagtggtgccagtgccgtgagtgggggcagcggggtgtcccagaggcccttccgtgaccgagtgctgcacctcctggcactacggccctaccgcaaggctgagctgctgctgcgactgcagaaggacggcctgacgcaggcggacaaggacgcgctggatggcctcctccagcaggtgggtgccgccccgatgtcttgtctttaccagtggtctccgcagatggtcttgtgcgggtgggatgggccagagcatggagactgggattgggactggcaaggaagagcccttcctggggtctctcacaggttcagaacctgcctgagagccagggcctcctggattagaacaagcttagggggccatggatgcgtttctgggcatggccccgactgtccagggttgagaggtggactcagcatggagcccaggccctccttcactgtctgctgacacacgggccgtggggcctggcacagtggattcaggcttcagttgcagacgatttgtggactcaaggcctggggaaggaatctacacgtgcctggcagagcctggcaggcctcagtgtgaatcagctgcctgccgccctccacctgcgcctccgggtgaggggcttcacgtctcagaccatcaggcttccatctgtgacctgcagtgcccctccctggggttggaggctaggccatctggaatgtggtgctggcgagtggagcctgctcttgagaaacaccccgggcattggagcaggtgcgatggccctgactgccttccacccccctcacccatggaggttcctgaggctccaccttggcttcctggggtccctgggaaggggagtgactcgcactggcttcagaacattagccaggctatgcagatgcagccttgaggtgaactgaggatgggtctcctcggatcgctgctgtggtggaggaagagacatggctgagcctcttgcaccttttaggatgatggaagtgggatgttcggggtcacatccagcacctcaggaacacaggtgatgcctgcagcaaaaagcacatgctgtggcatgccgggatagcagctgtataaaggacgttcttccatgtttacggagctcctcataggcgtccctctcgggtgcgcggctggtgggaccctgttccacattccttgggaggatgtcagcctggccctcgtccacccccatcctgctcccaaggctagggctggcatggtgccagcaggagttgctgaagggagctcgatggagtcatcagatgtgggacctgcattggcctggccaggaggtgtctgtgctggtgcctggcttctccaggtgactttggttcagtgcctcctgggagcaggcctggccagcatctgcaggcagattgtcccttcctgtgccactgtgacttcccctggacagctcgtcygcttcttgcttctatattcattatgcagctgcttccccccaagcagctgtgggggtcagcaggacactgttggcttgtagaagaggagggggatgtgcctcacccagactggtcatttccagcccctcacaggccctcagacatgctgaggaatggcagtgacaaaactgcatgcctcaaaggtgcttggccctccctctgtggaaaaatctagagcagagatggaaggtgtccacctctaggactggctgagccccagggaaacccgcaagcctatccttcaaggggaggggtgttgacggctgagtaatatttagcaaagcctgtcatgagccataaaaatattcagcctttgacctactaatctggcttctgggaatcccgtcgaaggaaactgttgccaacctgaaaaaaactgcacacagtaatgtctgtttatgctacagagaaactggcagcagtttgggggtgggatattactcaactgttaaaaatgctcmccatgggcygggcgcggtggctcacgcctgtaatcccagcactttgggaggccgaggcaagtggattacgaggtcaggagatcgagaccatcctggctaacatggtgaaaccccatctctactaaaaatacacacacaaaaaaattagccgggcgtggtggcgggtgcctgtagtcccagctactccagaggctgaggctggagaatggcgtgaacccgggaggcggagcttgcagtgagccaagatagcgccattgcactctagcctgggcaactgagcgagactccatctcaaaaaaaaaaaaaaaatgctccccatgggatacgctgtgacgcagagccatgtcagatgcagcagaaaacagtgactgctatgcctgcagcaagatggagaccagagtgccctgtaggccagcacgcagcacccactcagggcagtgacctggagcttcctcagatccctctaaggcagacgttctgaatccatctttgttagcagtctgggagacgaacttagctttggtcaaccggcaacagcaaggcaggctggttgtagggaaggtgggctcagacgtggccccagaggtasccctcacccagcatccycagccgtggctgactcttccctgggagttgtgatcagaaatggggtggagcccagcgcggtggctcacgcctgtttccagcactttgggaggctgaggtgggaggatccttgaggccaggagctcgagaccagcctatgcaaaatactgagatcctatctatacaaaaaattagctgggtatgatagtgcatgcttatagcycacctacttgggagactgaggcaagaggatcgcttgagcccaggagtttgcagctacagtgaaccttgatcacaccactgcactccagcctggaagaaataggagccaggtgtggtggctggaatcccagcacattgggaggctgagatcagaggatcgcttgagcccaggggttcaagacaagcctggacaacatagcgagatcccatctcttaaaaaaaattagctggagtatagtggtgcacacctgtggccccacctacctgggaggctgacgtgggagggtcgcttgagcacaggaggtctaggctatagtgagctaagatcttgtatcaaaaaargaaaaaaagcaggctagaggggccagggggcaggtgatggggtctcagtactgcaggtggtagccctcccctttttggagccagcctggccccagcacctctaagacagttgagtctggacctgccttcatgaccctcattatcccttctgcaccctgaggattgtgtgcgggggaactgggggtgggagacatcacggatcggtagtgggccatcctctttcctctcctctgtctctgtctgtctcccactgtctctgcacaccctcccaaacccactrtcagatcttttttctctagtccccygtctctctcaggattcccacaaagtgatggctggctctgtcttgcaggtggccaacatgagtgctaaggacggcacgtgtacactgcaggactgcatgtacaaggatgtgcagaaggactggcctggctactcggagggggaccagcagctgctgaagcgggtgctcgtccggtaatgccgcctcccatcccccagcatgtccccacccgcatgaaggcagccagagcttacccasaggatgctggggtggtcttgtgtggtcctgaaggccacagggcttgggagcaggatggaagggtccaagtaggcctctctggccatcctccctactgcccacgtggtgccccagggtgtcccgtggtgggggaaggccacgctcacagagtgggacggaggtgtgagtcactggcccsgaccttggaatcttcagacaaaaggcctcagtctgctgagaccctcctcagctgtccccaacttcccttcatgcttccctccacaacctgggcatccccacagggcctgggaagttcactgactttttgaaaagagcctctcaagaacctgaagtagagagaaataaggccaaacgacactcccggcagggcaggcgtcattaagcagcgttaattaaatgcatcccctcaggctaattgggacccagggtcagaagtggcagcagctcaggggagcagtggttaaggaggcaggcggctaatgacttccttctccactgctgccagctaggggagctcgggctgtgaagcaggtcaatctgctaattagtccgtaagtgatttctcagggactcggaggtatttatgagtttgtagttgttttttggaagttcagctgtttaaagcagtaattgcctctggaaagcagaatgaagttgggggtccactctgctcccctgagagggtagtgcctgcctgtccaccctgggtgtgcaggtcaggggcctgcggggcactgccctggcttggcggcaggctggcggagggcacagtcttggcagaagacccgcccccatcctcataccctgtgtcctctcccttggccccctgggttcctcagacccttagggcactggaaggagaactgcccagagctagtggagtgaggtggagaaggctgggctgcacctctggggcgtcggggagcttccccgggatgcaggctccagagccgcctccagctcccctgattcaaggctcatgttccgtctgctgagtgagcttgctgggctcatgccagccccttggcactctgctttcactctgggccrgcatggggatcagcactgccttcacaagcttccactagcgtgcagggggcagggttgatgtccctgggccataaccacatagaaggtgacctgcggtgcccctctgcatagctgtttttttttttttttcctatttagcaccccatccctaagaaagccccatttatagcagtttttgacaccatggcttcgtgtatatcaaagcagggccttggagtatttgttaccagctgggctagcccagtgcaggccgttagcctagtgcaggccgtgagacagatgggatgtgggggcccaagtcactgcaggagcctccccagctgagctggcaccacatgtggctttkgggggtggtttctccactcatgttctctttgttcatgatgtccaaacccgatctgtccctggtatccaaatctcctctcatcactgtccatgggtcaggggtcctgcaggtccccccaagagttcctgattcctctgcccaagccacacactgcctggtgcccttacctccaacctgagccactcccctctcctgtgagccccatgccagagtctatatactcctccttcctgctcctccctggtgccaagggagcacagctcctggagcacctctctgaggacagggctccaggaggactgctggccacatcttcatgcccagacgatggtcctgctgagccggcggttgatcacatctagacttgtagagtccaagatgctttccctccacgttgaaggtcagaggcttcccaccccaaccctgtgctggtccacagagccaggggctggccaggtacctactctgggatggtgggcaccacggcccccgcaggctgaaaacttgccttatccrtctatccgtccttctgtcctgtgtgtggtagtggaaaggcctatcctactgcacaccacctcaaactgctcttggcaggctgctagagtctgtcctcctcttcctggttttcatctcttttttttttttttgtgatggagttttgctcttgttgcccaggctggagtgcaatggcgcgatctcggctcacagcaacgtccgtctcctgggttcaagccattctcctgcctcagcmtccagagtagctgggattacaggcatgcgcaccatgcccggctaattttgtatttttagtagagatggggtttctccatgttggtcaggctggtctcaaactccggatctcaggtgatccgcccacctcagcctcccaaagtgctgggattacaggcgtgagccaccgcgcccagctggttttcatctcttgctcttttttattctccttttaggagacttctttgacatttctcatcctgtctcttaatttactattatttgtagtttctttttttttcttgagacagagtgttgctctgttgcctaggcaaagagatggggtttcaccatgttctccagactggtcttgaactcctgacctcaagtgatctgcctgcctcagccacccaaagcactgggattacacrtgtgagccaccatgcaaggcctattatttctagtttctaagagtcttccccattgcgttttcgtaggagcatgttcttttttttttttttttcctgagacagagtcttgctctgtcacgcaggctggagtgcagtggcatgatctcggctcactgcaacctccgcctcctgggttcaagcaattctgtgcctcagcttcccgagtagctgggattacaggtgcccgccaccacgcctggctaatttttgtatttttagtagagatggggtttcaccatcttggccaggctggtctggaactcctgacctcatgatccacccgcctcggcctcccaaagtgctgggattacaggcgtgatccactgtgcctggcctaactcatcatgttcttatttaatggaaaggatgtctttttctttctttctttctttttttttttttttggagagggactctcaccctatcgcccaacctggagtgcagtggcgcaatcttggctcactgcaacctctgcctccccggttcaagcaattctcctgcctcagcctcctgagtagctgggattacaggcatgcaccaccatgcccggctaattttttgtatttttagtagatctggggtttcaccatgttggccaggcttgtctcaaactcctgacctcaagggcctcagccttccaaagtgctgggtttacaggtgtgagccaccgtgcccagccaggatgccttttttttttttttttttgagactgagtctcactctgttgcccaggctggagtgcagtggcgcaatctctgctcactgcaacatctgcctcccaggttcaagtgattcgcctacctcagcttcccgagtagctgggattacaggcgcctgccaccacgaccggctaattttgtatttttaagtagagacagggtttcaccatgcaggccaggctggtcgggaactcccaacctcaggtaatctgcccatctcagcctcccaaagtactgggattacaggcatgagccattatgcccagcccaggatgtcatttttaacctactctaaggatgtttattttatttatttctttatttattttgagacggagtcttgctcgtcacccaggctggagtgcagtggcgcgatctcggctcactgctagctccgcctcctgggttgacaccattctcctgcctcagcctcgcgagtagctgggactacaggcgcccgccaccatgcccggctaattttttgtatttttagtagagatgaggtttcaccgtgttagccaggatggtctcgatctcctgacctcgtgatccacctgcctcggcctcccaaagtgctgggattacaggcgtgagccaycgggcccggcctctaaggatgttttttaaagaataacagctttattcagatacagttcatgtaacacaagtcatccatttaaagtgagcagctcagtaacattttgtacgttcataatattgtgcagccaccacctctgtctagttccagaaaattttcatttccccaaaaggaaaccctatccccatcaggagtcattctccccattccctcccatgctcccagcccctggtaactactaatctgctttctgtctctattgatttgcctgttgtggacatttcagatcaatggaattatacgctgtgtggctgacatgtaatctgtggaaacytgtagctgtgaggaatgttgaatcaggaccgggcgtggtggctcatgcctataatgtcagcactttgggaggcttaggtgggaggattgcttgagcccaagcctgggctcaagttctagacaagcctgggcaacatagtgagaccctcatctctacaaaaaatgaaaaaattagccaggcatggtgttgtgctcttgtgatcccagctaccctagaggctgaggtgggaggatcacttgagcacaggagatccaggctgcagtgagctgtgactgggattagaggcgtgagccactgcgcccaacctattttctgttttttttattccagtcatccctgggtgtgtgtgaagtggtatctcgttgtttgttttttgtttggtgggtttgtttgttcattattgctccttgcagggcagggctaacccataggcagtgtgcccagagtagccagtgtctcgttgttttgatttgcatttccctgatgacacatggcattgagcatcttgttatgtgcttttagccatttgtatagcttctttgaagaaacgtctattcagagcttttgtttttccaaggacacgaaaactggcattttttatttatttattttatgtttttgagacggagtctcggtcttgttgcccagactggagtgcaatggcatgatctctgctcactgcaacctccgcctcccgggttcaagtgattctcctgcttcagcctcccaagtaattgaggttacaggtgcccaccaccatgcccggctaatttttttgtacgtttaggagagacggggtttcaccatgttggccagactggtcccgaactcctgaccttaggtgatccgcctgccttggcctcccaaagtgctgggattacaggcgtgagccatgggcgcccggcctgttgatttattttttaacgttttcatctccctgtggagtctcttttcaaatgtattttcgtgttcctctgttttgaggtctgacgtttgttgcctggaagctgcagtgcagccgttggggacactgcacagcttggggcctctgaatcccgatgtgccctagtcctgggccctgtttcttcttctcctgaggccacacatctggccatcctgttgtccagctgtggcccaggtaacttcccaactgcctggaggagtggcccgagcctctttgctgcctgacagccctgggctcactgtcctgcagccccaccagcagtgatgaggatctggagtagagctgtgggggatggccctgcagcagtctgttgtcccctgaggtcgtggtgcctcttgctctgggccctggattctctggatcctgcagcagtcaccactcatgcttctgctatgctttccggtgtcttcactcctccttttgtctctgccttgcctgtccagtggatgcaaatgcctgttctcagttttctgtctttaactgggagttctgtttatgtccacatggctctcctctcaggccaccagggaagtgacacctgcagtggtctgtagcctagcccatttgttagggagatgggctctgggtgtcactggctggcagaatggccacggccctggacttaagtctctctgcagggcctggaggggcgctaggctgccctgagatggcacagcccccgggaattgaacagttgggtcagagaggatacccataagctgcagggttgctggcgggggtgggggattccacttgcccagatcacatggagcgggagaaggggcatgcactggggtgtttcttcccttcttccccagctgcatcacctagtcaagctggtggccactctgccgccctccagatcctgctgtgacctgggcttccaggaaggctgtctcatcctaggccagggccctccgttctcttctgcattttggacagtttctgcagtgagcgttctgaacaggatgaacagctgtctttaaaagcagggtccagcaccctagcgtgtgtccctggtctctccggtagcaggcacctacacaaagtgatcctcctctgggctcagggggacagtgagtggggaagtcctcctttgggtgaagtcgggggcagratggcctcaggcccaggctcctgtgaccccttggccctgctctggatttgggaggaggggggtcccttccttgaggcatctccaccgggcccccatgtggatacaggcctggggcccctaggccccctcagcaccttctgacctagccctgcctctccttcgcaggaagctgtgccagccacagarcactggcagcctccttggagaccctgctgcctccagccccccaggcgagcgtgggcgctcggcctcgcccccacaggtaagtgaggcatgcckggggtgactgtcccaagyacctgcagggcactctgtgctgcatcagtaacccttgtcaccttcctcaccagctctttggagcatgagctgctccaagttgagccrcctccctccgcccagggaccaagggggaagctgtcgggttggggttgggggcagattcctgccagtgtggccgcagcaccccagtgtcacagtgcggaacctgggacggggggcggctccctgatgtgggctcaaccctgggcttcctgctcctgtgtcacagttatcactggggaagcatgctgagcacagcagcgctttagaccagtccccaggggtggcccgctcacacactgggccctgccctccccctgcatcgatcccagcaggctgatgggccccagctgaggccaccctgagcggcacctgggacctgacttggtgctcgggcgcccccatgtggccagcgtgggccttgcaggcggcgttgggttttctagccaggccaggggattkcctgttgctgctcagccactctgtgctcccctctaaaatgatctctgctcctctccagaagcggctgcagcctcctgatttcatcgaccccctagccaacaagaaaccccggatatcgcacttcactcagagagctcagcctgccgtcaacgggaagctgggcgtgcccaatggccgtgaggccttgctgcccaccccgggcccaccagccagcacggacaccctcagctccagcactcacctgcccccgyggctggagcccccgagggcccacgaccccctggccgatgtcagcaatgacctgggccacagcggccgagactgtgagcacggagaggcggctgccccagcccccactgtgcgcctcggcytgcccctgctgacggactgtgcccagcccagcaggccacacggcagcccctcrcgcagcaagcccaagaagaagtccaagaagcacaaagacaaggwgagggcggctgaggacaagccccgggcccagcttccagactgtgcacctgccacccatgccacccccggagccccagcagacaccccaggtaggtgcccaggcaggagggcgttgccggggctctaagtactggccccacacccgcctcaccctcatggggtgtcgagggggctcaagctgtagaagccaggggaggggaccctgttgccccaggccccatcagatttgccctgtgtgcctggcacytggcaccctatgttcctgcacctggtcctctccctgcctgtctggagtgcccggtgccacttgcagtcaatgtgccaggccagcactgggggccggaggcccagagccttgtggggaactgaggccgcagaaggggctaacatgcagagaggaatggggcccaggccccagctctgactgcagggaagccccaggagccagggccatgctgaggtctgctggggttcagggaagacagtgggggcccaggcaagccagccctattcagggagaggcagcacaggtgcagatgggcagatcctggtgggagagggatagcacctggacctctgtaggcaccgtgcgactgttgtggactgtaggtttctgctgtggggacagggcctggcaggctgggattggggagccaggagacctgggcggctccgagaccacagcccaggcacctaaactgagcagcagtagcacccgcctagcaccgtggccatgagcctgcgcagctgttcatttataggaaccagcagaagcagtggccagcgtgcagcggctgttccaccaccatgtgcgacaggggctgcagtggtcccatgtggcgatggcggccagttgcagatggccacttcgctctcggcgccagctggcccagggcagcccaggtggtgtcacctgctgtgcttttgggttgtgtctctggggaggaggctgagtcaggggattcctgggatgagggtgggagcccttctttcattatagctttgcgttgctcagagggccatgccccgtcccctgctgtggctggagagcaggtcctcacaactgtggctgggtcttactggataggaaggargactttcggggttgggtcagccctgcctcgtgctgggcttcccacctcccgtgggactgcatgtgggggccgacggggagaagrtggccttactccctgggcagcctctctgaccagggccatgctcagggcaggactcctgattcccaggacacacccacaccccacagccagacctgggccacgatcaaatggcaggatctgccatttgagacccttggcccggctccagggtccacagaccactctgggctgtgtcccttccttggatgcccagtgcctaggtgccaagacaggcctggggactcaaggtggtttcctgtctggcctggtgcgtgttggcccctaggcagttcatccccggcccaggggctgtcatctctaccacaggtgagaaaatgcaaagcaggggtagatgtcccaagcaccaagaaaaggacagtggaggcaccagaagctgagcctggtgctggtggtccatgttaccagagtcctgaaggtggtacttgtgcagggcatgtcttagctgtcctgtgcccgtgcccaggacaagcaagtagagagacgtgggctgtgaaggggagagatggggagaggagctgctgtgggggtgttctccggggcsccgaagcagggaccagcttggccggccccacacagccagagcttgagtaggagtcgggggccgctgaggtttgccaagggctggactttgaaggtcccactggtaccaggttgagctgaccctgagccttgatttccccgtttgtcatcctagctggtgaagatcttggggcatgtcaaatgaggtaatgttgaccagcctgacacatggcagttatctgttgtagaatacccacggagtccactgygtggcgggagcatgggcttggccttcgcagctgcgccttgcctctcacttccttctggcccggaccagggtcagacccattcaatacatgcccattgagttgcgtccctgggaaggccacagcctcttaaagacaacccaggtgggggtggtggtgatatggaagacagtgtctggcccaaagtggggagtgttagaaactttgtggggagtgagcttcgtccacttttgggaatttggcagcagagaagctgctgtggtcagcccaggtgtgttacactgagagagagggctcagcaaactggagatcgcagactcctgctctctcaggggatagtgcagagggcccctgaaaatgtgcactagggccaggcacagtggttccgcctataatcccagcatgttgagaggccaagtcaagaggatcacttaagtccaggagttcaagaccagcctaggcgatataggcaagcctcctcatctctactaaaaagtaaaaaaaaaaaaaaaaaattcgccaggtgtggtggttcaygcctttaatcccaacgctttgaaaggccagttcaggaggattgcttgaggtcaggagtttcagaccagcctgggcaacacagtgagaccccatctctacaaaaaaattttgtaattagctgggcatggtggcatatgcctgtagtctcacctacttgggaggctgaggcaagaggatcacttgagcccaggagttcaaggttgtagtgagccatgatcgcaccattgcaactccagcctgggtggcagagcaagaccctgtctctaaaaaaaaaaaaaaagtgtattgaggatacatctgaaattgataaaatcatttctgtatcggaaagaaagccactgcaagaaggtctagaaaacgcactaaattgtagttgtggtcttaggcgacgcgcacttcagtcttcctgcccctcccctccctgatttccagaccctcaggggtgttgtcttatgtggccggggcaccccaccacatggctcaggagcaggacagctgcctggggtgccatctagccatcagctgtgctgctttgggcaggcccctgaaggggcgaagggctgagcgtcatcatggacactttgctcatggatggccgattggggtggcccatgggctcctctggctggccctgtcctggagctgccttgtggagcgtgcaattcagtgtctagtggaaaggacgggatgatctgggtggggcacagaccaagggcgtggaactttgtcagcagcaagagatgcaggccctgctggccatcttgtctttgtcctgtctggccagagactgggatgccccagagactcaggtcaagccaggggtcatttgttttcagcttagtgacctttgacatgcagtcagtggaggcagcaagggcctggcctgggggaagctctgaccggttgtgcaggctttggccctgcagttccctgacctgtccgctgtttgccaagaatgtgactgtggtgatgcctgggtgctctgtgtcctgcagggctttgccctggacacgcaggtgcacgctgagctctgctcaccacctggagggcacgcccaggtccagcagcccacagttgccaggtgcgaggggctcagcccttgcacctgccacacagtcatcccctctgctatccctctatgtccctccagcagcaaagtgtacagttttcatgcatgtccccatcctggcgtgcttcctgccraccggtgccatgggcvcagactcaggaggtatgtgtttgctctcgtaggtttaaacggaacctgcagcgtttccagtgttcccacgtccacgtcggagacgcctgactacttgctgtgagtgtttgtctgggccctgcaggccaggcctcccttttctgggttcagaccccctcccccagcactgcaggttatcagaggtagaagccactgcaagtctgagtatgtgaattccaaacatagcagcctcttctgggccaggccccctcataatccagggaatcacccgagaggccaggccgccggtggagccaggatggccacttcctgggtggggctgggtccttccagcctccactcagtggcccctctctcctgtttcaggaagtacgcagccatctcctcttcggagcagcgccagagctacaagaacgacttcaatgccgagtacagcgagtaycgcgacctgcacgcccgcattgagcgcatcacgcggcggttcacccagctcgacgcccagctccggcagctctcccagggctccgaggagtatgaggtagagcccccccgctgcctactgtgccctggctctggcgggagccagggcccacttgggcgcgcaccatcgccaccacgagcctagtggcctgcttggtggccccagagtctggcccttccccaggcagcgcttctccccctggtgcactccatgcagcaaccccatggttctggcccggccctggggtcctgttgtgggagtccttgaaggcagcccagcttgtcagcctcctttgcagtggggacagctgtgacccacctccttggatgggggcgagccggggtacatggatccccacatgtttgagcgcctggggtcctctcacagcctaggacacagggctcttggtacctgtgccaaaccctcaggagactccgcrgctgagctctgtccagcaccctggggcccatccatgctgccacaactatagcagggggaggtgacaggtccctgtggtcctgggaatcaggactcctgtggtcccctggcttgagctcacagctcattcagctgccctgtgtatacagagagtctccacccttagcctagccttggacgtagccgccccacctgccacctttcggaactggtgacctgactacagggctgggccctgattaatcagatgccggggtctctcctggccaaggcccctttgccttccaaagacgacgactcatgatggggttctaggggctgcgagccacgggttcttggggcatctctccttccccttccctccctctttgctgcacccccccaccccctccccacccccccacgacatggatacttccttgtcctgccacgcccccacaacagcagtgccccacctgctattgcctccaggggacccggcagcctttccctcatgccccacccactccggagctacagccgctgtgggcccctggggtgttacttggccttgtccttgaggctgccccaccctcccatgcccccttctcagagcacctgggaccactcaatttgggtttcctgtaggcggggacacattctgttttctcaaaattttgtttttcttctagactactcgagggcagattttgcaggaatatcgaaaaatcaaaaaggtgagtgtctcttgtgttggggtgggctccaagtgagccatgggagctggagggaggagggtgggcccggggcagcctccctgcccgctacttccaaggtgtgggggaagagcctttgagtctgaggccaaagttgccccaccacccccagctaagtcttcagctgtggcatcctggcccagccacacaagctgtggaggtgcgggggaccaactcccactctgcccttggaccacaaccctccttgctgggcaccaagcccaggtttttggtttgrgggggacactggcctgcttacagcggggagcagcacccagggcggctctgtcctgagcatgactgtgctgtcccacagaccaacaccaactacagccaggagaagcaccgctgcgagtacctgcacagcaagctggcccacatcaagaggctcatcgccgagtacgaccagcggcagctgcaggcttggccctagccgccctccccgatggcggggatctgggagggtcgggggagcaaaaggcggtgagagaggatttatttaaaaaaataaacccgaggaagatgctcatctgagccagcaccgccggctttcagggcagcccctgcagacgtctggccctggcgggtggctgcaagcccacctcggccctccctgcgcttcctgagcagtccctgcttatgatgggctccccaggaagcccactgcctcctccctggctgcagcctccggggttcagcctcctgtctcgccagaagactcctaggcccttggggtggcgcgcctgccttttctagttttatacaaagacagccacttttagctactgctratgagacttgagtctatttttgtacaaaagagaagcaaaatcttttttctaaacctgtgcctccctctcctcggacacccagggtctagccgctgccctgggtcctgcctgcagtattacagaggtcgtcgaaaggtgcagctgcgttctgagggcgtggggaatgggcaggtggcctctgctggtctctggctctacgtttaggcacccctttccccagcctctcctcctygggcagggtctctgctccagcaagcaaacagggtggcccaggtggctattttgagaactccagctggtgcccccagacagctgctcagagccaagggggcagagggctttcagcgcccccaggcctgccctgctatttcaggccctcagctgtcgggggccactgtgtttctgtgctccaagttgagactcggccgcagcggcgtcagacttttctttgcgatgtcctcggtttcccatttgttgctgctgctgctcattccacactgttgagaccttgtggtctcgatgctgctggcctccctccgtccctctgtccacttgtgggtcctggggtcgtcttagcagagccaccgccaaggtttgcactcagggaggggctgatggagggctgggcgccatggggtcagggaggccccagggacccatgggcagagctggggagccaggaggatgggtctgcctgctctgggggtgcaggctctgcagacaccccaattgctgctctgttgctgtgcctagtctagtgtcccccaaagcatcggggggccacgcaagtgtgggtgtgtgagtgtgcgtatgtggggaccccccagggcatggtggggtctgaggcgtgtgttcccatttagggctgaatgaagccatgacttggaaaggtggtggggggtggatggcggctgtgactcagggcccagggatcacatgggggtcactgctgccatcagcagtcaggcagggagaacagaaatgcaaaaatacagatgtctatttttctaaactggggggtggaggggtgcctcctgacagcttccaaagagctgactgtggagggcccacagtgtatcccacccctgcccgagagtctctctcctttgggacccccgggttcccagagctccgaggaaactgatccttcatgtttcaatagctgttgttgtttttctctttgggccgggccgggccggggaagggccgagcaggctccaggaggcctccagagtcagctggaccttgctgtgtcgcccgcaggcagccctgcagacaccggtgaggtgggatgatttcaggaggtcccagcccgggactgcccgcccctctgccctgggaaccagtccaaggggctgtcagttgaatttgcctttttgttgttgttgttgtttttgttgtttatttgttctccttttaaggaattatgaagctaagaaaagttttgtgttttgggggttggtggacaaagttctagctgattaaatatggtctaacttattgatactatttttttttcttttaatgttgtactgtggagaaaaactattttgagccatggggttggtgtttacaagaactttccacttttgccaaaatgttacaattgaaaggcatctatgcgtcttcagtttcctgatattttcttaaaagatctagtgtcctttttgtacactaaacaggtgaatgctgacttttttcattctccaataaatttcactgaactgaacctggcagcccaggctgcctggctggtgtgtgtggtgtgtgggtgttggtgtatctgtgtgtgtggtgtatggtgtgtatgtgtgtgtggtgnnnnnnnnnnnnnnnnnnnnccccccagcactccgatctccctccgttccacctcatgcgccgactgccgtacagggacaaacccggtccagactcccttctctccgcgtgcctcatgactgtgtcggcgtcgcccctcagattccggtctgagcttcggggtaacgtgggctcttcgtgctctttcagggcccgttgcggttcatgcaatgcttcttcctctgccgttcgagctgtgtaggctctgtcaaccgtcgctctgggcctacgttctgccgccactggtgcgctttcgggtcgtgccctcctcgtgtgccactcggccgtgtgcgctctgttcggctgtctgaagtcagtgtctggtgtctctgctgcggcatttggtcgtgttgggctctttggtctggctgcggtgtgtgttgcggtctggctgtggtgtgattgtcggtgtgggctttgcgtagctgtgtcgtgcgtgtgtaggtgtaagcagtgtgcggtgtgtgttccggtgtggggtgtgtggtgtgtgttgggcatgtgtgtggtgagcatgtggtgtttgttggcatgtggtatgtgttgggatgtgggtgtgtgttggggtgtggtgtgtggatgtggtgtatctgggtgtgtggtatgagggtgtggtgtgtgttagggtgtgtggtgtggggtgtgtgtggtgtgttggggatgtgttgagggtgggtgtgtgttggggtgtgtgggtgtggtgtgtgttggggtgtgttggtgtgggtgtggtgtgtgttggtgtgtgttgaccggatgtgtggtgtgtgttggggtgtgagggtgtggtgtgtgttgggtggtgtgtggtgtgtgttggggtgtgtaggtgtgtgtgtggtgtgagggtgtggtgtgtgttgggggtgtgtgtgttgggtgtgtggtgtgtgttggggtgtgggtgtgtgtgtagtgtgtgggtgtgtcacagcctggtttctgtggtggccgtccctgtcctgtggttgggggtgggctggcatcaggaggtgatgtgacctgggggcgccataatgatgagaaagggttgttcaggggctctggctgggaccagataagaaggcagagtttgcagcctacctgagccgttgcctgagaaaggaccaaatcagagggccctgtaggtgacggggagcgcgggggtgggggcaggctgggtcagggcggagggatagggagccatagcaggtgtgtgagcacagcagtaccctctggtgtggatagggtgggctgaacccagcattgggattccttggccccctgtggcaccaaaggctacaggagtggggctgggggtgggggaaaccagctgtgactgtctccctctgatgaaagcagcagcaggtaacggtaatattacctgttcttcccacactggggcaggggcatcccctgtgccactagtggggatggggaaaaggcctgacgggagcggcggtggtgcaggtggaacgagccaggggccatggagaacataacactcaacctgccagccaaggacaagaaggggtgcatttagtaagcgataacaccgaagaataggaccgtgggcaaaggtcctgggcctgcagctgtggggggggcctggcctccctgcccgtccgtggccttggcccaagttctaaggccacccaggaatctgaggggcgcgggaggggaagtcatgcagcccagtggggcagcgtgtaccctgctcccagcatagcctggccacgctgttctcccaggataacatctctgtcccaacatcccagggccaacaccaacctcctgcagctcacggtcctgcctcccccggccctccaacgccagccctaagccaactgcccagcaatactctggccatcacccccgcagcctgcagaggccacagtcagtcccctgaccttcctgagccatggatgccatcagtctagtgccccggatattcaggagagccttcccaccctcatgacctgggcaccctggtagagaggggctcagagctgttaaaccctctcctgccacctgccaggggccccaattgtcctctttcaacgggcacccctgttcctgcagccccctcctgtaccaagctccacctgggctctgcaacacagcagtgactcagcctcatccctgccttcagggagcccacactttgctggggaataacagtgcatctcaccaccgacttcagcacacccaggcctgactgtaggggccaaaccccctccttcggccttgtcaactgctgggagtggaagcagcccagcctctatgccgattccctccagctgccctgtgccagctcccatcctccggcaccctctacaggtggccctgtgaacacaggctccccggggctgggtcttgggaccttcctcatgtctctcaactacacaggttcctgaatcacgtgtcgcctcgaggcacaaactccccgattctctgatcctccagtacctacaggatgtccaacagttccattcccagagatggtatcggactccacaagttatgggggtcagtcccacagggctgcacctgtgtcagatgccacctatacttctggcaagcaggctaataaattgcgagttcccatgaccccacttcaggtttgataattgctggaacagctcacagaactccggaaaatgctcacagccaaatggaggaggcgcacagggcaaggtatgggcgggccgtgaagcttccatgccttttccaggcatgccaccctcccagcccctccatattttcccctaaaccccatttttttttttgagacagggtattactctgttgcccaggctggagtgcagtggtacaatcatggctcactgcagcctacacctcctgagcttaggtgatcctcccacctcagcctcccacgcagctggactacaggtgtgcgccaccaagcccggctattttttgtttgtttgtttgtattgagacggggtttccccgtgttgcccaggctggtctcaaactcctgggctcaagcgatgcgcccgctttgacctcccaaagtgctaggattacaggcatgagccaccgtgcctggctgactgcctatttttcggcttaggttctatgaagaatgtgtatcaatgtgttgaaacactgtagatcttaaagggagcagactgggtgggggaggggggccagcctgcccagacttcctagactctgggtagcattccttcctccagggtatgggcaggaccctcccggaatgagggtcttcaagggagcaggcagagagtgacctttgccggctttgtggctttttttttttttttaaggggagaagggctccagtgtctctgacctgccttggggaagaggaattctggtttctatggtttccaggggagaaaggggctagaggcaggagggcaggagaaggtcggagagactcgattctgagctttccgatgccctgctcaaagcgcggggcaggccaaggccccataacttgaggctgaggggagtttctgtgttctgagccccaactgtctcatttgcatatatgtgattgattaaatcgttggccactggtgattgagctcaatgtctaaccaagaaccaggaacaaacaccaaatactctttcacactccctatccccagccctcagggtctgcccaagaccccaaactgcctcccacgtagccaatttttcatctgccctgtctgggtggctcaggtggcttggcctgtagttttctttcagtgaactcctcttcatgtctcaaaacccttgccagcagccccctcatctggggagcctgtcttgcaggggccctgcctgtgagttcccacccactggggcgggggtgtcccagtccacttccaactccctcagactggggccccttcagggtgaggcctggacccagagtcttaagccctcatcctccaaggtcaggccctgtctcttgcaaacgttcccaactatccaccttttgggccagctccagtggtggaaactttccggcctccaggcgcttgttttggaaagttcctgggggagctgccccggcctgcccgctgggttcccacgctcccttatcagcgcgcatgaggggggcgccctgcagtgcaggcctcattcctcccctgcctcggccctgcccgcctgtgcgtcccctcccctttccagcgaacagcctcccgctccggcccactcctgccaagccctcctgctgcaggtggggaaacaggccaaacaggccccatccttgtgagccccgtggggacagagtgactttgtcccccgagatggatgggggcggacatggggagccaggggatgggactgcctggtaggtgctgctgcccacgaagggggagtaggtggcagtgtggctccgaggagattctggctttggagttctggtcctctgcctgtttcccctgcagtgtctctgacccagaccccctacctacccccccggaggcccagcttccctgcccagctccaccccctggcttgtggctgggctcatgtgtagcctcattgtcctcttgtaaaggggggataggcagccatgagcccctgggggctgcggagcgagcgaggtgaacctatacgcgccgcgctcgtggacgcctggccacttccgccaggcggggacccgatggccacggtggctctgggttgtcgggcctcgaaccgggtctccagacgttgggcccctccctcccagcgcgggagaggcggggaagggggcggggcgggggaggggccgcagcgcttttctccggaggtcgcgcgcccgagagcccgcgctgtccgccgccgctgcctgagtcgactctgcgccggtgagtgcggttcggggcagggacggcctccgtggggacccaggctggcttggccccggccgcttagagtccccgctgaccccctgctcaccccgggcccccagcccgccgcgatggaggccgccgcccagttcttcgtcgagagcccggacgtggtctacggccccgaggccatcgaggcgcaatacgagtaccggacgacgcgcgtcagccgcgagggtggcgttctcaaggtggaccagggggctgaggaaggaggcgtgctggggagagcggggcggctcggggagaagggcacgggacccgggattcactgcgcggcctgtcttcaggtgcaccccacgtccacgcgcttcaccttccggaccgcccggcaggtgccccggctcggggtcatgcttgtcggctggggcgggaacaacggctccacactcaccgccgcggtgctggccaatcgactgcgtttgtcctggcccacgcgcagcggccgcaaggtgggggcgggaggggcgtggtgggtagggaggcttggtgggagtccttgcgggcgggggcgggagcctgcagggggcggggctctgcgggaccaggggggctgtagggggtggggttccgcggggcgaggggctgcaggggcgagggacctgcccgggtctggaggcctgtagtgggcgagggacctgcagggggcgaagctctgtggggcgggagggcttgcagggggcggggcctggctgcaggcggaccccgtggaagggtttcgcgaggtagcggggactcctcgggagtcttacaggggcggagcttaaggtgccggaggtctcaggggaggggcctgggggcagcggcttccgtcctggctgtgagcctggaactgaaaaatgcccgaaagtggggcggggcttgagagtctaggtggggcccaggccgggtcgcggccctttcaccactcccacccgtcacctcgccgtgtctgctgacccccaggaggccaactactacggctcgctgactcaggcgggcaccgtgagcctgggcctggacgccgaggg

SEQ ID NO: 96291 - DNA, 12251 bp, Homo sapiens
gttttgcagtcaggctaactgcatttcaagtactccatagctccatatggctaatgtccactgcattcaacagcccaggcagagaacatttccatcctctcagaatgttctgttggacagggttgacctagagatcagcagaaataattggcatttggtgaagaagagctcttgagatgagagtcatgggaatagaaaatagcaaagctaagggaatgggtcatctcctaaggagggctgaatgttagaatatgttggcatcagtaggcagaagaaaaaacaagcagaacttgcacaacgttttggaaaagtgggagactcaccacagcataaaatcctggcaacaaaaagaagagagaattttagtgaagagaaagtggcgccaatatcaaatgcagcagagaagtcaaggggaaagaaaaggagaaaaaaaatagcgtttagtaatctgaggtcatttgtgacctatcaaagctgatgcagagttgggaagagatgtcactaaataggaatgccaccagctttctcttgtgctagggtaggagtttgggatctaggaacagtttcagctgaatgttagggacaggaggcttgtcatggaggatgtggaaataaaagtggaggtgaggaacagagccaggacctgagaggacaaagcaaagggatgaaagattgtgctgtcgccatcaagggctccaccaagggtccaattttgtttttgtttttttccaagaaaagaaaaatgagtacagaaggaggggaatctgcaggcagtggttgagaggatttgaatgcaaaggatatctgggaaagcccgatgccttcacagttagaagggagtaagaaaggaggtgcaagggtggggtaggctttggtggctcagacagtgggtggtaaaggaaactgtaggtggccttgagactgtggtcctctgagattggaacggtcacttgaagccaacctgtcagcgtgatctgcctgctacttcccacttcccttccactggattctttttgtgattgctttccatttggatttcagtttatgctttatgtgctttatttcattgaatccatgtgaacatttgggggcagttgggcattttgattctcatttccaacctgaggaaactgtggtagagggtggttaagtaactggcccaggatcatgcagcaagtaagtgacagagtagaaattgaacctgttccctctggtgcccttaatgtcctctgtattcttcacccagtgcactcatgcaaccagcctattcctgctatcgtgactggcttgctacaactgtgatcatgcccacataaggctgtgtttgctctctatagccataattctcctgtcattactgagaggtggaaaaatgtttgaggggaaataacacaaataacacttcctggtgtcaacccagcctccrtaggggacaaaaatgcttagcaactctttcaaagtatccaagacaaaacttgacctttaagcggtttctccatttagagttaaatttgtctttagcaaatatggtttgaataaatcaagacttcctgttttagctatttaatggggaaggtaatawttccaatctgattttaaatttttcttttgccaaatyccacagggcaagaaaaaaaaaaaaagaacgctaaagttcaggataaaaaagaaacttcccaagaagtgcattggtacaaaccackgctgtggtcatcataaatgtcttttacttttactttccaaaccaaagtctagggtttccatggtaactgctttggccccagctggtttgcatcatgttgtttgtatagaagccagtggagcagggctcgactgtgtcacaaagttcaggtgtcaatatggatctcccgggacaaataccagaaagaaaaatattgcatgcaacaccttctcctacccaaccgctactttcccaaaccccagcactctgctactgtgctgaccaaatgcccagggatttccagtctcccatcctctcaaagtcaaacctccagctgcatccagttgtgacttctgtatatgtctaactgtgtccattggaagggaattaaagcagcaggcttttaatttacaaatgttgcatccattcgaatgttcttgagcaatagtgtttcataagggttacaacatagattcaacaaccccagccaagtgcaaacttgagaaattgcagattgccttcctgtgattcacccagaattccagatggaaattatttctcaaggtcagtgcaaagctccgtacaaaggtgtctcctatagagaacatgtggtgtgaggctggaccgagggtcaaggcttccattcctgtttgctccttgaccttggcagagttagcctgcctccgagagcttctctctagccataggggaatcacatagtttgtgcctttcctccccacacacccttcccaccatcccaccccaagacctgctcctattttctaggcttggtgagggcactaaggaagaaatatgcctccttccgccaaattacttccatttcttaaaataaatcccagcttttctcttctgggaagccaccccagagtggactaagatctcaaaatatcttttatttactttattcaagaaacattgagagtctaccaggcgccagacaggaacagaccctgacttcaaggtggagactagcatgtaattaagcccaatgaaggaccaaaatcattgtacaggtacagtcagaggaggctggttttccagtttgaagtttaggaagtcaaaaaacttcttcaggccgggcatggtggctcacgcctgtaatcccagcactttggggggccgaggcaggtggatcacaaggtcaggagatcgagaccatcctggctaacacagtgaaaccccgtctctactaaagacacaaaaaatgagctgggcgttgtggcaggagcctgtagtcccagctacttaggaggctgaggcaggagaatcacttgaacccgggaggcggaggttgcagtgagccaagattgcaccactgcactccagcctgggcgcagatcgaggctccatctcaaaaaaaaaaaaaaaaaaattcttcacagagaagtgaagcaccacttaactagcacccttattactttctaataattagcatgcatagtccatcattatatcatatgctttaaatacacaaatttgcttgcaagtctatcttgatatctattgaaataaaaatctctaatgtaaagacctggttttcattatactgggtttaatatctgacttgtccaggatagagctagtcacatggtgagggtcaggtggccttaactctggttccagagctgaggggacacattagaggacacactggtggtttacctgagggggtggccctatgcagacattaaggagggaggcctttcctctgtgtccaggtaaggaatggatccacatctaaggccaaagctacagaatagggacttgcacacagtacctttatcttctaccacttttttgatagtaatggcatctacatttttaccatttcaaatttttgaatgaccctggttctcccttgctttgtgccattgggaagcttccttctctccagggctcagttcttcaccagctgaatgatgaaagtggcttaggtgatcatcttgtaagctctaaattgtattccataggcctaacctgaatcagtcttatcagcttggaatcctcagggcctaagcacagtagtaagtcctgaataaatatttgttcaattaaattgaagagactcaaagtcaagtcctgcattattggagagcatagagattccagttattgtcctctatttcagatgagcagcggggtgaagggtctggattttctactcatcactaagcctcggaaggtggtgtcagtgactgggatctgcttgtaagctgctccaacttggcttcttcagatatagattcatacagagcctagacctgtgccttgctttgttaaatatctgaatgtaaaaaggaaaaatacatcaattgtccaaagtacttacatgtggtcttataaactaaagaaagtaaccacatagatttctggtgcctgaaaaaaagaaaacatgttgtagaacatctgtatcattaaacgcctgtcctggtttgtactcaactacttggcttaactttgcacagtcctgagaaatacaagtcttgtgattggtatagacagccaactggagcaactcaagccggaaaaacaacacaattgtcctggttgtacattgcactgcatacaatcactaaaagacaattctaattctgtcttccgtattactttggtagagactaaagtaatgtattgagataggaatcaaaggcagtaaaagtgggaacattctgagcatacatgggaggtactgagcttctactcattgagccttctccaaacatgtcagctcactcaggtgtgtgtcagaatagcccttgcaaaattctctcataaagcaaagcttttttccttgtgctataacacatccccactgtgggcaccggttaggcctcaggctatctagcccaatggctactgtacactttttttttttttttgagacagagtctctctctgtcacccaggctggagtgcaatggtgccatcttggctcactgcaacttccacctcccaggctcaagcgattcttgtgcctcagcctcccaagtagctaggattataggcatgcaccaccatacctggctaatttttgtgtttttaatagagatggggtttcactgtgttggctgggctggtctcaaactcctggcctcaagtgatctgccctcctcagcctcccaaagtgctgggattaccggtgtgagttgccatgcccagcctggctattgtagactttaataggactcttaatttgactttaatgtgactacttctcttcctatctgtgcttcttcatatagactctgcaccgcacctggagatattttatcccacataatcaatgtcagacaaaaataaatttaaaaagcttttttaaaaagcctgaagaggtccaggcacatgcctggtagaggaaggtgaattctatatgcttttttttttttctattgacaaggacaaatatctctcagcacttatatactagccattgtatatctacctttgtttagtaatcacagttctattaggcagagtgaggtgagggcccattacccagttaggaagtggcaaagctgagattcaaaccaaaacccttggattctggaaccaagggctttcccctgtactatgctgccttcctgggctggtcgtttgcccttctctcagctctttggaactgcattcactggcacacagtctgaagggacctaagcactccccttcacttgccactcagcccaaataccactgctggcccctcctgaagagcacagagaagagaatctccttctgaacaatgagcagagattttgtttaaaatttctcacatctctttgtagtttatttttgtaaacttggcctataagacgctacttatttgctcttatatgtgttacctgcagttttaagaaagaactaccagaccaacaatatcactttggttttggtttatgtagcctaaataactcgctacacgtctcttcttaaagtgtttaatgagagtttttagtgaaatttgctgttttgtggaaatattcacactaggtgatggattatttgaaattttcttcctaatgcagcgctgctgtgtaagaacatcatcattgttcagtttggtgggttttctcttcaaggtgtagataacagtagaagggacttttgcaggattagcatttacaatgctttgtcagtcagggtcatgggattagactcactgagtcagtcatcagtagctccattaactgagacataaacagattcattaaagagtggaatgaggtccaaagttgatgtctttgctgagggtcacactgagctaccagctgcatcatgagcatctttagaagtcagcaccttggcaaaagacatgaagaccaaaatcaagaactacaagactgccccttttgacagacgcttccccaaccagactaggaactgctggcagaacttcctggacttccacctctgtgagaaggcaacaaccgctgaagggtgtgatgtctctatgtgtgaatgataccagtgtgtgtacaagttcttctgccctgctcctgggtttcagtctaggatgacagctgggctaaaggcacatttcctggaaagatctgaactggctgcatcttacccctcctatgtccttcatccttctcccaggcaaagggaaacctgggtacatggtgatcctcaccctggggccctgaatcatgacttaactatgaataaaaatgctttggaaaagcagggggaaagaagtggaaataacaaaaaataatgaatcagggagggcattccagggtgcattccagctttgtcagtaacccctttgaccatgtcactgaatatctctatgaggaattgcatttcctacctgacatagtttgagtatatccccacccaaatctcaccttgaattgtagttcccataattcccatgtgtcgtgggagggacaagtggaaggtaattgaatcatgggggcagtttcccccatgctattctcgtgatagtaagttctcacaagatctgatggttttataaggggcttctcccttcgcttggccctcattcttctctctcctgctgcgctgtgaagaaggatgtgtttgcttcccctttcagcataactgtaagtttcctgaggcctccccagctctacggaactatgagtcaattaaacctctttcctttataaattacccagtcttgggtatgtccttctagcagtttgagaacagactaatacactatgtgagaaattgggtttgtaaaaactgccccaactacctcaaaatagtgttgttggagaggaaaagaatttgcacactacaaaaagttaagtgttataaaaatgtaagattgtcttgttacttagatcacaaggcataaagaattgctagctaaagtagtagccagttcccttgtgatgagttatataatggtgcagtcagttgataagggtcaggccaccaaagaaaataagtgtttaaggacatatacggcaacatgacagagtaacttgatttctatgaaatgtagtaataaaaataggggcttgtatttgcttgacattggctttctttttaatttcattgtttatgatttatttttcatacacttaaaaaacatcatggtgcacaatggatttgagaaaaactggccctttacacgatgatttgagagcttggtatatgtggcatcaaaaatcccaggaaacaagtgaagaattaaaatagaagtctgcatgttttacctatccagcaaaaggtggaagtggaaaaagtccagagttccaactggatgggtcagttctctgccagatgttggtgtcctgtagacccrgccagaggacatgctttgatactctgcccttggagatgcactcagtattgtcagaggaatacaggtccaaagtgaagaactatctgactgcaggggctgatggctcttctgggctggtgggatctacgtggagattgctgtgctctacaaggctaaataacactcatgagaatctatggtcaactgaggaaagagagaatgttaatttccatgtctggaaacatcagaaatggctgaataatcagcagatgtcctgatttgtgttttggtcttcctatctgtagatgaatgcaacttaaaaacacatcctaatatcaaataggaaaagctccccctttccacccatctcattttagtttttcacctataattattcttccaggtaaaatttagaattattttgtctagttctaagtaaactctttgttgaaatgctgttaatttataaatcagaatggataaaactgatatcttcacaacctaaagacttcgatcccagaatgtattacttctttcaagtcagttcatctttgtagctttctctattgtttattgtatacattgcttattaaatgtatcccttggtattttatagttttgttgctactgtgagtagaatatttacattctaattacaattaatgctggcatataagaaagctatagattttaatatatttaacctttacccagctaccttcctgctttcttattacatactactaataactttttccagctaataacttttgagttatccagacatacaaaaattatcaatgtttactaactctgctcctcctccttctcaatacatataactcaccttttccttggctcattgcattaactattatttccagaacaatgctaaatacatgaagatatcctattgaaatataaaaggctttcttttcatrtcaacagaaataagttattttgaagccatatgccagcttcctcttcctctccatagtttcttaaacacttgctgatagaaacaaaatctcattcagagaagtatgaaagacagtcttgaggaaaatatgcaagccgaatgaattgtctctgctttgccttagcaatatggtgctaggagaaggtgggatttagggactgattgtatgtctacttatcaggttcctacatgttttacagcagcttaattgctctcaagaggagtgactgagtcattgctgagcttcttagtttgtgctgggtcagagcagttgcctgaattttccagcaccctatgcaaagttctgccatggagatagctgggtgtccttctgaggtgtttactttgaattttatttttggttccagtttgaacccatattcaaggtacccaaccctgacaagcaaaagggagacaaaatttatctcttggttctattcccaacccattcaaaaatagaaggcagtcagagttctcaggagctaagacgatggggggctgggttgcatggcttccatgtggcgaggtcaagggaaatcatccggccagtgtcactgctgtaactgcccaggctgagagtcttgtctgtttcccactggaatggggtccagtgaggcttcagactcaccagtgttagaaataaattttatactctgagaatcagagaccctcttttcttctgcctactctcatcctttatcgatttccacacacacgtatatctataactttactaatatacatacatgtgatcgtgcacccgtgcaatgggcgctgcagtgtgccttctgtgtcccttccctatggtgctgggagggccaatgcctggcagctcccaactgtgtctcactcctggtggctgcccactgcaaatgagagtctccttcttcctgcaggcagccaacatccaatgactgggcagctgtccagagcaatgctgccttccccgggatgggctgaggcttttgtcctgactgcatggcagcccagcttctccttccaccccatcctgcttgcctccctcccccacaggtgtgacaaggagggcacatcctcctgcaggcaaacctccgtctcagagtctacttcccagagcctgtttctcagtctacttccctgccctagacaatctgcttgaactgttaaagtgtcatcatttttctcattttcttttcttttttgtttgttgggagcgactaacccctcttcatctcttgtgccatacaccatcttcagcttccttaatttctcccaagaaaacacatgtccacaacctgatttgtgtctgccagtgttttcattaagttttctctgaacggtgtctgtagtctattgtattcctcctttcctctatcaaggatacttatctagtttccagacttttgcctccgcaaagagtgcacattgtttacagaggtccctttatacctagatgcttttacttctatgggagagattcctaagagggggatttctggtttaaagggaatgcgtgcttgcaattttaacgatgttgccaggtcactttctcaggcgtctgggacagggtttcaccagcaaggcaggagagcagcctgctgcttgttctcaccatgagcgtcccacctggagatcccacctgaagatcaaagggctaatccactccaaagacttcgttcccaacttcaacatttctcgctgcaaaccgaatctcctcccttcccttgtgaaaggaaggggagattgggagggggaagagaaggctggtgggccagaggagcgtccctggattctcagatggctccttcctctaaatggatgagaaatgtggggtgagaccagcaggcctctgtccccactccagcctacaaaccacacggccaggcccaggtgtctcttagggagaggtgggagccagcctggagcacaggactccacagggcagggagcccacagcgcaggggcggtggctgctgacagccccagagaccatgacaaggagcactagacagcaaagaagatgcaaggatggaaaggaagctgcatgcagcgtgttccccccaaggcccaaaagggtccttcattccctgcgagtgaaactatgttcttcttgtcctggaaagaaaacaagaagacaattggcatgtggctgatctacccaggctggaaagaagaaagattgaagtgactattctcaaatttaggaaaatctatttaggatatttggacacagatgtacctcctccagtgtctaggacattgggtgtgacctgacacttccgtgacctctacaccctttccaaactggccatgatcagtggtggggtgtgggcagggggttggtactgggcaatcccagcagagctcagtatcagtctgcccacttgagcactggccatggcatagcaggctctctctctttctctctctccttctctctctctctctgcctcgtcatcattggcatctcttctccccttacttgtgtgtgaaattaagctgaccytatatgctgtttttgtgacacagaatcatccataataagcatttcataactcaatctgtttctgccaattgttttaaatctctcttattagctatgttaggcatgctattatcttaatcttcttaacatccatatgagagtttgacaagtcagcaggggatcttgcctttgctgccaaggatatgtgattaggttacagctccagagactgtgatggcagagccccaaccaggccaatctcctaagtatatttctttaactataaaagacctcagtcccccaaagtccaggaagtaacagtgcatccatgagaacaaagacacttctacagaccagtatctggggctttcatccagtcatttaactttgtgtatataagataaaaagaaaaaaggtgagaaagactccctcccgcccgcaatgaccctaacctcatctgggaggctactgcaacaacccagctttgttctggcaggctacagaaacaattttaatattccaaaagagttaacacaagcccagagggagtagttgacactctggtagaacttgaatcatgctttcccctaggatcatctcagggtaagaaaataatttgagttttggcagctgtgatgactgtgggtagaacagcttatttcttggttaattccttaaataaaccttcatctttgcaaattcttgttacagccacaactgatgagaaggttcaactatgctgtctctctagccaaaccgtctttggtttaaccctctgttaactcttcccctttctttgttaggagaatattgtctggcttcagggtgtcatcttttcatggccatttatttccctgtggtccagtcatgtgttatcctagaacgaacaagggagtcttgattagtacatttgggattctggagatggcagaagaaaacaaggctccaagccagctttcagactgcaagatcttagggagcatcataataccacagccaagttcctcccctttcttggaaataagggtttcaagagctgccttcaagctttgagggcaggtgcagaagaaataaaccatgaagcatctcttccaataccagtcctgtgtgtctacccatccttcggctttctctgcaggggacctgcctggaagcaatctgagaagcagggtcagctctgggtgggaggtgatacattaacagttttgggctaggctgggttattgacagttctgacacagatctcagaatggagtccattagaggcccaggacagtgctcactctaatatacacttagtgctgtcttcaaacatccgacattccttctccctgaaataccacaatcc

SEQ ID NO: 96292 - DNA, 53050 bp, Homo sapiens
cctccagagcacctctatctctctccatcttctacacgctgccagagtgagcttcctaaaattgaaatgtgatcctgtctagatttcaattttaaacagtggctccccaaaacctatagcactataatgtgcctaagaaccacttaagatatttggcttttttttcttctctgagacagggtctcactctgtcacctagaccagagtgcagtggcgtgatctcagctcactgcagccttgacttcccaggcttcagcaatcctcccacctcagcctccagagtagctgggacacaggtatgcgccataacacccggctaatttttgtatttttggtgaaactgggtttcaccatattgtcccagctggtctcaaactactgggctcaagcaatccacttgctttggcctcccaaagtgctggaattaaggcctaaggcactgcacctggcctgaggtatttgttaaagatggaaataaccgcaatctatccaatctgtatctcccaaagagagccaggaatttgctaaagaccctcccgaagtgattctgatgccaacagtccttgaaccacacagtgatctacaggatcaaatccagaagtcctttacatcaaatcattcccctctgacagcaccccacctccctctccagtctcatctcctgccactccaccattatgtctaaagaccttatctaacttcttgtggttcccagaaaataccgaggccttcatcactttacactccattgctctcttgttccataatgcctttctcccctcttaacctggtagtacagtctgatttatgacagtttcactcgtaatttttcaactttacgatggtgcaaaggcaacacgcattcggtagaaagtgctatgatattctctcaaaattctgggcagcacagcgagccacagctcctagtcagtaatgcaatcacaagggtgaacaggccaggtgtagtggctcatgcctgtaatcccagcactttgggaggccaaggcaggcggatcacctgaggtccgaagttcaagaccaccctggccaacatggcgaaacctgtctctactaaaaatacaaaaattagccgggtgtggtggtgcgtgcctgtaatcctagacactcgggaggctgaggcacgagaattgcttgaacccaggaggtggaggtggcagtgagccgagattgtacctctgcactccagcctgggcaacaaaacgagactccgtctcaaaaaaaaaaaaaaaaaaaaacaaacaaacagtgaacaaccaattctctactgcactgccagatgattttgctcaagtacaggcgaattaatctaagtgttctgagcacatttaaggtaggctaggctaagctatgatgttcagtaggttaagtgtattaaatgtatttttgactacaataggtctatcaggaacagaaacccatcataaatggagcagcatctctctctctctccttctctctatataatataaatatacatattcatctttctagactgagctttgccttcacctccatcccctgaaggctttctcaactctagctcccactccctggaagctgcctcctctcctcttccatagcagccagcacttgcctaactggacttattaactttttataactgttcatttacatgttcacatgccaccaaactgagttatttgaagacaagaatttcaacttagcttaattttgcagcccaaatgctatgcctgacactgagtagaccctcaataaatgcttgttgaataaacaaaatcaaactgtatgatggccaggcacggtggcccctgcctataatcccagcactttgtgaggccaagggaggaagatcacctgaggaattcaaggctgcagtaagctatgatcgcaccactgcactccagcctgggcgacaaagcaagaccctgtctctaaaaaaagataagaatgaaaataattttttatgaaattttcaggaactagtaaggttaaaggccagattctggttctttagtattaccattaagatgcaaacacaatctctctttaccacctctaattgtaatactaataaattcacaattatcatgattcctataatcaggctgttgttgttgagagccaagttaattaattaccataatatcaaaaaccagttcatcatgaaactatatatatatttatacacacacactttttttttttgagtcagggtctttctctgttgctcaggctgcaaaacagtggcacaatcatagctcactgcagctcaacttccagactcaactgatcctcccacttcagcctcccaagtagctaggaccataggcacgtgctaccatgcctggctaatttttttttttttttttttttttttttgtggagatgaggtctcactatgttgcccaacttctatcctcaagccatcctcccacctcagcctccggaagtgttgggattacaggcatgagccactgtgcccagacaaataactttctcgaaccaaccaaacaagatatttcacagaatatttcctcccttaggcaaaatgatacaatttcaaagtagctgctacactatcaattaaaactttgccttcccaaatgatgagcaaaccaggacaaaaaaaaaaaaaaaaaaaccaacttgcagtttcacccttagataagtggggaaaaatccctcaactataaagacctgtccaagggctgggcacggtggctcacgcctttaatcccaacactttgggaggccgaggtgggtggatcacctgaggtcaggagttcgagaccagcctggccaacatgtgaaaccctgtctcaaagaaaaatacaaaaattagccgggcatggtggcaggcgcctgtaatcccagctactcaggaggctgaggcaggagaactgcttgaacccgggaggcggaggctgcagtgagctgagatcgcgccactgcactccagcctgggcgacaaaagcaaaactccatctcaaaaaaaaaaaaaaagacaagtgtggtggctcatgcctgtaatctcagcactctgggaggccagggcggatcacctgaggttgggagttcgagaccagcctgaccaacatggagaaatgcaccgctactaaaaatacaaagttagccaggtgaggtggtgcatgcctgtaatcccagctactcgggaggctgagacaggagaatcgcttgaacgcaggaggcggaggtttcagtgagctgagatcgcgccattgcactccagcctgggcaacaagagcaaacctccatctccaaaaaaaaaaaaaaaaaaaaaaaaaaaaaagcctgtccaaaacaaaggatgggtagaggcaaaaataaggctgaaatccttcagtataattctctgaagttaccttagttaataagcaacagagaacaatggcagttaaacctgatatcttcacatttaaaatacaaaagcaccctttcaatatccagacatagagctccttttttttttttaaccatacttccaaaatggttgattcttttacattctcattccttcaatatttgtttagcacttactctgttcatggtactgtgctagacctcagtcatgttattaaagaaaaaaaaaaaaaagtcagccatagggcctgccctcttaaagctcacgtcctaaaagagaaagtagacattcaactaatagtcaactaactgtttaatacaattgcgttaagtaacacaatagcgaatgcaagtgtcaatacataacacagaatccatcccacgctcttccataccaaaaatcaattgtcttatagtttcctgcttcagaaacctaatttccactccccgtgtgcacccctttcagcagttattctgtatatctgtcaggtttccaactgtagctctcagatatacctctagggaagataaattaaactacttcaaaagtaatttttccaccaactgcttttgtagtgtcagttcttctttacatccctcttataaagcatcacatgagggaatacaaaatatcttttgagtgttttcaatctttacccatttatggggaaaaaagactttttaaaataagcatttataaagcgcttactatctgaagacaacataaggggaacgcaacgataagaaaaaaagatctgtgagatttgtgttcaagcaaaactgatcccatggatttttcctttggataccactggattcataattttaatataaatgcagtattgagtaattgcaatagaagaatatttaggttataaatgtgtgcttttttttccccaaggaagcctcattataactaaaatgatatcaacaaactattttagtgaacattggacgcttgctaaatcgacctttgttttccaggatgataggaagtcatctgctgtcagatacaggaacttatataataaaaaagggggaaagatcagaacagaaaattacacgaaacttctagtaaattaagacacttatttagttgaaaatataaatctagggaagattctttataagaaaaaggagatttcctattataaacactgctcccattgaaatagctattttattggcacttagaaagtcagaccctagtaaggaagaaaatgttttatatgtcaatatttaccctgcagaacagacaacaaaaggggagtagagcttaaggcaaaacaggaggtatctgggttaacagccttctaaaatgaaagttgaaaagcactggcccgagttaccaagaaggctctggaccctctttccacttaaaatgttaagacaagtcatcacctcggttcagaatggtatggcacaatacggcttgaaagcagagaaacatgctatgtgaccttctaaggacccttgctttttttttttttaactcgagttaaacaaaatccattatgactttttcagttattcattcattccacaaatgcttactgggtgcctagtatgcacatagcactgtgcttaagccatgatggtccacaagaaaactctaatgagttgggcattatattctaatggcgagacacgctaaagcagcaattccataaacgaacagagcgcacatttaagggggaaaggggcacgtagggagggcttctttgaggaagcaatatttaagctaagatgtgaagatgaacgggtaacaacaaggatgaagggttaaagcccatatttcaggcttggtcgactggatggttagagtcattcattggtaaaggaactgcggatgggaaccagatttggaggaaagttaaccacccgcatttatttactggggtcctagtatgttgccaagcgcttcacaaattcctctaatcattttgcacagcagaagctattactttcagtttcatacacaaaagagaggctgagcggggttaaaatgacgtgcccaagacgaaataaagaaatctgacttttgtaatcaggtttgtatgtgctcgaaagcccgcgctctttccactccacagctccttcctgtgcacctccctttcatctggtggccctagcgccacaagctgccgcttaggaagtccctgccgggagcagaagtggagacatcagcaggatggcatcggcaagtcgctcccctcccgggcctcatctgccaaacgatcatctcctcctccgaagttgtatgcatgacaggcgagtggaaacttcactaaaatgaaggcgattgacacaacagaaggaactccatcctttcgggggcttacgaaaataataagtttaaaaaaaataggaagggaattccctcgctccatgatcactgagcgctctcctaaggaaaaggaaatctcccggggggtgccgactacgggcggcgggcttaggatgctcccacgctccccgacccccaatccccaggacccgcaggacctccggaggaacgcccgccagcccgcccggagccacgcggcacaaggtgacacggaccgcgccgcgcgggcccctcagccgcctgggcgaggccgggagcagggagaggggcatccgccggcccgcggtaccttgtacttatcaaagccagccagctgctccgggctcacgtattcgtagccagccatgacgacccgaaaactgagcgcccactcggcagcgactcccggctacaaggctgtgacacacaagcaccacaccggctgggcaaggatggcaaagactgggctgcccgagaaggtaggagagccgcgctccgcccaccgcgcacgcgtagccgcctcggccccttcggccgcctctcagtgcgcaagcgcagcccacgcttctccccgcccatcgagggggggttgctagcccgctcgagcgrcccgtcccccgacactgctgttgtccaatcggcgtggatcaggcaacactaagtcccgccttccagctctcttcgtcgcttcatttgctagcgtcaaaattggtgagctgaggtaaggcaagagagggggtgaaaggtcaatttcccagcgggctttgctcccggtcccgggggaaggtgggatttctgtggtatccgcacttgcgtggtgatctggggtatacygttttagtcttgggggtagagtgactgcttgcgaaccagttcagcagtgcctcaggtaagaggacttagttctcccgctgcagcgaagtaaaagaggaaggaggtctgtaccgcgagccgctcccagctcytggtgcggtgcgctgcgtgccgtagaaatttagtaaacgtggttagatgtagagaaggccgagctgctgccggggccacgggagtctttgtgcggtcagcagagggacttgaaagacaggtgaaaggacattggagacaagcccctcaggtctatgttgcttaggaaccttggaccgcctcatcgcactccgctctatcaaaccgttccaaattaagattgctggtgtctcccgaccagataaaagcagtgatctctcagtctcgacgagtccttaaatgcgtttgcaagaggtgttttacataactggagcccagttaattgtaaaacaaacaaacaaacaaaaaacactagatcaatggctagtgagtatctactaataaaattttataatagttgctgctttttattgagcgccttctgtggggagaacttcacatacattatcaaccccataacaacactgaagtgaaaggcattatcccctttttcagattaggcagcctgcccagagtcacttagttacgaagctcggaaatgatcgacccaacatgaaatgagttctgtgttatgggaaaccactacttcagggagcctttcagtctctctgggtctctgaaataagggcgattattttgagatacttttatgttcattcgtttaacaactatttattggggacccgagatatgccaaacacagtattattactacatgtctaatctcccctcctaaagcatgattcttagaaagtaatagataatcttatacctggtatatggtagataataagcttctccccgccccctgagacagggactgactcacccaggctggaatgcagtgacgtgatcacggctcactgcagcctcgacctcccctggctcaggtgatcttgcttccgtctcccaagtagctagaactacaggcgcacaccaccacacccggctaaattttttgcattttttgaagaatgggcgcccgccaaccaataaacttcagtgtcctttatcacacttgccctcgagggcagtatttgcatcttatacatcttaattttccccatgttccataacccagggggcttgcaaataatacatgatcaacgtattttattgaatgaatgagcaaagatctctttgatatgctgtgaagtaccagttttgagaagaacattagaaatgagagtctcggccaggcgcggtggctcacgcttgtaatccctacactttgggagcctgaggtggagggattacttgcgatcaggmgtttgagaccagcctggacaatatggtgaaacctcgtctcaactaaaaatacaaaaactaaccgggtgtggtggcacgcgcctgtagtcccagctactcaggttattgaggcaggagaatcgcttgagcctgggaggtggggttacggtgaaccgagattgtgtcactgcgctccagcctgggcgacagagcaagactccgtctcaaaaacaaaaccaaaaaaacccttcatacttgtaaaacttagttaattgtggaaagccataaaatgtgacttcagtgcaagctaataatagtttataaactgcacttattgtttatcagttcagatataagcaaactcaaaatgacatgattgattcttaaaattgttttctacctctgatattttctttaaaagcactttttaaaacagtaacttttaattttgtgaaagcagttacaatttgctgcttctctgcataaggttgtaacaagtttgaatcaattataaattcatctgataatttataagctgaagcataacccagaaattggtttatactttgacatgttactggctgtgtaatctcagacaacttacttcacttagccccagtactctttttcaaaaagagggtatttgggccgggcgccgtggctcacgcctataatcccagcactttggaaggccgagtcgggcggatcacgaggtcaggagatcgagaccatcctggctaacacggtgaaaccccgtctctactaaaaatataaaaacaaaattagccgggcgtggtggcgggtacctgtagtcccagctactcggaaggctgaggcaggagaatggtgtgaacccgggaggcggagcttgcagtgagccgagatcgcgccactgcactccagtctgggtgacacagcgaggctctgtctcaaaaaaataaaaaaaaaaaagatcatttgatcctaagatctaattcgatccattagaacctattaggtactacgatcctattcatctctgaaattcagtgaaactgtatatcatataacttctctgagattaagtcatctcatctgggaaatcttgtcttacctacaatgatatggccccagtctgttcaattaaattcatacaaatttaagatattagtcatgctccatataaccatgtttccgtcaatgagggaccacatgtggtcccttaagattatagtggagctgaaaaatttctgtcatctagtgacatcctagctgtcaaaatgttgtaacacaaggcattactcacgttcgtggtaatgctagtgtaaacaaacctaccgcgctgccagtcatctaaaagtatagcacatataattatgtacactactgaatacttgataataactaactgtcttactggcttttgtatttactatcagagcatatcctgtcattaagtgatgcatgactgtattttcgcagaattctgtgaatcctaaacccggcaggcatggtcacgtgggaagagaaaaatgtcatggaaacaaatttgcctttggaactaagtcacctttctgtttcctcgttcccaaattttattccaggaggcatttttccctaaggcagcccagctgccccggactgctttagattggccttgttattcccatctgtgctctacacrccacattcctgagtgtagtttattattgctttgtttcccatgtctgcctcttcatccattgaagtttatttcttctacatcttgtacactcaagatcaggcattttgccttccagaataataatcatagaaaatatcaattcgtgctagaaacaatatttttatttttataatataaccaaaataaagtgttttaagttcctggagtgcctgttttatttagtctgaataagagtgtatcagataaatggagacagccaaaaaatattggaggttaattaaggactaatgtagttaataactccaatataagttactgaagccataaaaatgggcagggtcttccaaagaagtttgtaaaaaggtattgatttagttctcattttaaaataaaaatgaatgccttatacacataaactctggttctcaaagcagtttcacatgactaacaatcctgagccatgggcctgatggctgttccaattgtatagagtggaacaatagaatagtaatatatcttaccaaaagtcacccaggaaagaggaacacaggtcatcagacttttagttgaataattttccactacactatgcttctacaagttgatggtaagatattaaaaaaaaaaaatcacaagtcagttgttttttttttgagatggagtcttgctctgtcgcctaggctggagtgcagtggcgcaatatcagctcactgcaatctccgcctcccgggttcacgccattctcctgcctcagcctcccaagtagctgggactacaggcacctgccaccatgcccggctaattttttgtatttttagtagagacggggtttcaccgtgttggccaggatggtctcgatctcctgacctcgtgatctgcccgcctcagcctcccaaagcgctgggattacaggtgtgagccaccgcgcccagctcacaagtcagtttttaatcaaattccagcatgctgaaaggctgagaaaggagggtcccttgagcccaggaattcaagaccagcctgggcaacatagggagaccctgtctctaccaaaaaaaacaaaaaggaactccccagttattatagtaaatcttctcaagtggggttttgtttgcctgttttttgctatattttacatttttcaatcataatcctcttaggtaagaatgtaaagggaactgtatgagtgggtcatcagtcatatttttgtcacagaaaaagtctacgcaatataatgagattcagcgtaagctaatacctcctacttcctatgttgctgggggaggatggtgtctctgctattttgtgacttattctcaactagcttctcagtggtgtttgtttgtttctcaagatggagcctcattctgttgcccaggctggagtgcagtggcgcgatcttggctaaccgcaacctctgcctcctgggttcaagcgattctcctgcctcagactctgagtagctgggactacaggcgcccgccaccatgcctggctaatttttgtatttttagtagagatggggtttcactatgttggccaggctggtctcaaactcctgacctcaggtgatccacccaccttggccacacaaagtgctgggattacaggcgtgagccaccttgcccggtcttctcagtggttttatggccatttttgtggtcttaacctaccaaaccagtagtgtcagtagtcattcgaagtctagagacagtttaaacattcagagggacccagtgtgatatgaggcaagagtaaaatcacaggtctagtaatttagaccatctacatatttgccattcttttttttttgaaggcaagtgattgtttctttgttataaccattactcatgagcatgtctgttaaataaaagaagcattattttaaaaactgattgcaggcaaagttttacactgggcaaagtcttattttcatcattcttgaagttctggtagtgaaccagcatctgtattctatgaatggaggaagaattaatacctctcccacacacacatcctcctcccctttattactccactaaaacggaagcagaactgtaggtaaagagagaacaaatcattcagatgagtagccgtaggggcatcacctctgcgatcctttctctttatttttgtttggcaatgttaatctcatctaatgtcaggtatgcagatgcraccaaatgtaaccactgttcttttttaatttcagtttgaacacacagctgtgcaagggccttcatttttgaatgaggattattttcaccttcatgaaactttgagattattggatcaatggtcattcggttttggtgaaagagaaagtcactaggagaaaaaaaaaatcctaagtggaacaagagagtaaagaacattgttataattcatataattcatttttcctataggaattctggaaatactggggttaaggcaacagtggccaacatagagctctactacctaagactttcactttttccttgacatgtataactaaggctatgtggcctgtttgaccagaactctaatggaagctggctctatttttttttaaatcagacactgttgtctataagtctagaaaacaagatatacaaataggaaacaatatgtaaaattgcaattgaacacaggtcgggatgctcactgcttgcagagtctaacaagagcgaagtctggtagaaagaaaatgatttgattaaccaaaactggtaaagggaaagtggccagatttctatccaaaggaatcgtttcaatttttgaagggaaagcagaggtttaaaacgggaaaacttgayaaggaaggcatgtgagaattgtgctgagtacaatgtgggtcttgttctggtggctctcttgggtcctaatccacctggaatgcgggctgatgtcatctcaacaatggccaggttgttaactagctgccttgaattcgtctctggaattttgcagttgggtctccaggcttggtctgcctgtctcaagattagcccccggaacttctaagaaggcgtataattagatactagcatgcagttagataaatgtgaagggagtatataccatgagaaacagagggaccatggagtctatatcaaggctaagggaaaaggcttctgcagtttgcttcaaaattacgtcttaaaacccaagaggaaagaaaaaaatatacattaaaatgcagttttgggggtgtgttgttttgttttgttttgttggtttgtttgtttgagtcagattctcactctgtcacccaggctggagtgcagtggcacgatcttagctcactgcaacctctgcctcccgggatcaagcgattctcaagcctcagcctctcatgtagctgggattacagatgcgccaccacgcccagctaattttttggtatttttagtagaggtggggtttcaccatgttgaccaagctggtctcgaactcctgacctcaagtgatccacccacctcggcctcccaaagtgctgggattacaggcatgagccaccatgctcagcccttaaaatgcattttgaagttaagggacccagttacaaaagtaacaacttcattttctttcttttctttgctttgctttttttttttttttttttttttgtgacggagtcttactctgttgcccaggctggagtgcagtggcgcaatcttggctcactgcaacctccgcctcctgggttcaagcaattgttctgcttcagcctgtgactacaggtgcacaccaccaatttttgtatttttagtagagacaggatttcaccatgttggccaggatggtcttgatctcctgactttgtgatccgcccaccccagcctcccaaagtgctgggattacaggcgtgagccaccgcacccagccaacaacttcattttcttttcatgtatccttattgaacactgtgtaccaaatacaaattccatgatggacatggagatacaaagctgaaaaagactgccggatacggtggctcatgcttataatcccagcactttgggaggccaaggcaggcagatcacctgagatcgggagtttgagaccagcctggccaacatggagaaaccccatctctactaaaaatacaaaattagccgggcgtggtggcacatgcctgtaatttaagctactcgggaggctgaggcaggagaatcacttaaacctgggaggcagaggttgcagtgagccgagatcgtgccattgcactccagcctgggcaacaagagcgaaactccgtctcaaaacaaaacaaaacaaagttgaataagacrtggtccccaagcagggagaagttattattgcactctgaaaatgaccagcatcatccagtgctctggctcatcattttactctctctctctttgtttttttagagacagggtctcactctgttgcccaggttggcctcaaactcctggactcaagcaatcctcccaccttggcctcccaagtagctgggactacaggtgtkcatcaccatacctggccatatttctatctttttttcatcctcctgtctacctctcttctccgttttttaaatccactgtgaaggtgtggaatattttgtcttggacagagaattgacttaaagacaggaaacaaaggcttaaaatcaaaagaaaattctaaataaagactttgagatcacatagggatttatttatttatctatttatttatttattttatttttgagaccgagtcttgctttgttgcccaggctgggagggcagtggcacgatctcggctcactgcaacctctgcttcctgggttcaagtgattctcatgtctcagcctcccgagtagctgggattacatgcatgtgccaccatgcctggccgatttttgtatttttagtagagacaggttttcgccatgttagccaagctggtctcaaactcctggcctcaagcgatccgcctgcctcggcctcccaaagtgctgggattataggtgtgagccaccacacctggcctgatttaatattttgatgaataatctagaaagtggggtatggaaacagctcttcacatttactcacgatacttagcccttcatgatgaaatgccttatgaatagacacagactacaagaaaatacatttttaaaataagcagttttaaaagttatgttttgccatgtaacaagttactcaaaattcagtagcctaaaataagaaccattttatttgctcataattctgtgggtcagcaatttggaatgggcttagctgagcagttttgctggtcttgctagatatgctaattagcttgactgtggtaatcatttcacactgttctccatatcaaaacatcacattgtacacctaaaataaatacaatttttatctgtcaatcatatctcaatgaagctgggagaacaataaagtggaagctacaaggcctttgtcggcctaggtaaaataccacacaatgttgcttctgttgccttctgccagacaaagcaaatcacaaggccagtgcagagtcacgaaggagaaatagattccactacttaatggatggaatggcaaagtcacacagtgtggggcctgcagaaaagtataggacaatcactgcccctatatttgtaaacaatctaccacttcagattagctgctgtcgctaaaaatacagtaagtaggcttcatgaaaagacttgcaaaccactgacttacacctagatcactttcaaatattcagagaaagaacggcaaaaactcttgtcattggctttttttagtcatcataaactatctcttacttccaaacctcccacttgctcttcactcatcttcagtccatttccaaccccatagatgccactgaaatggctactgccaggttcctcctctttgatgctgagtcaaatggacactttcagacataacttattggggttgtcttccacttatcctgcccactgttatttccttgaaacttcctcccttctcccttgattgcttttttttttttttttttttttttttttttatggagtctcactctgtcaccaaggttggagtgtagtgccaagatcttggctcactgcaacctccacctcctgggctgaagagattctcctacctcagcctccagagtagctgggactacaggcacttgccaccacgcccagctaatttttgtatttttagtagagacagggttttgccatgttggccaggctggtctcgaactcctgacctcaagtgattcacccatctcggtctcccaaagtgcttggattacaggcatgagccactgcgcctagcctcccttgattgctttgaatttaattactcttgtcgtcattctctccgacccttccttccaacagacacacatacacacgcacacacacatacatacaaacacacactcacacacacacacacacacacacacacacacactcttgatctccccagaatgcaggattattcataaatcgccaaacatttcaggttgcatatacaaagcttctgttcctttgttcgtgactggttaactccctctcaatcttcaagattcatcttaagtttcatttctcccaagaagccttttttgtcccagttggcaacctacttccagctccccacactgtgttcccacagcatcctgtgcatacctttatgtttatgttaggaaattatctattcttttctgtcttactggactctaagtgccttgaaggtaaagaccaaatctgtatacctctgagtctgtaagataatgcctcatacccagcaagacctcagtaagcattgaattaagttgtactgtgaaggaataaggacatatatggcactggcagcaacaagtgctattaacataaaactcttcctacttattaacctagtaatcccactttgaaagaatatacttccaggaaatgatctgcaagaaaaaaatcttgttgcaaagacctataaggagccatattttgtaactgcagaggggaaagcaggcaatcaaatgcccaattatataagaacttaaactgtaaactatagtaaattaatgtcgtaagatacatcattattagaaagagaaataagtgaatgtaaaaaaatgggaaaaaaaaaacagcgttggcaaggatgtggamaaattggaagcctcatgcaatgctggtggaaatgtaaaatggtacagctcctgtggaaaaatgcttgatagttcctcaaaaagttaaacatatagttacctgacccagtcattctactccaaaaacttgtacatgaatgtccgtagtagctattcataatagccaaaaaatggaaagaagccaaatgcccagctsctgaatggataaataaaatgtgtgtgtccatgcaactgttcagccacaaaaaggaatgaagtaatgatatatgctacagcacgaacttgaaaacattatgcgaagtgaaagaagccagacacaaatggccatatagtgtatggttccatttataggaaatgtgctttgctttgctctatggcaaatccatagaaacagaaagcagattaggggatggggcagggaaggattgggaataactaataagtgtgagatttcttttagggataatgaaaatgttctggaattaggtagtgatgaagattgcacaaaattgtgaatatactaaacaccattgaaatgtactctttaaaagggtgaattttatctcaatttttaaaaaggggaaattgattattaatgttatattaaaaagaaaagcacatcgtgagggaggaaaaaagcaaagcacaaaataacatatgcatacctgttacaactaaaaatgtatttattgataaccagggaaaaagacagaggatgtcatgaattcggtgtttttaatttgtgggcattttatcattgtagataaagttgcttaaaatttagtacttttacaggcatatctaccagaacattattgcaaattatgcaaagctaaaatgtagacctataaagtcctacatgataaggtaactataggttctatggttttataatatgaagtaggagaggacaagtcattgcgttaatagaatgcttgttaggataacctgtgttttaatggcggggagatgatcaaagggactcaatgtgaacatcaacaaattacccatataagatttatcttcctggttttggcatgagaataggaatgcaaaatgctaaaggggtgttttgagaagcaagcccttgaggtagccaccagctagttttctcttgaaagcaatcaggagaaagtaatcaggaggatgtgaattaacagcttttctagaggaatttgaaataaagaatgaaggcattaagaggtactctaaagtctaaattgctacaaaggggtaaggcttgcaaataagaaaatagctcaaaaaccacagggaaaattaggattaaagcattgtgggtggttttttaaatttacttttttttttttttttttgagatgatagcttgctgtcttgcctaagctggtcttgaactcttggactcaagtgatcctcctgccttagcctcccaagtagctgggactatagctgtgtgctgctgagcctggctaactactaaaggtgatttttaaaaatcctatccttgtacaggtacaaccctttaaattttagttggacacagtggctcacgcactttaggaggctgaggcgagcagatcacttgaggtcaggagttcgagaccagcctggccaatatggtgaaaccccatctctaccaaaaatacaaaaaaaaaaaactagctgggcgtggtggcgtgtgcctgtaatcccagtactcaggaggctgagacagaattgcttgaacctgggaagtggaggttgcagtgagccgagattgcaccactgcactccagcctgggcaacacagccagactctgtcttaaaaaaaaaatagtaaataaaatacattttatgaaatcctgttcttgtacaggtacagccctttaaattttattttatgctagaagtaagaacttttgtgttagaaaacctaggtatgtattagaataagtgattgtctgctaagagaaggcatctgtggctggggatccccataaccactggttgccacaactgctgctctgacactggggtgctcctgtccctggaggaattgctccctgtgacataataagaaatacatatttgttctctgccctgtttaggagtcttcaaaatgtaaggtctttttgcgtgctaatgagatgactggtacctaggggctcctggataacctcaggatggttgccaggggaaccaaccacgtgattagaggctaggaactttccaccttgcttcccaccctcctgggaggggagaggagctggagattgagttaataatcaatcatgcctgcatgaggaagcctccaaacaactccctagagtataggagttcagacagcttacaggctggtgaacatgtggagatgctgggaggatggtgtgcccagagcaggcatggaagctccgcacctcttcctgagtaccttgccctgtgcctccctcccgtctggctgttcctgagttgtatccttttataacaaaccagtaatctactaagtaaactgttatttctgagttccatgagctgttctaaccaattactgaaactgaggagggagtcgtgggttttatagctggccaatcagaagcacaggtgacgtactggacttgcaaattggtgtctgaactgggtggcaagggggcagtcctgtgagactgagcccttaacctgtaagatctcacactccgactagacagcatcagtattgaattaaattgtaggacacccagcggtgtccaccaagtaatggaggattgcttggtgtgggaaaaccccacacatttggtcaccagaagttctgcgtgagtatagaaaacaagagtttatcccagaacacaagttttcttctgaaaggtgcctctgagaagcctgaggaagagctgaaagaggttgacaacaggagctagatgagaccctgttggagagactgtggggtctaacagacatgttcctggagagggtttggtccctggtcagagccacttttaacctctccgtcttcataggtcaaaaaatgtacaggttttccaacacagccttgcaggttgggcccacttcctttacgaccctggttcttcctgttgcctttgagcctgaaaggtcacaaatggagccaaggcagcagctgcagtcgcagcagatacttctagggcctaagyctactgtcagaaggaatggaaagatctagattgtcactgctctgtttgagctgtcttggtgggaaatctgaaattcagtattttttgaagtgctgattatgtgaattatttttatttttgttttaaacttcaacacactgatctacctaaacttggtggggagaagtctccctccttcatcttacagaaagactcccaacttcagcagtgccctccgtctgtcaaaacgccttatggctgtggtgtaaagcagccactgtctcttcctagtgcattggagaggaagagggagggcctgcaaaagcttcaaccacaggatggggactgcggaggacagatcaggagctcatttccttagtgcactttggccattagatgtgtatgtgtgtttaaaaaaaaaaaaaaagtccatgctcattttttgtcttaaaatatctaaaatgtttccaactgaaaaaaaaaaaaaagacactcaacattgttttgagattgatgcatatagacccagttcattcatttctgtttctgtatggtagcagattgcatrcctatctacagtttgtttatccattccactactgatgagtgtcaggttatttccacttctggagccattctttaatacatttatttaattttgttttttttttgagttggagtctcactctgtctcccaggctggagtgcagtggcacagtctcggctcactgcaacctccgcctcgtgggttcaagcgattctcctgcctcagcttcctgagtagctggaattacagggacgtgccaccatgcccagctaatttttgcatttttagtagagacagggtttcaccatgttggccaggctggtctcgaactcctgacctcaggtgatccacctatctcggcctcccaaagtgctgggattacaggcatgagctactgtgttcagcctaaattttttttttttttttaattcacaggttctcaagaaaaaaaaaatcagagaatgatattcaggttaagaaaatctttgtatatttcttttgtgtgtgtgagagcaatatgaatagttctggttatttgatctttaaaaataagaacaagaaacataacatttttttatttttgagatggagtttcgctcttgttgcccaggctggagtgcaatggcccgatctcagctcactacaacctccgcctcctgggctcaagcaattctcctgcctcagcctcccgagtagctgggattacaggcatgccccaccacacccggctaattttgaatttttagtagagacggggtttctccatgtcggtcaggctggtctcaaactcctgacctcaggtgacccaccctcctcggcctcctcggcctcccaaaatgctgggattacaggcgtaagccaccgcacccagcctagaaacataacactttttaagtaaacaactgataggcaaagtatatactttggttcatttcatgattagaaagggagccgtaagtacttttggtttctaaatgacaaatgtctcaatcgttttaatttttttgacaagcctgcattgctttgataatctaaaatcaaagtttgtttttgtagtttatcggattgcttttatatttttaacctaggtattctacttcgctcaaaaagagtggtgtttttttttttctttttctttttttgttttttgagacagggtctcactctcttgcccaggctggagtgcagtggtgtggtcacagctcactgcagcctcgacctcctgggcccaagtgatcctcctgcctcagcctcccaagtagctgggactacaggcatgcaccgccatactaggctaattttttttattatttgtagagatgtggtttttccatgttgcccaggctggcctcaaactcttagactcaagtgatccacccaccttggcctcccaaagtgctttgatgacagtcataagccaccgcgccagccaagtgtggtgtcttaattcatttgactgaaaactcctatttggtgggatttattcttttttttcttttctttttgcggcagcgggggacagagtctcactctgttgcccaggctggagtgcagtggcacgatctcggctcactgcaactttcaccttccaggttcaagcgattcccctgcctcagcctcccaagtagctgggactaaaggcgcatgccaccatgcctggctaattttttgtattttagtagagatagggtttcacggtgttgcccatgctggtcacgaactcctgagctcaggcgatctgcccgcctcggcctcccaaagtgctgggattacagacttgagccatcatkcccggctggtgggatttattctttagttctgagatacaggtccaaactaatcctaccccagatttaagaggagaggttggtacccaatctcatttttatgtggcctaagtattgtgtgatcaattctcttatgttcagcaattgtgacccatcaaatggcctacacctatatcataataccaactggactcaaggagcccatcctgctttctaatcaaaggatatttataagggattaacttgagtgttctaagaaaaacttgatactggaaagaatcttgctcataacaaaacatgctttccaaagagcactgtgaatggttctggagtagaggcaataagtcgaggaagtatttcactggttacaagtactagggaggtggaagatttagggaaaacctggaaggaaatattttcctaggagaggagggagtgttgatgaatacctgtggttccttaggcattcaagtttgaattaactttcagtttatcttgtcggagaaacaaacaagcaaacaatacagttataatacaaaatttaaaactttcttaatctttgagatttgagggttagccatggaggctagtgcctataatccctgcactttgggaggctgaggtgggaggattgcttgagaccaggagttcaagaccagcctgggtaacatagtgagaccctgtctctgcaaaaatagaaaaaaaaattaacataaagtttggttataactttgtatatatattttttgagacagactgtcactctgttgtccaggctggagaccagtggcatgatcacagctcactgtagccttgacctcctgggctctggtgatcctcccacctcagcctcccaagtagctgggactacaggcacataccaccatgcccagctaatttttctattttttgtagagacggggtttcaccatgttgcccaggctggtctcaaacttctgagcttatgggacctacccaccttggcctcccaaagtgctggaattacaggtgtgagccaccatgcctggcctaattttgtattcatcactttttgttttgtgctatttcttttcaagtagttgctctctagtttgttggcttcccatcctgctttccagtatggacagcccttcatgatctaattccacctccatttctattcacacctctggcagcaatgatcccaaactgcagtactgtagttctctgacagcacaacaatctgcatcatacctgtgtacttttaattgtgtttcccagtgtctaaaatgtctgtcccctcacaaggcaaactcgtttacccaactactgaacagatctctattttaacacattccagtgtagaagtctggggaataaaagaagttaaagtgttctaaactccttgagatgtcaaagacgcatgttatcatctctaaagaaactttctaaataagtggtaaaaatatgtgtaactaaaagctaatgggggaggagttcaaatgagataattataaaaagaaattaactcaaaacagggaaataagggagaaaaaaaggagcagaaaaagtggactaaatagaaaacacatagacaacagatttaaacttatcagtgattataattgactataaatagcataaatgatttaataaaggtaagggtagtctaactgattaaaaaaaaaactaaaccaaaatatgtgctatttataacagatatctaaaggttttttgtttgtttcttttgttttgtttttgccttttgttttttgtattttaaagattggtctcactctgcacccaggcagcagtacagcgcacaatcatagctcaccgcagcctcaaactcttgggctcaagtgactctcccacctccgcctcccaagtagctgggattacgggtacacaccactgtgctcagctcagaatacatatacttttttgtctgtttgtttttgagatgaagttttgctctttcacccaggctggagtgaagtggtgcaatctcggctcactgcaacctctgcctctgggttcaagccattctcctgactcagcctcctgagtagctgggattacaggtgcgtgccaccccgcccagctaatttttgtgtttttagtagagacagggtttcgccatgttggtcaggctggtcttgaactcctgacctcaggtgatccacccgcctcggcctcctaaagtgattacaggtgtgagccactgcgcctggccacacatacttttttattacatacagaacacttacaaaagctgwccataagctggcccataaaacggacctcaaaaatrttaaagattgataatcataaagatgatcttctctgacaagaatgcaatcaagctaaaggcagtaacaaaaatataaccagagaatttcttttgtttagaaattaagacataacacttctaagtagccgacaaagaagaaatcaaaagggaaatcagaaaatattttgaatgaaataataaaaatacatatcaaaattgtgagacgcaggggcccagttctagaaaagatggagtaagcatcctccaccctgtctctcccactgagtgaagatgcacggaactgatatttgaggactctagaaagtaaatagtagcaggtggattggggaagaagtccagaattcaacataccaccgaactggtggtgagcttcacattttttcttctggtatgcactggcctgaactcaaggcaacctcaaatccagaaatgggcaattgcacagacagacagaactacagaagaaaccccctaggtctggctcaaggagagggaaggaagaccctaacactcagagagagtggaggaaattctaccttttttttcttttttctctgttctttcacacccagcctctaagcaatcccatggcagcagtggcggtgaggatccgcaggagccgagaactctgagggaggggaacttcctctgatcagaatttatggtgccaagagggcaaggcaaacctccattgctttttgtctctgctacaaggccccacctgtgaacagtcacagtaagtgcatggtaaagcagggaaataaagccctggatttctggccagagaaccaaaaagaggagtcccagggaatcagaaagtactagaatgaccagaaaggaagaggacaagaagatgaccccagacagttttatgagctcctgggatcacttcccagttgtacaggcgtggatctgactctaaaccacaaaccaccagcagaactgcactaagagatcgaccatccatcacgcaggtcccgggccggccactgggtggcacacatctgcagaagatctgaatagcaccgtaaaggttttgaaatgagaattgatgttgaaagaagcacagtccgcagtaggttgatcagaacttgtgattgaaccaagccaggtagattacctgctaaaaaagaaacattaacacttcccacaggttttaaacaagatccagagtctcataacataatattcaaaatttccaggataaaactcaaaattaactggcatttgaagaacctggaaatctcaactcacatgggaaaaaacaatcaacatttaccaatgctgagatgacaaagatgttggaattatctaaaaaagacattaaagtacctattacaaaagtgccataagtaaatgtgaacactgttttaaaaacaaaagaaaaggcaaaaagcctcaaggaggaaatagaaaatataaagaagaaccaaatgggaactttagaactgaaatatataataaccaaaaatgtaaaagttattgcatgagctctgtattaaattactaccatggctgctataataaatacctacaaatgtagtgacttaaaacaaaacaaatgtattatgtaatgtaatgtgttctgagagtgagatgtgtgaaatgaatcttacagaggtaaaatcaagatgtcagcagatctgcatttcttctggaaaccgcagggaagaatccatttgcttgctctttccaacttctggagcctgtcatcaatccttgcctcaaggccctttcctttatctttaaagtgcatcagtttcactggacacagtggctcacacctgtcatcccagaactttgggagaccaaggcaggaggatcatttgagcccaggagtttgagaccagcctgggcaacatagtgagaccccatctctacaaaaaataaaaataaaaattagccaagcgtgatgacacacacctgtggtgccagctacccaggaggatgaggctcacttgagcccacgaggtcaaggcggcagtgagccatgattgtgccactgcactccagcctgggcaacagagtgagaccctgtctcaaaaaataattacataaataaagtgctgcatcagttcaacctgtgcttttttgtttctcacattcgtgtctcccttttacaaggacccttgtgattacattgggcccacacagattatscgtgataatatccctctcaatattcataatttaatcacatctgcaaaatcccttttgacatatacatttacatatccagaagttctagggatttgcacatggacatctttgggtggtcattattctgtctatccaggcttaacagcagaacagagatgacagagaaaaaagtcagtcaacttgaagatagatcaatagaaatgatccaatctgaaaaccagagaaaaaagattgaaaacctgaacagagccactgggatctgtggataaaatactaaaaaggcagctgggcgcagtgcctcatgcctgtaatcccagcactttgggaggctgaggcgggcggatcacgaggtcaggaaatcgagaccatcttggctaacagggtgaaaccccgtctctactaaaaataccacaaaattagccgggtgtgggcatgcacctgtggtcccagctactcaggaggctgaggcaggagaatcgcttgaacctgggaggcggagattgcagtgatcggagatagcactgctgcactccagcctaggcaatagagcgagactccgtctcaaaaaaaaaaaaaaaaactaaaaaggcctaatagttgtgtcattagagcgccagagaagaggagaaataattcagtgcagaaaaacaatttgaaatagtggctgataaaagacataaatctacagaagcaaaagctcgccaaatccaaaaaggataagtccaaagaaagcccaccttaaacacatcataactgctaaaaactaaagtcaaagaaaaaatcttgaaagcagccaaggaaaaatgatagattacttataggggatcaatgagttatatggctgtggattttgttttagaaaccatgaaagccagaaagaaacagaacaacacttttaaatactgcaaagaccatatattttaactccattttattgatgtgaaaactgaggtctagaaagatgaagtggttgtctcgaatcacaaggctcattaatcccattcctaatataatgaccacttttctaccatgctgtggtttgaatgtgtcccccaaagttcatgtgttggaaacttaatccctaatgccacagtgttgaggggtggagacctttaagaggtgattaggttgtgaggactctgagtccgttttgtgttgcaataacagaataccacagagtggcaaaattttttttttttttaaaagaagacgtttatttcttacagtcctggagtcctctgggagtaggctcctaataaaaggataagttagggcccctttcctctttctctctctgtctttgtctctctctctcccgcccccaccccaccatctctctctctctcatgtgctctcttgaatttccatcttctgccatgggatgacagagcaggaaggccctcaccaggtgtgagcccctcaaccttggacttctcagcctccagagctgtaagaaataaatgccttatttaaaaaaaaaaaagttacccagtctgtggtattctgttattgcaacacagaacagactcagacgtactgatacagcatccttggtttttctgagcatgtattgatacattcttttagctgcaagtaacagaaagctgctctatccagctcaaagggaaataatgaaaggaagtcaggttctctgaaggaactaaagatcaagastgcaaatgaacatcagggataaactgaatttgaagaggaactcacctcatgtttgtctgtttctgtatccacattagttttacttttccttggagctcagactattttcccagtccccatgacagaaaaccaagagctgctgagtttacaagttgtaggcccaaccccagactctcactgggtcccagttccaaaattaccccagaagagagaaattgttcccacttggttttagatgtggactgtactgtaatcagagattagtgtaaccaagtgtaaaacagctactttggccaagcatggtggctcactcctgtaatcccagcacttcgggaggccgaggcaggtggatcacttgaggtcaggagtttgagactagcctggccsacatggtgaaaccccatctctaataaaaatgcaaaaattagccgggagtggtggtggtcgcctgtagtcccagctacttgggctgaggcaagagaactgcttgaacctgggagacggaggttgcagtgagccaagattgtgccatctcactccaacctgggtgacagagagasactccatctcaaagaaaaaagaaaaaggctacttccatggtaaacctgtggttatgggcagagggcagtttctaagaaatgagtcagaaaataagtagaatatactcatgaacaatakgttctcagtacaaggacctgctattttttgcccttgacacacatttctctagggcttctaacaggctactcaaaaatattttctaggtttattgactttataaaatctacttacttgtatatttcatcattaaatgaagtttttcagttttcctgctcactagaatattgaaataagttcactactgcatggtttggcagggaatgcgtactcacttctcccatttccacagagggaaaggaacttccacttccagaaggatatattttctgttccctctccctctcaccaaagcaaaaagtgacttatatcactttttgacgtaaggggaacagagagggatttctgaccagagaaccagaatatatccttctgataaggatatattctggtaagacttggagaatgagctctgggtgccccrtcttttgaagtggccagtcctccatacttgtcctcagctccccgtccccagacaggtagacctggagatgccttgctgtgccagtgactgagttagtgaattcagttcgagggggatgtattgggaagtacacttggctcagatcaaaatcaccttctctcactcagcttttccattaatgaagctgactcatgtctgctttcctattagtgacccctttccaaaccataacacgtagttgttgactcagagagaaaattgttcttctttcatggagtaatactaccatcttgcagccgtccaggatttgtatatcttatattttttatactcacattagtcatcttctcttatatgatttcaggattttgtctcacacttaggtaggtcatctatacctccaaaattataaaataattttcattaatgggttttaataaatggggaatggtacctaacagatacttaagtttataagattataaccctgaattatgccttaaaattagtcaggaccctggcttaaggatttgaaattattttatctttagaagaaacagttcttctccactctaatgtcctggtctctccataggtttatttgtatataaggtcagcatgaaacttttgtgaagaccccacatcttgtaagaatcaaagaaagcatcagaaatttcatgagtttcttcagcttctctaagttgtgctcttgaggtacatagctttaatataaacgctgaagcagggttttctgaacagtcccagacagcaaatgcaggatctcattctagggtccagacttagatacttaaattatagatctaaggctgtcattattccttctgaataaatttacaccatttcttttaacattttaatgtcagaaatatcttttttcctataaaggcatatataatgtgtccagctttttgttaaaatacctcttcttgtcaaatatttcacagataagtaattttatagcatcaaacaattttgaacagactctttctatgttagagttctctgtgtcagccgaggattagctgacttgccattactggaattgtgctgcagctgggtgaacagctgtgcatttccccttctctctacacatgtcccatgatgtggccactgccactggccacagcttggtagcaaccagcagaaatcctgtatcgcataacagctgtcatgacctctgaacccaaattgtatttgtgcaaatacaccaagatccccagtcagaatggctgttactaaaaagccaaaaattaacagatgctggcaaggctgtgaagaaaaaggaacacttacacactgttggcgggagtgtaaattagttcagccattgtggaagacagtggcaattcctgaaagacctaaagacagaaatactattctacccagcaatcccattactgggtctatacccaaaggtatataaatcattcttttataaagacatatgcatgtggatgttcattgcagcactgttcatagtagcaaaaacatgtaatcaacctaaatgcccatcaatgatagactggataaagaaaatgtggtacatatacaccatggaatactatgcagccataaaaaagaatgagatcatgtcttttgcagggacatggatgragctggaggccattatccttagcaaactaacacaagaacagaaaaccaaataccacatattttcacttataagtgggagctaaatgatgaaaacacatggacacatacaggggaacacacactggggcctttcagagggtgggtcaggaaaataactaatgggtactaggcttaatacctgggtgatgaaataatctgtacaacaaacctccatgactcaagtttacctatgtaacaaacctgcacttgtacccctgaacctaaaataaaagttaaaaaaaaatacaccaagattcaatgtctggttcatagaggtaactaatatgtagcaaccccagcagttactttctctctttcttttcttttttcttttgagacagggtcttgctctgttgcccaggctggagtgcagtggcacgatcacagctcactgtggctttgacctcctgggctccggtgatcgtcccacctcagcctcccatgtagctgggattacaagcatgtgccgccacacccagctaactttttgtagagatgaagttttgccatattgaggttttgtcatgttgcccaggctggccttggactcctgggccttaagcaatccacccgcctcggcctcccaaagtgctgggattacaggcatgagccaccacacctgggtccagcagttactttctataagaggtaatggaggccgggcgcagtggctcatgcttgtaatcctagcagtttgggaggccgaggcaggtggatcttttgaggccaggagtttgagacctgcctggccaacacggtgaaatcccgtctctactaaaaatacaaaattatctgggtgtggtggtgggcacctgtaatcccagctacttgggaggctgaggcaggagaatcacttaaacctaggaggtggaggttgtagtgagccaagatcgcaccattgtacttcaccctgggcaacagagtgagactctgtctcaaaaaaaaaaaaaacaaacacagaagaagaagaagtaatggaggccaggtccagttgtggctcacgcctgtaatcccaactacctgggcaggctgaggtgggagaatcactttggcccaggactttgaggccagcctgaacaacataacaggatcctgtctctaaaaaataaaaatgaaataagggagcactgcttactagcagccttcacaatccatgtttagaggtgtccaggagcaacctaggagctcagagaagctgccagcagctaaaaacttatcagtttccaaaaatcattatgtatattggagggacaaaggccaatcaccttgtggttcactttggacttgggagtaggtaggtggcagcaataagtccccattggtctgaactccactttgcctaagacctgattcagcctgtgggtgcttcctgacaccccatgaaactgatcggtccataagactgtaagatttgatatagatatacagatatatagatttttttttgagatggagtctcactctgttgcccaggctggagtgcagtggtgcaatctcggctcactgcaacctccgcctcctgggttcaagtgattctcatgcctccgtctcctgagtaactgggattacaggtgcccaccaccacccctggctaattttttttgtatttttagtagagacgggttttcaccatgttgaccaggctggtcttgaactcctgacctcaggtgatccacctgcctcggcctcccaaagtgctgggattagattacaggagtgagccactgcacccagccagatatgatatttttattaagatcttttctattacagaatacaaaattgaaacatacagaaaagtagaaaaatataccaaatctaccatttaattaaaatcaccgtttatgtcttggtgtattccatttattgattgattgatttgatacaaatattacctaaggcctccaatgcacggtgctaggcactggggggtactgaggtaaactcagtgctttggagagcctgtagcatttccctccagtctttttctagatatctctgtacatgcaaaaatgtttcaagcttttctaaaatcataggaacagtctaaaaagtgtaaaataaatctcaattttatcaatagttttgaacaccttggacaccttagctttatttgaactaggaatatgttgctctcatttctactgtcactattagtcatgaactcaaagtkgttaagatgagagatgagctgggaatcaattagggaaaattatgttttgggggtggaatacggaggacytctccagctccagctccatcagctttcttttttttcttttctctttttttttttttttttgagacagattcttgctctgtcgcccaggctggagtgcagtggcagtgatctcggctcactgcaacctccacctcccaggttcargcgattctcctccctcagcctcccaagtagctgggattacaggcacgcaccaccacacccagctaattttcatattttagtagagatggggtttcaccactttggccaggctggtctcgaactcctgacctcatgatctgcccaccttggcctccaaggtgtagtgctgggattacaggcatgagccactgcacccagcctctatcagcttgcttttttttttttttttgaggagtctcattctgtcacccaggctggagtgcaatggcacgatctcagctcactgcaacctccacctccctggttcaagcaattccctgcctcagtcttttgaggagctgggattacaggggcacaccaccaaacctggctaatttttttgtatttttagtagaaacggggtttcaccatgttggccagactggtctcgaactcctgacctcaggagatcagcccgcctcggcctcccaaagtgctgggattacaggtgtgagccaccgcgcccagcctctattagctttctaatgtcctcggagttccttcttccttcagtgttcatgctgatggatgaacagccttccctccactggaggctgtccttgcctctcctaactgggggctgccatggctcagtctcccctcggcactgaagcatccacttttctgggtctcagtccacctcttgcttgtgtatttcctggtcctcaacagaccctgttgagcatagtctaggaccacttcatgccttgacagactccatttggagactgcagcagatgctattgatgtcccacatccccttggcccatctgagactgcctatagctgcaacagacagcacacagcatgctaatagcatcctacctccagcacctgtgttttctctctcacttctctctctggttctcaaaccagattctccaccattttcatgttttctgaaatcagctatttacaagagcgattgctcccatgagtgtatttgcccagtgtgtctgctcttccattagcagcaaaactggcaaggggggattggaggtggaggtggaggtggaaatgcaatggggctatgtttctaccataggtacttcgtactttgtgtgtgtgtttaaatcaactttttttgattaaaaaaaaagtctatgattagaaaaactatatatgaaacagcacacagacccatccagatccttaatccctttctccagaagcaacaactattgtcaaatttctgatgtattcttccagaaatattctagggatataaaagtacaagcatcttaaatagattccttttgtttacatacatgggagcataatatatataacatatatttaaacttcactacatatattggggatcactccaaaataaagctacttcacttttcccccacaactttaagtaatgtgttgcttggaaatcccaagatttatataagctctccctttttaatagacattttgattgtttaatcaactcatttgctatcacaaacaattctgccttgaatattcttatgtacatgtttttacacacatgtacaactatacttttaatacttaatataattaaaattttctcttttgataattagcaggtgagaaatagtatcttcttgtttgatttgtatttctgatgcgtaaagttggaggtttgtatatgtttatcaaactacttcttttttatttttatttttttaagatggagtttcactcttgttgcccaggctggagtgcaatggtgcaatttcagctcactgcaacctccgcctcacaggttcaagcagttctcctgcctcagcctgctaagtagctgagattacagggatgcgccaccacgcctggctaattttgtatttttagttgagacagggtttcaccatgttgggcaggctggtctcgaactcctgacctcaggtgatccactcacctcggcctcccaaagggttgggattacaggtgtgagccaccgtgcacgcccattatcaaactatttctattccttcttcagtgaattgcctattcccatcttttgcctattttctatcttattgatatgaaaactagaagaaacttcctttgttgagaaaattattcttcttaggccaaacttaaaagtttttagacagtcaaatttatttcctttttggcttctcagttttatgtatttaaaaaacttaaatacataaaaaaccagtattatcaatttaaaaaaccttccgcagtttaaaattattttatgaaataacttgataattttttctagtattctctcagattcttttttacatttaagactctaggccagtgcagtggtgcacatgtgtaatctcagctacttgggaggctaagttgggaggatagcttgagcccaagagtttgaggctattgtgagctatgatcatgagctttgatcatgctactgcactctagcccgggcaacagagggagaccttgtttctaaaagaaagaaaaagaacgagagtgagagcaagcgagagagagagaaagaaggaaagagagagagaaaggaaggaaggaaagagtgaggaaagagaaagaaagaaacaaagaaagaaaggaaggaaggaaggaaggaaggaaggaaggaaggaaggaaggaaggaagggagggagggagggagggagagaaagaagggaaggaagggagggagggaggattctagtctatctggaaattattttagagtaaaaatcagctctcatatttttatcttttctttatttttcatttgtaaccttgactgtttgatcagtgattcagcctttgaggagttcagaacaatccagatttcccaggtccttgggaacatgactgaacctggcttatagacatgttgctggttgtgacttcgaacccctaagcctctcctgctctcggagctttgggtccagagcctaagaagagcctgggcaccattctcactggggcatgtgggctccaggtggcccccacagtgacctggattcccatttcactcagagtcacaggctgtagcgcttcctctgtaaattcagccctggctccctcccctcttccctcccatcccatctgcacactgccctgccagctcttccttgcggaaatttgcatcgtgggcttgtagggactgcttcactgagccatggtctgttcggctgccccactgctgctcctggccacaactcttcccctgctggggtcaccagttgcccaagcatcccaacctgtaagtgagactggggtgagacccagggaaggtctgcagaggcgacaatggggacccctgattgggagagacaaagcatggaatgaaaggataggtagtggggaaagggctgaggggagaggaagtaatgtgtaaggaaagtggatgctttgttatgagatctctgagaactcagttttactttcctgggtgtgggggatagctcttgtttccttatttgagtccctgtaaactcatatgatacctgctgtactttggataaagtctcattcagtcaagctggccatttaaaaagaaaaagaaaaattttgcagatttggaaactattggcttagaggatgggagagaatctgaggaaagacatcagagtctagagggtgcctttccatctgtgttctcctcaatasatagctatatctatggctatgtctatatgtcactaagcctaaatctatctctattgctaaatttaaatctatctttatgtaaatatatatctgtatctgtatctaaatctatctatatctatatcttttttaagacatgctctcaccatgttgcccaggctggacttgaactcctgggctcaagtgatcctcccacctcagcctcccaagtaactgggactaaaggcacgtgccattgtgaccagcttatactcacgtcttatccatattcgtatctatatcaatatctggttttggatagatatccacacgcacacgcmggtgcatatagacagggctcaggtctgtgacacagtgagcccctccatatttcctggaggaaggactgccatgttctctctccttggsccagctccatcctcacctccctaccagacagacccttccctgcctgccccatccccctatcttctagctttggccgatggcccaagggccagacaatgtgggcccagacctccaccctcaccctgacagaggaggagttggtgaggaaataatgtacaggaaccaaagacggaggaaagaggctgccttctgctcaccctgctgtcaaatcctacagaaggaataaactccccaagcgcctgggccccagccagcaatgtccagctccgctgctggagctccagaccaagccatttcaattagcctagaggcccagggacaggtaaacgcaggaaggaattaaacaaagcatgttgacttcccagggcgtgcctggttcctggtcttgggtgggatagcagggttcctggggttgcatccctggcaccccctaacagaagcctgctttcccttcctgatgtgtacacttgactcctggcaaaaagaagagctggttgagactgagtcatgctggctgagactagtcaggctggcccctggggtgcctttggaagggacttgaggtctcccctctgtgttctgttccagggacagagtcaggctggaggggaatctggatctgggcagctcctggaccaagagaatggagcagggggtgagtgtatggacaggaggaggagggagggggaggagatgggagctgggaatgaggtggaaacccaggacccagaaaagagagggcaggtgcagcgagggagtggtggcggagagagaggactggctctgatcacagtcggacaggtctgtgaccagttctctagcggagaggcctggaaatgaactcatttgtctttgaagcctcatccataaaataggtgttgctggacggatgacatgaagccgtgtatctgaaggcacagtgcctaggggaggacttgctcccttcctgagccctgtctatatgcacctggacaggctgtgggagggggtctgctctgcattcctgggactggccagctaggtgagagaatccagaggggaccggcttgtggcctcgctgcctgtcctctccagctgtcccctctgctcctgtagaatcagcgctggtctccgtctatgtacatctggactttccagataagacctggccccctgaactctccaggacactgactctccctgctgcctcagcttcctcttccccaaggcctcttctcactggcctcagactcacaacaggtaccacttgcgtgggaagggggctgagagtgaatgaacataggctcccgggcctcctgcagccagcttgcctgagactctgtgagcccctctgtatttcctggaggaagggytgcctggttctgtctccgtggcccagctccttcctcacctccctaccagacagacccttccttgcctgccacatccccctatcttctaactttggctgatggcccaagggacagacaacgtgggcccagacctccaccttcacctgttccctggcccccgagacatctgctgcttcgagtcctgactgaggaggcagtcctgatgcatgggcctgactgaggcacctgtagcttggggattggtccagatacccagccctaaagcctctcaggcatcaggcaggtgtctgccctgcccacctagcttcttcagacagcctgcccaccccctcttctcttctctctgtcagagtgtaatgtcaaccacaaggggaatttctattgtgcttgcctctctggctaccagtggaacaccagcatctgcctccattaccctccttgtcaaagcctccacaaccaccagccttgtggctgccttgtcttcagccatcccgaacccgggtactgccagttgctgccacctggtgaggaaggttgggaacttggaaaccaatggccttaagtgaaataaatgttctcagtggttttctcctctctgaacctgtagtttggccagctggtccaagcacagctgctcctctgggtgggagaaaaagccagccatcatagcagatcacaggccctgagcttggaacctgagtagggagactaatgagagaggccccagagacataaggaccaggagagaaagtgctggagtgactgctttttaccttaggaggcaggaagcagctccagtagcccaggatacctgggggagggagaggcatagaccaaaaaggttccctctttggtttccaataacagatagagtcttccaggctggattgcagcagccacattcaggtgcccacccagggacaaaaagaaaaagttaaaaagctagggagggagtgtggaggaatgggctccagagtcaggggagaagccattgctcggctgcatctgagggccataagtccctcctccagggtcccctgtcacctgcctccctgcagtccccgggatcctcaacctgaactcccagctgcagatgcctggtgacacgctgagcctgactctccatctgagccaggaggccaccaacctgagctggttcctgaggcacccagggagccccagtcccatcctcctgcagccagggacacaggtgtctgtgacttccagccacggccaggctgccctcagcgtctccaacatgtcccatcactgggcaggtagccagcctgtcctctccttgcctcctttctccttcctcttacttcccttcatcctcgtcttccttctctgctttccttcacctcttcttcccacgcctccctcccttctccttccttcttttctttccacctctttctcacccttttcatctttccatttacccattctggggaaacaaaggctaagaggtcccttggtgtgaaaaattgcaatgtggaaaattctaaaaatggccagctgttttcactgtggtctgggacttctgagacccttttcagggtttacaaagtcacaactattgtcctaatatgctaagatgtcatttgaccctttcactcccactccctcaggtgtagacagtggccctttccagaggctacagggccatcacgagattgaatgcaaatgcagatgggagaacccagacacgggcaagatttgcaaacatgtaaaacaaagtcacttgtctaattatgttttggaaaatgtagttatttttcataaaaatgtttctgttaacaaaaatactacaattctccacacaaaatatggagaatgtggagaataccgtctcaatgtctgctgagaacagatccatgtttttcaagatgctaaaatggcaggggtggtgcaggaagggcatctgctctagggagagcatgaaattcacgggcatgggccgataaaagagagatctcttctacctcctagaaatccttcttggggacagggaatgtccaccaaaggggccatcctgggaccttgcttgctggggttaagcactgggtggcaggcagaggacaggagcaaggctgtggcttggaaagcagcagagattctgtggtgcagcggggcccagaggagccacatagcgccgcacacacgtgtctgcaggtgagtacatgagctgcttcgaggcccagggcttcaagtggaacctgtatgaggtggtgagggtgcccttgaaggcgacagatgtggctcgacttccataccagctgtccatctcctgtgccacctcccctggcttccagctgagctgctgcatccccagcacaaacctggcctacaccgcggcctggagccctggagagggcagcaaaggtatgagaaggggccagcagtcaggggtcagagggaccagggggcagctgtctcttccaggcagctgggtcttcagctcatgagaaacagaggccacagttcaaccagagagtggggtccaaggccaacactgttttctaccccatcagagccatgccacgtctattgccataacataaccacatgtgtataggaaacttttgcaaaatgctgtcatctacacaatctcatttaactctctatggaattagtttgatggtagtctccattttacaaatgaggaaatggtggaaactgagtcctagagcttgttagagaccccacagtcccctccagcaaaatccaagctctcttcctctgtccaagtggagcccacacatcatttggctcttccccactgcttcctctgtttctgaattgctagaaagactgaaacagcatgtcagagcctgctgggttccaggcctgtccctggcccaatgacagttcccttcttcgttttgccttcagcttcctccttcaacgagtcaggctctcagtgctttgtgctggctgttcagcgctgcccgatggctgacaccacgtacrcttgtgacctgcagagcctgggcctggctccactcagggtccccatctccatcaccatcatccagggtacgcagggcctggggcccagtgggctggtcccagctgcttgccttgggagcacgggctctcttgcatggcgcgtctctgccctgggcaacaggaccaggcttcggggcccgcatagggttctgcccaaggagaggctcaggtgaggctgtgattgctgagtagcgcctgctcgtcattcttcagatggagacatcacctgccctgaggacgcctcggtgctcacctggaatgtcaccaaggctggccacgtggcacaggccccatgtcctgagagcaagaggggcatagtgaggaggctctgtggggctgacggagtctgggggccsgtccacagcagctgcacagatgcgaggctcctggccttgttcactaraaccaaggtgaagcttccaccctgctgcccacgtgccccctccacggcccaccctagcctctctaggacccagcttgcagacccttttccccaaggcccagcccacaggctgttcagcttctctgaagtggagccctagcagagccaggaagtaggagtgagagggcttctgggggtcaacaatctccatgggtctgggatgctcttctcaaaccatcattccaccatgtgtcccacttcatgctgtctcgtctgtctcagctgctgcaggcaggccagggcagtcctgctgaggaggtgccacagatcctggcacagctgccagggcaggcggcagaggcaagttcaccctccgacttactgaccctgctgagcaccatgaaatacgtggccaaggtggtggcagaggccagaatacagcttgaccgcagagccctgaaggtgagatctctgagccacagtgggggccagctgggcagtcgggggctgaagactccccacctgtgggcatttctgtccctctgatgtcaccatgggctgttgggcagcagacctttccagagtccaggggcctgctcctgatccatttctcctctcagacaccactctctgaggctgcagaatggaggcctggcgctgggagcacatgggggttggaggcaggcaagggtgtggagacatgaggcccgaggcgtgtgtgcgcatgcaggcgtgtggctatgatacagacaggaagtttctatggagacgctgaagtatgcttggctttgctgggctcacctaaatcggctctctgtatgggcatccattggtgacccatgagctgcagccaaaagtgtaacaaagggcaatgatattacacaccgttyatgcctgggaatacatggcmtgtgtgaatgcacagacatgmgtgtggccgtcgcctccaggacacggtgccctctaccactgctggtcaccattcctagctttgcagacctggaggggccaaagaatgggagaagtcccctcttagaacctgggtggcccctagggatggagggggaagaagggttttcagcagaggggctgggtgcaggtcaggggacatatccttgaagatgccccaggtggttggccaaacagctccctgttcttcccatctagaaagtctcccttcacaggcctgtcttcctctcccttttctctccaaccttgggtcgcacactggactgggaagggaaggtgtggggtctgttgttctcattgcccccggctcagtcctgtgggcgccagcagacggggttcatctttcttttgggtgctgcagaatctcctgattgccacagacaaggtcctagatatggacaccaggtctctgtggaccctggcccaagcccggaagccctgggcaggctcgactctcctgctggctgtggagaccctggcatgcagcctgtgcccacaggacyaccccttcgccttcagcttacccaatgtgctgctgcagagccagctgtttggacccacgtttcctgctgactacagcatctccttccctactcggcccccactgcaggctcagattcccaggcactcactggccccattggtccgtaatggaactgaaataagtattactagcctggtgctgcgaaaactggaccaccttctgccctcaaactatggacaagggctgggggattccctctatgccactcctggcctggtccttgtcatttccatcatggcaggtgaccgggccttcagccagggagaggtcatcatggactttgggaacacagatggttcccctcactgtgtcttctgggatcacagtctcttccagggcagggggggttggtccaaagaagggtgccaggcacaggtggccagtgccagccccactgctcagtgcctctgccagcacctcactgccttctccgtcctcatgtccccacacactgttccggaagaacccgctctggcgctgctgactcaagtgggcttgggagcttccatactggcgctgcttgtgtgcctgggtgtgtactggctggtgtggagagtcgtggtgcggaacaagatctcctatttccgccacgccgccctgctcaacatggtgttctgcttgctggccgcagacacttgcttcctgggcgccccattcctctctccagggccccgaagcccgctctgccttgctgccgccttcctctgtcatttcctctacctggccacctttttctggatgctggcgcaggccctggtgttggcccaccagctgctctttgtctttcaccagctggcaaagcaccgagttctccccctcatggtgctcctgggctacctgtgcccactggggttggcaggtgtcaccctggggctctacctacctcaagggcaatacctgagggagggggaatgctggttggatgggaagggaggggcgttatacaccttcgtggggccagtgctggccatcataggcgtgaatgggctggtactagccatggccatgctgaagttgctgagaccttcgctgtcagagggacccccagcagagaagcgccaagctctgctgggggtgatcaaagccctgctcattcttacacccatctttggcctcacctgggggctgggcctggccactctgttagaggaagtctccacggtccctcattacatcttcaccattctcaacaccctccaggtaggtgataggggggtggctgtgttttttgcttttttagatggtctaagtcactgccgatctcttctctaggaggtaccaaggtggagcagaagaaacataggttcaggaattttggaaggcttaggtgtggatcccagttcctccactgagtagctggataactttggacaaattacataacctctctgagctttggttttcttatctgtaaaataatagctgattttgttggagaaatcaggaaattgtcagtacccaatcctttgctatcccttttataaccataacaataagaaaagcacctgaaatggatcctatgcaccaaatagtggtaacagaaaaattgagatgagaagccttaggatgtgaattacacaggacagaaggagcatgttgattcgggtggatcccttcctccttgaccagcttatccccatgtccctcttctcagggcgtcttcatcctattgtttggtygcctcatggacaggaaggtaagtctgcccacctaaccccctgcctcacttgcagcccrcaggccggggccgtggctggcataagcagagcatttacctctcccgcagatacaagaagctttgcgcaaacgcttctgccgcgcccaagcccccagctccaccatctccctggtgagttgctgccttcagatcctcagctgtgcatccaagagcatgtcagaaggcattccatggccctcctcagaggacatgggcacagccagaagctgagagaagattggggttgttttttagaatgaacagttttccggttccagctccccaccagtggaatgagcagcctggtyagagcagtcaggatcagggtcctgggttcctgattatcacctggactcctgctgactctcttttctctggtttctccatctaaaaatctgcctccagttagcatttgaaggaaaagtgtgggatcagtactcatgggagttactgtagctgagagcaaaatttctaggattcctgcagcacaggcaggagtgcatgtgagaaagtaaaacagatacaacctcttcaagggagagttgacaatamtaataactgccctgcaattgggccttcccaccccttcctaggccacaaatgaaggctgcatcttggaacacagcaaaggaggaagcgacactgccaggtgagaactaggctttctcaggggcagcgtaagcagggtggattgaggacggtgtggcaaagggcctcctggcaaagtgctggagagaagcctcctctttctatacccagcccacaccaaagggtaggaaacaggtttttctagggtagccattgctagatggctgggagacggtggaaatgtcagagagcagaaagcatagcaccttatcttgctttccaagaaagcaagaagtttcaccaccaccagtccttgacttggtttctctgaaaattccttttcacattatcacacatttaattatcatgagagtcacgccttgaagggattgccatgggtgggcttggtatccagaggggagggcagcctgcagaagttgggctcagtatccactcaccagccgcaagctctttcacaggaagacagatgcttcagagtgaaccacacacggacccatgttcctgcaagggagttgaggctgtgtgcttgaacccaccagatgagccctggcccaatgctctgaactcttcccgcctcccggagctcagcccttgagaaaggcaggcttatatttcccttagtgacactcatttatcttacagctcaccccttctcatttctaaagtatccagcaagaatagcaggaaaaattagctaaaggcacctaatgaataagcctgcctttgctccagaaataatcgacagatatcaaagtgcggaataattacaagtaaactttctcaaccagtttttaactacaacaatacatgttgtgaatgaatatatttgataaaaatggttttaattgacctattcagcgatttctgattatttctttttcaatagttatgaagaaaggatgacttacttgacaggaacctctgatctttcaaacattggagatgaagggcagaatttggtttgtcttttcaagtttaggaaaaggtgaagttaattggtccctctttctttaacctttaaaaaatcaatataaaatgtaagtttcttaaccatatccatgtatagaggcattgattgatatgagcacgttgtaagaataggttataaaaatttaaagtttaatataaatttatatcaattaataaagtttaatttatatttaaaaatgaatactagaagaaaatctttttgaagacaccaagatatctatctggctgaattaacttatggaattcacaagaggaagatgacaggattctgagaaatttttaaactagatacgtgaaaaaagtctgatgaatcggtctttgttaattatgcaattcatggatattttttataaaatgggacgggggcattttctgttaaaataaaaatggttatgctatcacgtaccgttgaaaacacttttcttacaaacgccatgccttcacttaatgattagtgtgaatatttgaattgtgtataaattggcccaaatgtttctataagtggattcattatactttcaaagagaagccaccaattcagcagggccattgcagtgttctctttttttttttttttttttttttttttgagacagagtcttgctcggtcacccaggctggagtggagtggtgcaatctcggctcactgtaagctgcatctcccatgttcactacattctcctgcctcagcctcccgagtagttgggactacaggtgcccgccaccacgcccagctaattttttgtatttttagtagagacggggtttcaccgtgttagccaggatggtctccatctcctgacctcacgatccacccacctcggcctcccaaagtgctgggattacaggtgtgagccaccgtgcccgggcccattgcagtgtttctaagcctcacactcactccagccctgtaggaggcaggtggtgactaagacagagcaagctctgccttgcagcatagacatgtctcaaccccacttcatttcacttccacttcactgatagttttcattttataaattacaaaagtatcttttggttacaaatccaaataatactctttcactttagaagcaacagggtccccctttctgagtgcgcttctgtagatatatgtgctctaattttccttcgcaattgtttgcacatactcaatgcatgctctgctggtaaaaacacacagaattacactgggcactgtggctcatgcttgtaatcccagcgctttgggaggcccaggtgggcagatcacatgaggtcgggagttcgagaccagcatggacaacatggtgaaaccctgcctccactaaaaatacaaaaattcaccaggtgtggtggcgcgtgcctgtagtcccagctactcgggaggctgaggcaagagaattgcttgaaccggggagacggaggtcacagtgagccaagatcgtgccactgcactccagcctgggcaacagagagatactctgtctcaaaaaaaaaaaaaaaaaaaaaaaaagccacacacagaattgacagatggaatgacattaagttcttgtttacttggctctcaccataaaacaaaaaaacaaaacaaaacaagacaggactgtaaaagaaggctttggagacaaaggtaagaaaactgacactcagcagcaattccatttctaaaaagatggctttaaaaaataagtgggccaggcacagtggctcacgcctgtaaccccagcactttgagagtctgaggtggaaggatcacttgagcccaggagttcaagacgagcctgggcaacatagggaggaccctatctctacaaaaaaaaaaaaattaaaattagccaggtgtggtggcacatgcctgtggtcccagatactcaggaagctgaggtgggaggattgcccgagccagggaggttgaggctgcagtgatcacaccactgcactccagcctaggcaacagagcgacaccctgtctccaaaaaaaagaaaaagaaagagagagagaaagagaagtggatgagtgaatagataatgtgcacaaacaatgtgcattccagtgtgtgtatgtcctctaaaaagaggcacctagaaaaataaactaggatatagccatacaaaggaacaccatgtggtcattaaaaatgatgatgtatagctacacctactgatagggaaaaatatttagactatattgcagtgggataattaaagaatcagagagaccgaggggttgaggaggaattatttaattatttagatgcaccaaaccagtcagattaacatttaaaggacacagccttgaacagagttaagctaccttttaagcattttgtggggcgaggggagatctgtgcagggggaagcctattatagaaacaagaagcaaagacagttatttaactgagacatgcattatattactttttactttttaaggaacaacatgttttatgacttgagattatctgtctagtgaccttacagctgcacagctagagaaacagtcttcacaatgcctgggaaagggagagagaaggctcactagccacagaaaaacaggcagttgattttaaaggactccagctctttctcttcttcagggggaattggtgtttttttttttttaaacatataactgagtttttgctcacacattctttaatttcttttaatttctgttccatttcccccctttggtgcttttcataacaaaggtgttaatagaaagcaccactatttgccacctcttcacagagctgagctctttcttctactggcagcggctgatatttggttaatgccatcaactgcgtggcagtgtgtcgggttaccactgcctctatagttgacaaatactcctacttacaggggtaaaagtcaagggaggatgaggcagattccaagaataaacaaaaacccaccaatgagggttttgaatcttttaaaggttgagaaccatcctctaaacaaggaatccggggattatctggagcaagtctgaactggaacatgggctaacttgcgcattttagctgtgatttctatgacagctcggccgttattatctttccagtcttttatgtctacatttttttgacatttgtgtcatttttgcgattatgctttttttagtttttttttaaattttcattataaactggatatcctaagagttccccttgctttagaggaattagaaagaaggatggcttgattgttcctaacccacacgcctctgtctatttagctgatatgcctgtgccgacacacccgtgctccacagttccaatataggccaaagggtgctttctaagcatctggagcctctagctgatgccaagagtggcttagagtagagaaccgagagaaagggtttggatctggtaaataggagtcgttctgggcgtttctgcatagagttttgtttttagtctcatcataatactgttgccctaggcaggttgtttctcctactgcctctgtgaaagcttttttttttttttttactcaggcgatacagtacttttcaattacggaggttttaaacaaccaaacactggttgaggctgttggttcactggcagggttaggcgaagtaaagttatcttgtggcattactttttttgcctctcatggccactggtcccctatattagtttctccgcatacatagcataaggaaatttccaagctgccagatatgtttttagctagttgagcaagtaaatttttggttgatgggaaagctcaggcactgactgatcaaaatgtttatagaatgacttatggacccggaattgtggggttggacacatttgaatccttctagtctttttgacaattagtagtggaactccaaggcctactccttgtctatcaactcataatagtgctgtctgtcctgtagaccaaaaaggtagctctggctttaagatagtaaaatttaaaggattgcatgttcttgccttacaatttggtttggttgacatactacttagcagagcaatccttcctgaatataagtgttggagatgtgttagtgtagaccaccgaatgttacagtctgggcatccgatttgtagctctccgtacaggtgtttagggctgctcttgctaagcctctcttgtgttaaaccattgcagactgtttctggttgtatgtgtaggtttctaacttggttcctgtacatttatagtaggtatggtacagtagagttttaactacgctattccttacccagatagtatgtacacagtgtggacatccttctagagatttctccccttctagtataggcagaaatggtaacgacaacagtgtatgtaatagaaacatgcctatactatacatgggcatggcaaaccttcctctgggcatagacatttgcagcatttgcaatgataacataacagcagagcaatcagtgttgacagaattgtaagtaggcttataaattgtatccacatttacttatccggatatggtcctcttagcttcgactgtgcgtagactagtcagcttccaggatgtgactagagcagagcttgcaggatcctcaagcttcagccgtgcatagactgaccatcctccggtgtggtcagagcaggccagttgtccttcttaccggtggttgggtttcgccgtaggactattcaggtggggcgatctgggtcttgttggttaatccactggttatcgtcgggagtctctgttgccactggtttctgctggctatggtgaatccaaggtgtgacacctgcaactttaacagcagtggaagcagacatgattacaatacgagacctatcctgtatgggtcccagaatggttggattccattattttagcttaaacaaaatccttaggtttgaaagggtgtactgggtctgttagacttataggcatttttctatacccagtcatgcattcttacatggccatacttaaagtctgcatttgccttcttaaagttagttcttctagtttacagagattacctttaatctgtcttatgatgggtgggtgggtggccggccgaaaaaaatctcagagggcgaatacccagtttgtttggtggaggtgcacctgacttggaggaggaccatgggcaagacctgatcctacttttgatgagtttttttgacacaatttcttcagtagctgtttgagtgtctggttcatgcgttccaccttccctgaactctgtggtcgataggctgtgtgcagtttccatttgatctttaaaagttgagttagctgttgtacaacttctgccacaaatgcaggaccgtcgtctgatcctagggttagaggcgacccaaaccttggtatgatgtctttcagtagcacctttgtcacctcttgtgtctttttagttccggtggggaaggcctcaacccaccccgagtaggtgcaaacaaacactagcatatactggtaacctcctgctcaaggcaactcggtaaagtctataagcaggttctcacaaggcacagctcctacttcctgaattcctggaggttgagtaggtcctcgttttggattactccgggcacaagatagacattgttcacaaacagcacgggtcatggcagacagccatggcacatagagatgccaacctatccaagtctctagagctgtccttccaatgtgtgttccttgatggatctgcttcacaaaccttggggctattgtctctgggatggctagcctcctgtcagagccaccatccacctttaatatatttttttgtttcctgaccaaaccaagctgtttcacttgaagagtaattgggtacctccggcaaagggggctctataaggagaggcgttgctataggtctttcttcaggtaaagccttgctcattgatgcccgcagagcctctaggtctgcctttctgttgccctgtgattcatagcttttttccatttagtgttctttgcaatgaatgacagccaccttttctggagcctatatggcttctaataattgcaaaatttcctctttatttttt

SEQ ID NO: 96293 - DNA, 14670 bp, Homo sapiens
attagctgggtgtggtggcgggcgcttatagtcccagctactcgggaggctgaggcaggagaatggcgtgaacccgggaagcggagcttgcagtgagctgagatcgcaccactgcattccagcctggatagagcgagactctgtctcaaaaaaaaaaaaaaaaaagaaagaaaaagaaaaagaaaatatactaagcaggccaggcgtagtggctcatgcctgtaatcccagcactttgggaggccgaggcgggcagatcacctgaggtcaggagttcgagaccagcctgaccaacatggcaaaaccccatctctactaaaaatacaaaaagtagctgggtatggtggcacatccctgtagtcccagctactcaggaggctgaggcaggagaattgcttgaacctgaaaggcagaggttgcagtgagccaagatcatgccactgcactccagcctgggtgatagagtgtgactctgtctcaaaaaaaaaaaaaagaaagaaagaaaaataaaagaaaatatactaagcaggatgctcttacagacttcctccttctcctaaaggtgctggctgaagaaggccatgaagccttctaatctaaactcagtgggtacaaacaactattacctacttgggacatgagctatctcagggcattcagaagctcacccccaaatgtcttaagtcaattttgtttatctctctccccaaaacaaaaaaaaaaacaactttatacggctgggcgcagtggtttcatgcctgtagttccagcactttggaaggccaaggtgggaggattgcttgagccctggaggttgaggctgcaatgagccatgattgcaccactgcattccagcctggtgacaaagcaagaccttgtctcaaaaacaaacaaataagccagatgcagtggctcatgcctgtaatcccaacactttgggaggccgaggcagcggatcacaaggtcaagagatccagaccatcctggccaacatggtgaaaccctctctctactaaaaatacaaaaaattagctgggcgtggtggcgggcacctgtagtctcagctactcgggcggctgaggaaggaggatcgtttgaacccaggaagcggagtttgcagtgagctgagattgcaccactgcactccagcctggcgacagaacgagactccgtctcaaaaaacaaacaaacaaaaactacaaaaatttccagtgacagctggctattgtcaccaatggatttctaattttgctgcccttgccaaacctctgtatgccctccttgaagacaccatcccagcacccattttctggccctgagaggcactaacctcctttgtagccttaaaattagcatttcccatacctctgatgttggcttactgaattttgactaatcttttcacttctattaccatgaaaataatggaattgctggaggtattctatgcaaccttttgcctctcagatatatcctatatttctcatgccaattgaatcctgtggcagcaggcctgccctcatgcctgcatgtgatggctgcagctgactctgtaactgacaaagccagcactcatgttaggcttatccattttctgttatgttccccatgctgtccatcttccaagttcataagacatagtacctctccacatggcaatagacctatgaacaggtcctattaaccaaaccctccattatcttacatcattgtgccactgtaaatctggctactcggctaggcatggtggctcatacctgtaatctcagcactttgggaggctgaggcgggtggatcacttgagcccaggagttcgagaccagcctgggcaacatggcaaaaccctgtctctacacaaaatacaaaaattagctgggcatggcgacacatgcctgtggtcccagctacttaggaggcagaggtgggaggattgcttgagcccagaggcagaggttgcagtgagctgagattgcatcattgtactccagtctgggcaacagagtgagactgtctcaaaacaaaaacaaaaacaaaaacaatctggctactctattagccctccctgatgatggagaaccctactccattccacatgattgccttccaatgatagaaatggtctcaaggtcatgagacctgttgtgcaccctttagacaacacagactcactcctattttgtgatggctcccataaacgaggtttctgggggaacacaataactgctatgtcatagtttccccacaggaaacacttgaggtcctgtttgcccacagtagagtaaaccccaggctggggaatttatagctcttattagagcttgcgcattggcagaagggaaaactgccactatttataccaactccagttggagtctgctgaccattggtgcaatctggaaatcctgagaattctttttttggagagatgggggtctcagtatgttgcccaggctggtcttgaacttctggcctagagcaatcctcctgcctcagcctcccaatgtactgggattacaggcatgagccaccattcatgaccaatcctgagaattcttaaacgctactggtactcctgttatcaatgggcatataattcttgccctactacaggctattcacctcccaagaaaaattgctgttgctcattgtttagcccatactaaggagactgatgctatatcttttttttctttttttttgagatggagtctcgctctgttgcccaggctggagtgcagtggcacgatcttggctcactgcaacctccacctcctgggttcaagcgattctcctgcctcagcctcccgagtagctgggattacaggcacatgccaccacactcggctaatttttgtatttttagtagagacgggtttcaccatgtttgccaggatgatcttgatttcctgatcctgtgatctgcccacctcagcctcccaaaatgctgagattacaggcgtgagccaccacacctggccccgatgctgtatctctagagaatgatagggccaacaaggcagcgaaatacacagccagaaatggatccccccaccatcctttttccatgcaatttatctgtgtctttatccctgactgatattattgattattgttagtattaccaggcaaatgccccacaatctgaaaaagacaaatgaattcaaaaggacagcaaataattaccagacagatgatacattggaccaaatagacttcccgtggcttcctttcttttgaccttttggcttgcacttatcaaatgggacatatggagatggaggatagcaaaggaactaaaatataattagttctaccctggcatccacaaaacttctggccacactgtttcccagtgcacaacttataaatctcatggaatctctggaggaaaccaacattcctcggggagtcctccaaggcccacactgccccttgcaggactccagatggattttgttgatttacttctggctttagggcattcccactgtttggttactgtctgaatgtttagtggatggattgaatgccaccggactggatgtgctgataccacaacactggtgaagaaattaataactcggctggccagggaggctcacacctgtaatcccagcactttggaaggcagaggtgggcagatcacgaggtcaggattttgaaactagcctggccaacatagtgaaactgtgtctctactaaaaatacaaaaaaattagccgggcgtggtggtgggctcctgtaatcccacctacttgaggctgaggcaaggagaattgcttgaacatgggaggtggaggttgcaaagagccgagatcgcaccactgcactccagcctgggcaacagtgagagaccatgttggaaaaaaaaaacgaaattaataactgagattatttctcattttggctttctgttacagattaagtcagaccaaggaactcattttacagcagaaataaacaatttgattgcaaaaaaaaaaaactcctttggggtatcgttaaaatttcacaccccataccacccccaatcctcagctcaagtgaaatgtaaaaatttagacataaaaaggacattaggctgtgtaagatacaatgaatttctctgagtttctcttcaaagatttagcctgctaacttccttgtcctttgttctcaaacttaactttcctgttcctccttgcccctagttactgtaaaacagcttacccccttcccaccagctctaatcaataactcacatcctttcccttggttatctgtacccgttgttcccccaaaactgcatgtcttacatgcttcaccactgtacctcacgtacactttcccttccatatttagaacaatatttgcaagtagctaattggatcagctcagattgtgcagtccaaccccagcccatgggggagtgacacagaggtaaggactatgcatcagagataaaaaccccctgctctcctttgtttggtgtgctcttgcgatcttgattgacgggagtggcacccttctgcagaagtaaattgccttgctgtgaaaacttttgcctgagtgctggtttcactttgtggcaccaagcatttattcctggagcatttttatattcaacaggctgggtgcggggctcacacctgtaatcccagcactgtgggaggcccaggtgggcagatcacttgaggtcaggaattcaagaccagcctggccaacatggtgaaaccctgtctctactaaaaatataaaaattagttgggggtggtggcacacccctgtaatcccagctacttgggaggctgaggcaggagaatcacttgaacctgggaggcagaggttgcagtgagccaggattgtgccactgcactccagcctgggcgacagtgtgagactctatctcaaaaaaaagaaaaagaaaaaaagaccttaggaaaaatctgtcaggaaactgaattgaagggaggaaaaacattacctcttgttgccttttaccccttatgaagtttagaatgctccaaatgggaggcgtggattaacttcttttgaaatattgcttggtttccctttgcctattggcatctctaaacctttcattcctgcattgagtgatccctggattatggggacttcttaagtgaacaatgtgatgctatgacagctacataaaggaactaactagtaatcttggagcatataaatcatcaacaggtaaaaagggcatagcttctgccaactaacaagccttgccatcctttttgaccaggagattaggtgtaaatcaaggcttttagaagaaagcatgcactgtcaccaatgttttggtcaacgatggaccgaatatacaatggtgtccccatcagattataatgccggtgagccaccgcacctgtcatcctagcactttggtaggcagaggcgggtagatcatttgagcccaggagtttgagaccagtctgggcaacatggtgaaatcctgtctctacaaaaaatacaaaataaaccagtcatggtgatgcgcacctgtagtcccagctacttagaaggctgaggtgggagactcacctgagcccaggaaagtcgagactgcggtgagccatgatcgtgctactgcactccagccagggcaacagagtgagatcctgtctcaaaaaaaaaaaagaaagaaaaaaaagattataatatcatatttttactgtagcttttctatgtttagatatgtttacatacaaaaatacttatcattgtgtgggctgggtgggcagccgattgcgcagtgaggggactgataggcgagccagtctggacccccatccactcacccacccctctggggctacctgaggactctgaccacccaccccccaccgcctggtgccacctgatggagcaagattgtctagcttggggccaccaacgctgtagatgaggctgccaggaaggggttgggggcacacgagcatccctctctgccctcgcctcccccactcctccaccctggcctgccgtgactccctctggagcccgacgcggacttccagtagtagtcagacgttatcatcctgtcatattatggagccatgttcatcatgaatttttccaagccctgaattatgccgaacaaacatttaaaaaaatggaaaactgtttgagacataaacagttgtgcgatgtaattttagttgctggtgatggcagaattccagctcacagattggtgctctcctctggctcagactattttgctgccatgtttactaatgatgtcagagaagcaagayaagaagacataaaaatggaaggtgtagaaccaaattcatcgtggtccttgatccaatatgcttatacaaccygccttgaattaaaagaagataatactgaktgcctgctatctacagcttgccttcttcagctttcacaggctgtagaagcatgttgtaartttttgtttgtttgtttgttttgagacagagtttcgctctgccgcccagtgtagatctcagctcactgcaacctccgcctcccaggttcaagcaattctcctacctcagcctcacgagtagctgggattataggcgcctgccaccacgaccaggtacttttttgtatttttagtagagacggggtttcaccatgttagccaggctggtctygaactcctgacctcaggtgatccgcctgccctggcctcccaaagtgctgggattacagrcgtgagccagggcaccaggccacatgtcataagtttttaatgaaacagcttcacccatccagctgtcttggaatttgttcttttgctgatgcctaaggttgtacagatttgcataaagtggctcacaattatactattgagcatttcatgaaagtaatcagaaaccagkaatttgtattattaccagccagcaaaattgcaaagttcttgactagygatgacatgaacattcctgatgagacartattgmctccacttcttacttgggtctgtcatgatttggaacagagatggaaagatctaagtaaacttttggcttatattaggatacctcttcttgcaccacagttcctggcagacatggaaaataatgtacttttttgggataatatagaatgtcagaaactcattatggaagcaatgaagtaccatgtattaccagagagatgacccacgttacaaagtcctcaggcaaaatctaggaaatcaactgttggtacattatttgcagttgggagaatggattcaacaaaaggagcaacaagcattgaaaagtatgacctctgtacaaatacatgaactccagtagcaaatatgaatgagaggaggctacagtttggtgtcgcagtgctagatgacaaaccgtatgtggttggaggaagagatggactgaagactttgaatactgtagagtgctacaaccccaaaacaaaaacagggagtgtggtgccacctatgtccacacatagacatggccttggtgtggctgtactggaaggtcccatgtatgccgtaagagggcatgagggctggggccatctgaacacagcggaaatttgggaccctcaggctcgccagtggaattttgttgccactgtgtctactcctaggagcacagttggtgtggcagtgctaagtggaaaacttaatgcagttggtggtcatgatgcaagttcttgtctcaaatcagtagaatgttttgatccttatactagtgagtggactgttggtagaagagctgaggcaggactggcttgtctgtcataatgtaaaagagtcttgaaagatgtccggggtccacggcctaaaacccctcatggcctttggtacaccaagctctgtgccatagggtggaaggctgccctgccgcaacacaaatctaagcccagggcataaaaccccgtgtggcttggatggaacccagggctcagggcataaaactcctcatagcctctggaatgtgcacagacttgttggttccttgcttcttactcgtaaacatgtcctccattatctcaagtagcagagcatattctacatgcatcaaaggaagtgctaagctgtcacagctacgcttaatgcaccactagctttctatccccacgttctcatgccctcacctgtttaccctcacatcctcaccacctgcttctttgtttgatcaccaataaatagtgtgggctcccagagctcggggcctttgcagccttcaatctagtgcyggcccycyggacccactttatgcacttttaacttatcttttcacattcctctgaccccgccagactttgtagcccccacggcctggtgttaggcctgatcaccccaacatggacactgtgtgcacggatgtcaaaaaggagaggtggcataggagtaacgacccggagcggactgctgtatgctataggggaacatgatgctctcacatccaacttgacttccagactctcagattgtgtggagacatctgatcccaaaacagacatgtggactacagtagaatcaatgagcatcagcagagatgcagtggaggtctgtttacttgttgataagttttatgctgttgggaggtatgatggacaggcatacctgaatacagtggaggctcatgatcccagacaaagagtggacccgggttgctccactgtgcctaggaagagctggagcttgtgctgtgactgtaaaattataatttagtgctctgttttctacatgaagacactctcttcctttattaatttagtacaattattctaccatcaatggatgcatttttagtaaacatgcattgccacaatcctgggcacaaagtacctgatctcaaagcaaagatagtaaaacaacggaggaaggagtggatggaccaggattaattgctttcaattcttagtaaatgaaaacctgcagctggtggattgtgaacaaacattcctgatgtaacatattaggacagatgcactgctctggaacatagcccagtgctagctggggatctcatttattcagtcaagcacatcttactcatgcgggtggcaagccacccaggtgccgaggcaagaaaccgagggcacgagctgttccagtataataaaatatataaaataagaatagttatactagatatagatcttagatatgattatatatatatcattaatcattagtttgcagcaattattctttattccaatattataataattcttgctctacaatcataacctaggaaaaaccaggccatacagagataggagctgagggaacatagtgagaagtgaccagaagacgagtgcgagctttctgttatgcccggacagggccaccagagggctcctttgtccagcagtagcgccagcatctgggaagatgcccgttgccaagcagaccctggtctagcggtagcgtcagtgtcaaggaaaaacacctgctacttagcagaccgggaaagggagtctccctttccccaggggattttagagaagactctactcctccacctcttgtggagggcctgacatcagtcaggcccgcctgcagttatccggaggcctaactgtctccctgtgatgctgtgcttcagtggtcatgctcctagtccaccttcatgttccatcctgtacacctggctctgccttttggatagcagtagcaaattagtgaaagtactaaaagtctctgatagcagaaataatggtgtaagctctctctctctttctcctctctctctctctgcctcggctgccagggagggaaggaccccctgtccagtggacacatgacccacgtgaccttacctattattggagatggctcacactccttaccctacccctttgtcttgtatccaataaatatcaacacagcctggcatttggggccactaccggtttctgcatcttggtggtagtggtcccctgggcccagctgtcttttctcttatctctttgtcttgtgtctttatttctacactctctcatctccacacatgaggagaaaactcactgaccctgtagggctggaccctacatactcatatccagatttattttcttacagtgcaaacacaccagatggaacttctaaaatgttgctttctataagtttatcatctatgagttgcagtaatttgtttgtttgcttgtttgtttaaccacaatcactattttaatgatatactaaacataatactatttagttttttcagaaacatcggcattgtatgtgtgttggttgtggattttgtttctaaaattgcttagtccaataaagaaagaaaagcattaaagacttaaagcaatgataaccaaatacaaccttgataaaatctttgaagtctatttaaatattcattccattacatctagactcaccaaaaactgtatgtcatgatattcttaagtcgaagttgaaacatgatgtttcacattaaatttaagatatgcagcttggcgaggtggctcatgcctgtaatcccagcactttgggaggccaaggcagatggatcatgaggtcaggagttggagaccagcctggccaacatgatgaaaccccatctctactaaaaatgtaaaaattagctgggcatggtagtgcacgcctgtaatcccagctattcaggaggctgaggcaggagaatttcttgaacccaggaggcagaggttgcagtgagctgagattgtgccactacactctagcctgggtgacagagtgagactccatctcaggaaaaaataaaataaaaacaaataaatttaagatatgcaaatttaaatagagaaaataaacgttatataccctataatgttatttcacctaattagtacttaattatatggatttattttatattataaaagatgttttgattttttcttttgatattgacaacattgtttggatattcttatgttgtcaaggctgcacctgcctcccctgccttatttcttatgttttgccacagttaacccattgtgcttctttgtaatcaaacggtttggggaggggggagaaagggcttactgaatgtctaaaaaaacaagtttaaactgtttgttacccaaagtttggtgcactctccctttgctcagacaagacatgctatccccatgaggtagataatctccattatgccaattttatgatgagaagactaaggctcttcatactcccccgccctcagccaggctgtcccaagctgtggcgctcctcactgaaaactgctgtcacctctgagaggggcatgttggcttatggcacagacattagtggtgggggggccaccctgtgcccaacctttgagaaaacaggtgtctgaggtactgtgtccttagggagtctgcaattaggaggaggcagattgcccctcagcccacagactgacagagatgatggagtgtgcagcacacacgatgaggctactgtgttgagtgtctgtcctaggtgggtcatgctgatgtgcagccaccattccacacctgagtgtcccactgccctgctgggggttggggaatgctcattaccgggatgagcacttttgcaaaatgggctgaggtgggaggatcacttaagcccaggaattcaagaccaccctgggaaacaaagtgcgaccccatctctacaaagtcatacaattagcccagcatggtggcatgagcctgtgatccaaactacatgggaggctgaggcagaaggtttgtttaggcccaggaggtcgaggctgcaataatctgagtttccaccactgcactcactccatgctggctgcctttggattgttcctaattggatggttttgctttcaacagacactccaataaagtacacgaaataaagaataaagttaaacagtcagtcccagtgctgtgtaggtggcagtaagtctgggagagcgacctcggctgaactaactgtggtgtgcatcattgttaagcagggccagcaggatcctcatgtcacctggcaggaggagggacaggaaagggtccctagaagtgaccttgagttgcacttagtgctcttggcagagggaagggcttgggctagtgctggaggcatgaagatggggtgtgttcagggctctccagcagtccaggcatgggaaggggacgctgagggccaaaggcggaggtgacactgggaagggaactagcaaggtgaggactggcttttggccatgtgactgaattgcctgtgtggtgcgtgtgtatgtgtgcgaatgtcagtgaactgtgtgtgagtgaattgtgtgtttatgtgtgggtgtatatgtgtgtgatgtgagtgaactgtgtacatgggtgtatacgtgaattttagtgaattgtgtgtaaatgtgagcagtgtgaatttgagtatgtgggtggataagtgaattgtgattttgttggtgtgaattgtgtgcctgtgtgtgacggggagtatgtgtgtgtgtgagtgaactgtgtgatgactatgaatgtcagtgaatgctgtgattgtgtgtgtgtgtgtacgtgtgtggggatttggtctatatgtgtgaatttgagttgtgtgactttgttggatgtgagtgaattatgtgactgggtgtatatgtgtgtgtacacgagttaactgtgtgtaaatggtatgattgtatatgtgtgtgaatgtgatgaatcgtgactagatgcgggtggatgtgtgtatgtgcatggtgtgtccatgagtgtgtaagtgtgcaggtggcacagttgcaacaggagagaagacacaggaagccttacctgccattcatccccccagctgtcctcccagcctggggacccctgggctggaaaggttatgaaaagtggtgctactgccaggaaggggtgatggggcagctgggaggacggtttgagtcttgccaaagggagggagtcgaagcttgcaaccctggggaggaggaggggcagactggggaccctgcttctggaaaaccagcgaccaacccccaaagggacacaggcaacccctgcctccactctacagtggggaaaaggggagagtggcgtggcaggctgcccagccagtcatggagggagtagacttcaggaggagtacagaggtctggtcccattttggggctgaggacaggagcctcaggtcagcagtctgcaggaaggccccagctggaccagctgctcacaccttcccacaggcctgcagatgggtgtggagagcagagcctccaggctgagtctcccagccccagatctgagcagtctaaatcatccccctccaggttccctacggtcttatccaccagccctgctgcccatggtggccccagatgcccaggagagataatagaaggtaagaagtcatgtttgaatgaggaagctctcttcatttatttcatatgaggatgaagaagaggattatgtgatcacaggaatgttgcatgcgggataatccaaagctggttatctccaggccctcactctgccaagagatctctctggaagaagcagccagttcacagatgccctggatccctccgtgcccaatcataaaaaagtcatgaccgtccctatcttgccaatctgccaggactccaaggggaaaaagcggataagtatccttcaggagacagagaaaaagatatcatcagctccttggctaataccacatcttgcaagacccctgccaggtactcccactgtgggtactcaggacagcctgcctcagtccaccaggcattttgcaaacctgctcatcccaataatgattttccccaacccccagcagggcagtgggacactcaggtgtgggatgtagccgcacatcatgacccagctaggacagacacacaatacagtagcctcggtgtgtgtgccgtacactctatcatctccatcagtttgtgtactgaggggtaccctgcctcctaattgcaggctccctaagggcacagtacctcagccacctgttttctcaaaggctgagcacagggtgaccccccaccccaccaaccccgccactaatgtctgggccataagtgaacatgcccctctcagaggtaacagcaagtttccagtgaggaaaaccagaacttgggacagcctggttggggcgggcgggagtatgaacagcctgtcttctcatcataaaattggcataatggagattatctacctcatggggatagcatgtcttgtctgagcaaagggagagtggatagggattgtaaggatcaaatgggatcatgagtgtaaagtacctgtagaggacctagcacatggtaagtgtataacacttgttgttagagtaacagttttccctgagtatccgtgggagatttgttctagaatccccagaggaaaccagaatctacatttgctcaagtcccttacataaaatggtgtaatatttgcatgtaacctacacacatcctctcatatactttaaataatctctgggttacttataatacctaatataatgtacgtactatgtaaatagttgtattgtttagggaataatgacaaggaataaagtctatacgtattttcagtatagatgcaattatcaattttttttcctctaatatttcaatccatggttgtttgaatcaacagatgcgtaacccagtgatacagggggctgactgtattattcctctgtagcttgagggaggacccagcaggatcagccattcctcatcgaccttcatggactaacaaagg

SEQ ID NO: 96294 - DNA, 13337 bp, Homo sapiens
ttatgtatttattctttaatattttgtagcaatttgtatgactcccttcagcatttcttgcaggaccagtctattggtaatgaattccctcagcttttgtttttctgtgaatgtcttaatttctccttcaatttttttttttctttttgagacagagtctcactctgttgcccaggctggaatgtagtggcatgatctcagctcactgcaacctccacctcccgggttcaagagattctcctgcctcagcctcccatgtagctgggattacagccatgcgccaccatgcccagctaatttttatatttttagtagagacagggtttcaccatgttggccagactggtctccaactcctgacctcaagtgatccacccaccttggcctccctaagtgctgggattacaggtatgagccatcccgcccagcctctcccatacttttgaaggacaatttgccagatataagattcttggttgacagttttttttgtttgtttgttttttgagacggagtctcgctctgtggtccaggctggagtgcagtggcgcgaactcggctcactgcaagctccgcctcctgggttcacaccattctcctgcctcagcctcctgagtagctgggactacaggcgcctgccaccactcccggctattttttttttttattttttatttttagtagagacggggtttcaccgtgttagccaggatggtcttcatctcctgaccttgtgatctgcctgcctcggcctcccaaagtgctgggattataggcgtgaaccaccgcacctggccctgacagttattttctttaagcactttaaatatatcaccccactgcctgctagccttaaaagtttctcatgagaaatctgctgataatcttattaaagagcccttaaatatgatgaatcacttctctcttcacactttcaagattctctgtttttggctttcgaaagttttattttatttcatttatttatttatttttgagatggaatctcgctctgttgcccaggctggagtgcagtggcatgatcttggctcactgcaacctccgcctccctagttcaagtgattctcctgcctcagccttccaagtagctgggactacaggtgcacatcaccacgcccagctaatttttgtatttttagtagaaacaggtttttaccatgttggccaggctggtcttgaactcctaccctcaagtgatccacctgccttggcctaccaaagtcctggtattataggtgtgagccactgcacctggcctattttatttgtttttttatagagactatcttgctctgtcactcaggctggagtgcagtggcgtgatattagctcaagctgatttcttgggctcaagcaatcctttggcctcagctccctaagtagctggtactacaggtgcttgccaccacacctggctaatttttgtatgttttgtagagacgggttttgccagggtggcttttgaaagtttaattatggctgggtgtggtggctcacacctgtaatcccagcactttgggaggctgaggtggggtggattgcttgagcccaggagcttgagatcagcctgggaaacatggtaaaaccgcatctctaaccaccctcaaaaaaaatttagccgggtatgctaatgcatgtctgtagtcctaactacttgggtgcctgaggtgagagcatctcttgagcctgggagatggaggttgcagtgagccaagatcataccactgtactccagcctgggtggcaggatgagagtgtctcaaaaaaataaaaaataagagtttaattatgtgtcagtgtggatctcctctctgagttcatctcacttgtgttagaggcatttgaatcacagcaactccatcttgaatagaggctgagtaaaataaggctgagacctactggactgcatccccagatggttttgttcctcagatttggtaatttccattgttctatctccaagttcacagattcttttctctgttcaaatttgctttgaatccctccagtgcattttttatttgttattatacttttcagctccagaattatttttcggtttctttgtaggttttctatctctttactgatactactgatagagataggagacagccatatgccgcacaggtcatggtgcacagggtacttccctaaacatgcccatggtgaaaaattctgtcccttaacacaaatgcagtaagggaaatcaatgtggagtggctcagactaacggcccgcatgcgcactgaagaatgggggtggagccaccaggaattcaccccttatgctgggagaggagcctggcctcttcagctcatgtgtgttggcctggtattcaatctgtgaggtgggagcctgttggcaggaccctctcttttttgctgagatgagagctttcttttaataaattctgctctcctcacctttcacaggtgtctgtgtgcctaatttttcctagttgtgagacaagaacccagatttagtggagctaaggagcaaaaaatcctgcatcattttggtggcccatacagggacatgaggagggatgagtaaaatgcacaccaaaaaaatctgtttccctttcctttttgagctttcttgtcctcagccttcttctgaggatagaggaaactgcaccccctcaccccattgctctcagggactgggaatgtcagccttggtccaactcagccttttctatggcattttccttctgtttgcaggactgtaatggcacttatcttttacaatattgggggtattccacccccacctcaatggctgcagatgcatgcatgggacggacaggcaagtggtggctccctgcccctcccagctggggctggggctcatggcccaagggccccatgcagctgtctgtccagtgttccacaccacataccatggagtcttcccctcctcctgctgaggggtccagctcagtccaaaccccagggtagaaacagcaattaaaagtttcttggccaggcgcaatggctcatgcctgtaatcccagcactttgggaggctgaggcgggcagatcacctgaggtcaggagtttgagactagcctggccaacatggtgaaaccccgtctctactaaaaatacaaaaattagccgggcatggtggcatgcacctgtaatctcagctactcgggaggctgaggcaggagaatcacttgaacctgggaggtggaggctggagtgagccaagattgtgccactgcactgcagcctgggcaacaacagtgaaactccatcttaaaaaaaaaaagtttctctccctgttggagaaactcatttgcataagaataaaaggtttgttctccgggcatctttttcttttctccatcctgtcagcagttaacaaagccctgcatttacgctgtttttcttttccttttctccaccaggccaggaataggttggtgcaaaagtagttgcagtttttgctattacttagaacggcgaggactgtgactgtttttgcaccaacccaataacatggccctgcaagtagagggggcttctctacgctacaggcttttttccttttagaagatgttttactcagccaggatcccaactcagaagacaccccttttctctcccttgttggagaaggactcaattccacagcttgaccttagcattcagcttggtaaggagtccatgcaacatcctgaggcagttattttgacccaaactcaattccaagctttggatcgaagccctaggaaagaaaactggatctgagggatccagaggcagacgacaacagaagtgaaaaggtacagcacaggtaagcatgactaatttctgcggattaagccaagcctcatttcatggataaaggtcatgctagtatccatggcataaatgaggtctagggaatgcaaaggctattgacaacagagaagataaggcatatatgggtaagagcagataatcccactccctacccaccccccccccccacataacatgggtgaaagccactttgacacccatgggaggcatcctgtcatggttgccgggactcagggatacaaggacaaaagaaagagggacgccttgctttctctccctcatgtacctcgggtatttgctaggaagagaagggaaccagggacgccttgctcccctctttctagatgagtaggcatacatctttcaaatgcatcctgagtcctggggctcctttaaataaatgccttcttattcctttctcctcctctgtcctctctttacagatgggtgattgtgtccccatgctgtgggatgctctcctgggatgtatcctccaaactgggagaagttaatttcctaaaccttaaactggttggcttgggattgagctcagcagggagggaactcagaagcctgacatgtcagcaaaagggtaggagtttttttgttttttgttttaaccagtcaggattttgacctctgtctccctaaacaaaccagaaagggaatgataaggatcactgtttatattatctgtaaagttttaattaataaaaaaggatttgtgaggttggtcttaagctgtagccaagctggtgtgctctgcatgtctctccgtatagttctgtcagaaagaggggtaccttgggatgggatgtgggtctaggactccataggcctgctgttgaagcaagcccagcaaactggccagtggcaaactttgctgcaggcctccatctggttttacgtccttggaagcgtgacctgtaaccacatggcagtgctttgttttagcttctgccattttacagtggcagcccgggttcaatcctggcttagggaatgagtcctttctggcttgatatctttgtgacctttatcatttgttgattctcttccccttcatgaaccaccttaaattttcctttctctgaacacctgggaggttacctttggtaatgttcagaagccagaaatattggctgcttggcatggctaatgttgggtaataaaggatttaaaaggattttcttggccaggtgtggtggctcatgcctatattccagcaacatagtgagaccctgtctctataaaaaataaaaaattggctgggcatggtggcatgtagtcccagctacccaggaagctgaggagggagggttgcttgaatccaggaggttgaggctgcagtgagccatgattgtgccctgtattccagcctgggtgacagagcaagaccgtctcaaaaaacaaaacaaaacaaaacaaaaaacacagctgggcatagtggttcacgcctgtaatcccagcactttgggaggctgaggcaagtggatcacttgaggtcaggagttctagaccatcctgggcaacatggcgaaaccctgtctctactaaaaatacaaaaattagttgggcatggtggtgggtgcctgtaatcccagctactcaggaggctgatgcaggagaatcacttgaacccaaaaagcagaggtttcagtgagtggagatcacactgctgcactccagcctgggcaatagacctcaaaaaaaaaaaaaaaaaaagaaagaaaaaaaggatttcctttccctttcctttcccttctcctttccctttcctttcttttcttttttagatggagtcttgctgtgttgcccaggctacagtgcagtggcatgatcttgcctcactgcaacctccgcctcctgggttcaagtgatttccagctaatttttgtatttttagtagagatggggtttcaccatgttggccaggctggtcttgaactcctgacctcaagtgatccgcccacttcggcctcccaaagtgctaggattacagacatgagtcaccacacccagaccccaaaataggattttcttaaagagcgctcagcttaattaaaagtggatatctggggggctggcacgcggcagcgttgcgggtgggagcggctgcaactctggtgcctgaggagcgataccaagagaaatcatcacccacaattgggccagtgcagcaaycagattgggttcgagttctggaaacagctgtgcactgagcatggtatcagccccaagggcaccatggaggagttcgctactgagggcactgaccacaaggacatctttttctaccaggcagacgatgagcactacatcccccgggctgtgctgctggacctggagccccrggtgatccactccatcctcaactccccctgtgccaagctctacaacccagagaacatctacctgtcggagcatgggggaagagctrgcaacaactgggccagcagattctcccagagggagaagatccatgaggacatttttaacatcacagaccaggaggcagatggtagtgacaatctagatggctttgtgctgtgtcagttcattgctggggggacaggctctggcctgggctcctacctcttagaatggctgaatgacaggtatcctaagaagctggtgcagacatactcagtgtttcccaaccaggacaagatgagcaacgtggtggtccagctttataattcactcctcacactcaagaggctgatgcagaacgcagactgtgtggtggtgctgcacaacacagccctgaaccagattgccacagaccagatcctgcacatccagaacccatccttctctcagaccaaccagctggtgtccaccatcatctcggccagcaccatcaccctgcgctaccccagctacatggacaatgacctcataggcctcatcgcctcactcattcccaccccatggctccactttctcatgactggctacacccagctgactatggaccaatcagtggccagcgtgaggaagaccatggtcctggatgtcatgaggtggctgctgcagcccaagaacgtgatggtatccacaggccgagaccgccagaccaaccactcctacatcaccatcctcaacaccatccagggagaggtggaccccacccaggtccacaagagcytgcagaggatccgggaatgsaagttggccaacttcatcctgttgggccccaccagcatccaggtggccctgtcgaggaagtctccttacctgcccttggcccaccgggtcagtgggcgcatgatggccaaccacaccagcatctcctcactcttctagagaacctgtcgccaatatgacaagctgcrgaagtgggaggccttcctggagccgttccgcaaggaggacrtgttcaaggacaactttgatgagatggacacaacacatctagggagattgtgcagcagctcatggatgagtaccacatggccacatggccagactacatctcctggggcacccaggagcagtgagtcccctaggacagggaccctcatctgccttactggttgaccaaggccctgcctgactgaccactcacttagagcacagatcagggacctcacacatctctttctcatatacatgcattttctgttagtctgcgaacacattacttctcctcttatgagactatttatctttaataaagcagtggatataaataaattttttttaaaaagtggatatctgaggggagtgcagtgacacactggcaatcccagcgctttgggaggctaaggtgggcagatcacctgaagtcatgagttcaagactagcctggccaacatggtgaaaccctgtctcttctaaaaatacaaaaaaaattagctgggtgtggtggcacttgcctgtagtcctagctactcagtaggctgaggcaggtgaattgcttgaacctgggaggcggaggttgcagtgagccaagatcgcaccattgcacaacggcctgggcaacagagcgagactctgtctcaaaaacaacaaaaaaagtggatatttttaaaacctttatgtttttctctttttggatcttgtttttctggaaaaagatttttttctcagttgactgaattccttttctccattttgtcttgctacccttaatgcatgcacgaggccctaaaataatttctgatggcctgggactccttgagaagaacagaaaaggtgccatgcatgccattttgggaaaaacctctgtttttctcatgaaaacccagcaattaaaagcagataggtccccctcaaaatctgtttttgtcttccagctatccccatgtattgggccctgaaaactgcatgctttcctagccctgctcttaaagggccccactcgaggccaatagtccaattaggagattggtgaacagaaaatcttgtaactactggatctgctgctgtttgtctgtgcagttatatgtgttgtgtgtgatgtctgtaaaaaagagagctctaggccgggcacggtggcccacacctgtaatcccagcactttgcaaaaccgaggcgggcggatcacgaggtcaggagatcgagaccatctggctaacacggtgaaaccctgtctctattaaatatacaaaaaaattagccgggcgtggtggtgggcacctgtagtcccagctactcaggaggctgaggcaggagaatggcatgaacccaggaggcagagcttgcagtgagctgagatcacgccactgcactccagcctgggcgaaatagcgagactccgtctcaaaaaaaaaaaagaaaaaaagagagaggtctaattaactggcctaaaggaaaataagtgctttgatcagatatttttgaagggaaaataaaagctgtaataccttttagttcatgtgactttaatccttgagaaataaaaacagtcttaaagattactggtaaaatgcaaatgtgaacaggtggtctaaattatacgggacagatattaggtttgctaaatgttttacagttataaacttcttctttggactttgagaactgttcaacttgcctactttacaacttggcaaggcccaggacttggcaagggactcggtaaggctcttaatcttagcaaataatcattaatcatataatctcagtaaaatgttctaagaaggaatggacatggaaatttttgtctagggttaaaggattattttaaattagataagataaagctaaaggtttaaacaagttgtggaaggtttcttgcaaaagaaattctgtgtgtgaacactaaattcaaaagggtattatgtttttctgtaaataattgagcattgaaatacaagcacgaggttttctttttctttttttttttgagatgggagtctcgctctgtcgcccaggttggaatgcagtggcacgatcttggctcactgcaacctctacctcccaggttcaagctattctcctgccttcgattcctaagtagctgggattacaggtgcaggccaccatgcccagctaatttccgtttttgtttgtttgtttgagagtgggtctcgcactgtcacccaggctggagtgcagtggcgcgatcttggctcctggcaacctccacctcccaggttcaagcgattctgcctcagcctcccgaatacctgggattacaggtgtgcaccatcacacttggataatttttgtatttttagtagagacagggtttcaccatgttggccaggctggtctcgaactcctgacctcaggtgatccacctgccttggcctcccaaagtgctaggattacaggtgtgagccaccatacttggtatcacttaactttctgaggaactgctaaactcttttccaaaaatgactgcaccattttatagtcgcaccagaatgtgtgagggttccaacttctccacatctttgtcaacacttgttgtctgtccctttaattacagccatcctagagggtgtgaagtggtatctcattatggctttgatttgcatgtcccttataactcatgattattattttcttgagacagggtcttgctctgtttcccaggctggaatgcagtagcgtgaatggggctcacagcaacctcaacctcctaggcccaagcaatcatagctgggactacaggcatgcgccaccatgctctactaattcttaaaattttttcaagtatctgcttttggtgaagaaaaaaaattttttttcttgtagagatggggtcttgccatgttgcccaagctggtcctgaactcctggattgggtgatcctcccaccacagtcacccaaactgctgggattatagatgtaagccaccacaccaggcatttttttttctttctctttctttctttctttctctttctttccgtctttctttctttctttccttctctctttctctctctttctcctctctctctctcttactttctttctttcttttagaaggagtctcgctctgttgcccaggctgctggagtgcagtggtacaatctcggctcattgcaacctctgtctcccaggttcaagcgattctcctgcttcagcctcccaactggctgagattacaggcatgcaccaccatgccaagctgatttttgtatttttagtagagatggggtttcaccatattggccaggttggtctcaaactcctgacctcatgatctgccctctttggcctcccaaagtgctggaattacaggtgtgagccactgtgcccagcctttttttttttttttttcccaaagagacagggtcttgctctgtctcctgggctggagtacagtggctcaatcatagctccctgcagcctcaaattcctggaatcaagcaataatcatacctcaacctcccgaatagctgtgccctcagatgcacaccaccacatccagctaacttttaaatttttctgtagaatcaggggttcgctatgttgcccaatctggtctcaaactcctggcctcgagcaatcctccaacctcagcttcccaaagtgttgagattacaggcctgagccaccacacccagcctgatttttttaaaatgtgcttattgtccagttgagtatcttctttgaagaaatttctattcacatcttttgcccagtttttaattgggttatttgtcttttttattgagttctaaatgttcttaatatactctgcatcttagactgtactgagatattattatttcaaacattttctcgcattctgtgtgttgtctttttgttttctagttggtattgcttgaagcacaaaagttttaaactttcatgtagtcaaatttatccatttaaaaatcttttgtgtattattattattttttttttgagacacagtctcgctgttgcccaggttgaagggcagtggtgcaatctcagctcactgcaatctctgcctcctgggttcaaacaattattgagcctgagcctcccaagtagctgggactacaggtgcatgccaccacacctggctaaattttgtattttttgtagagatggggtctcaccatgttggccaggctgagctcaaactcctggcctcaagcaatccacctgccttgacctcccaaagtgctgcgattacaggcataagccactgcacctgaccaattgtgtattattcttgcaacatttctgtacatctaaaattatttcaatgttaaaaatgaaacattacatataagcatgctaaaaagtttagaaaactatgcactaaactaccaacagggaatagaaacagaatttttcattttctattatatgtttttttcctgaattatacaaatgatgcaaattctctgtagaaattttagagattaacacattagtaaacctaccatccaaaagtaatatttttgagatttgagacttcaaaaccaccatatacattattagcacataaataaccatttatatattcttacacaaatatatcaacatttataaaatctagaatcacttgttttatggggagggaaggccatgtcaataatgtaggaggatggatggcccatggactaacaaaaatttctgttgtcaatgtttgacaccaaggggaagtgcttgacttgggctgttcaatgggtgatgcttgagctggctttggaaggtgaatgctctagtcaaggaatgtagatgctgtggtgatggaaacacttgatagtcaggtgggctggaggtaggaaggagaaggtaaagctggaggatactttgagtttttgtttttttgagacagggtcttgctttgtctcccagcctggagtgcagtggtgccatcacaactcactgcaactttgatctcctgggctcaagtaagcctcccaagtagctgggactacaggtgcacaccaccatgcccagctaagttttgtattttttgtagagacggggtttcaccatgttgcccaggatggtctagaactcctggactaagggatccacccacctcaacctcccaaagtgctgggattacaggcatgagtaactgtgcccggccgaggatcctggattttgaaggcccctggatgacagtgaatgtgatgctgtaggccacggggcttccttgaagagttctgggtaaggatgcagtgtggtaagctttatatttcagacagttcatgaagttgtgtggaggacagattgggggaatgggagcgtgaaagccagggacaaagctgggcaactattgaaatgtctataatacattttatatgctgactgagtacaaacatagaggtgaccatgtgtcttggctggctggagacaattctagattacagcgttggtcccagagtaattatattaacagccactttcatgctcaaacatgtctcagtctgaagattaaatatcatctacatacacacaccaacaaaacttccacaattcttacctttactatgtgaaatgcactgatattttattctgtttttttatttttattttttattatttttgagacagagtctcgctctgtcacccaggctggagtgcaacagtgtgatctcagctcactgcaacctctgcctcctgggttcaagtgattctcgtgcctcagcctctcaagtagctgggattacaggcatacgtcactacgcccagctaatttctgtatttttagtagagacggagtttcagcatgttggccaggctggtctcgaactcctgacctcaagtgatccgcctgcctcggcctcccaaagtgctgggattataggcgtgagccacctcgtctggctttttttttttttttttcaaaaaaatgttggttgcaacctattaaattgatttcgtgacacactagttcataaccctcagtttgaacaactctgacctagacgcctgccaagtcttgggaaaataggaaggagacagataattaagtttgggagatgcatagtctaaggccagggttctcaatgttggcagtgcaagatcacgtgaggtacgactgaacacggagatctccaaaactgcggagagttttgcgtgtgaac

SEQ ID NO: 96295 - DNA, 24660 bp, Homo sapiens
acgtgagcccaggagttcgagaccagcctgggcaacatagtgagaacatgtctccatttaaaaaaatagtaattgaaagaaaggaagtgttactacagctgtgagctcttctttttcagatcatgcacttctgtttacagccttctgtgttggagtcacctctgaatctgacagaagccacaccagtgttataacctgtcccattttacaccctagagccagaaggaagtctacgtcttcagtcttcccctgatgttctctgaggaagcagtgtcccatggaatcaaaaactgacggaacttgccaagcacagaagtcagtgctcaaaaccactatttggccaccaagcactgaacaggtcttggtttgctcagggccctggcagtctttatggtcatgatgctctgccctggccatcttcagagtcacccatagagcctctctggtcccggccccaccccccagatcctaaatgagttcaccacaggtgggacgaggcatttgcaagaaactcgaatctcagaatgatgaaaaagggtgagctccctcacttggagtgctgacagtttagctggggagactccatgtgaagatataaaccctggcatggacctctaaggccacagatggagtcagtgtgagacagcatgataaagacagtgcctgtgactgctgacggggtcagaagccctgcatctacgggacagggttaagtgaaaggctacaaagaggaggcaagacttaagtggtgaggacagtggccatacatcccagtttgcctgggactgtctcagtttaaacccgatgtcatgggtaacccctccagtgaacagccccttttactctcacctgtgctgggctggacaatcaattattcagtcaccctagttatgagctaccaatgcctgccttgctggaaaccaaacgatgaaaagcaagtgttcactgtctcacagggagaactaggcaaaggatgactgaaaaatcagttcaaaccactaatccttaaactcacagccttaccttgcccagcacatttatctacacatgagagccattactaagacaaacacagactaggaagcagaggaactccgccgccaccgcacaggagccgcgggggtaccctggagaggacgatcagcctcagggcaggccatctagaagaattaccaataacaccaacccattcgtctctctataaagtgctgacatctgtgctctggaacttacagctgagagagcacaaaacttgtctgactcagcacagtccaggaagtcaagcagctcaatctcaaacaggacagtggtgtttggggggatcaagggagggcagcccagcgttccataggcgtagttcggtttgaacagaaacctggccagctctcctctccgcatgctcagaaggcccagctccatgccccacagtgtaatatctgtaagaatggacaaagaaggtgggtgaagcttgctcagtatcctgctcagtgctatcagtttcttccccctctaagtcagcagtactctggcctccatgtctccctcacacagttccctcttcctgcaatgtcttcctcctgagcctgtgcccagcttctactgatataaattttattcaaacttccaggctcagttcaaatgcccccacttccaggaagccttccctgaacctcccagctagaattaatcatgccttcattaagcacacccacaacactgctttcacctcccaggcactcatccgattctaccaagtgagctgagtgcaggtcagtctcctccactacattgtgaggtccttaagggtggagatgttctaatcttctgagtacatcctctcttttcaccatgtattgtgggaagtaagtattcgattgagttttacttaataaatgaacaaagaaacattcccagtggttagttaagtcagagtgcaaagattataccttgcccgttaagccatctcccaaatgcctaggtctcaaggggagagaacatggctgtgttaccaaaacccagcctcagcaaagccaactcaaagaacctgcgctctgagcagtcttcccagcctgaggcatcgtgcctcatctagcccctaaacaattccttcttctccagctcccactctgaacctaccctctccaagtttcattagccgaggagttttcctaaagtaattagaatcgaagggtctgtccatgtgttccaggtatcccgagtatttcactaggatagaagaaagaatgtaaggaaaatggaccaaaaacacccacgccaccataatatcgagtctctcatgatcacacagaaacaatgtgaacagatgagcttaagctgcccgacaccccgaggtacaggaataaatcttctctctgcattttgggtgccggccctttggctcagaggttcaagagctttgcggaagcatcacacaaaggggacataggagtccctagctttcgtcttaaaaaaactaattcaggccggaagcagcggctcatgcttgtaatcccagctactggggaggctgaggtgggaggctcacttgggtccaggagtctgagaccagcctgggcaacatagagtcccccatatctacaaaaatattaaaaattagccgggcatggtggatcgcgcctgtaaatcccttatttgggaggctgaggcaggagaatcacgagcccaggaggtggaggctgcagtgagctatgatcgcaccactgcactccagcctgggcaactgagcaagaccccgtttcaaaaacaaaaaacaaaaatccacttcaaacaaagcatttccaaccccattaagtgctttttgaaaatgaggcctctctcttcccaacagagtgcgatgacatggatcctgaggacaaaccgccccagggcgtacctagcaccgaagcatcaggcgccactaggtctccagctccttctcggatgacgtccttcagcacgccccggtcccccgagatgtccagcatcctctgacttaaccgctcgtacagggactgatggagaatgaaagccaggcctcagagccgcagacccacccggccacccctcagcgtctacgcccccgaaacgtctgggccctcacctggccgggggcgtcgtccccttccaggactccctggtttaacgcgcttccccccatgtcctagctgccctccctgtggcgtgagccttcggcctggtgcgccccgctgccctccctggctgtgactctggtggggttccgaaggcccctttatgcccggcagacccctaccgacggcggcattccattctggggccacgaggaggcactcatcgtttcgttccaaccgccgccaacggccctggccctcgcgagctctggaactacagaggccacgcggtgaggtgcgaggtatgatccgtaatgggagcgcacgaaacatgatgggacacgtaacgggaccacgcagggcacgttgggtacgtgcaggggcgcgaggtggcggcacgtaatgggagcgcgcagagcatgatggggcacgcgcggtagcgcgaggcggggcatgtaaccatagcgtgcgggtcatgatgaggcacggacgtggggggttaggtggggcacgtaattggagctcgcggggcaggatggggcatctaactggagcgacagagagcacgatggggcacttacaggggccggaggctgggtacgtaacgagagcgagcgggaaatgatggggcacctaacgagcacgcagagcatgatggggcacgggtgcgaggtggggcgcacagtgggagcgcgtggggcatgatgagacacatggcgaggccatcagggcacaggggaagcacttttggaacacgtgagtgacagggctgccgcccttgaaggagccctcggagtggctgcgtggtggggcacgtggggcaggttcaggaaaaaggatgcagcatgtgattgcagggcaacctggtgaggacacgagagccacctgccaccagcagggttcagggctcccagctgtgggttacttccaccttctttcactttctctcttccattgtgttctagagaatttaggcccagacaagacactgattgattgattgattgattgattgacagaggctcgttctgagcccaggctggagttcagtgatggatctcagctcactgcagccgccactccctgggctcaagagatcctcttgcctcagcctcccgagtagctgggattacagaactgcaccaccaggcccagctaatttattttttagtttttaatttgctggaaagatggtttgtagctttgttgctaggctggtcttgaactcctggcttcaagtgatcctccagtcttggcctcccaaagtgctgggattataggcgtaagctacagccaactttcaatactgccccattgggggttaagtttccaacacatgaaattaggaggatacattcaaaccacagcagtatattatgaccataatattcattaactgtataacaggacaggcgcggtggctcacacctgtaatcccagcactttgggaggccaaagccggtggatcgctccaggtcaggagtttgagaccagcctgccccacatgatgaaaccccatctctactaaaattacaaagaattagccgggcatggtggcaggcgcctgtaaccccagctacttgggaggctgaggcaggagaatcacttgaacccgggaggcggaggttgcaatgagccagattgcgccactgcactccagcctgggtaacaagagcaaaactctgtctcagaaaacaaacaaaacctgtataacagagtgtcattgaatttctaaacgttgaaagacttcacattaaaaaaaaaactcacaattcaatattattgagtgaaagtaaccagacacaaaagagtacattctatatgatgctgtttatgtgaaattcaaaaacagtccacatgacaacatggtaataaggacagtggctgtccttgttaggagttatgactgggaggaggcaggagggagctttctggaatcactctacatcttgttcttgagagtgggtgtatatacatcaagtgtttatcaagctgtgtggttaagatttgcacacttgtatatgttataccttgatttaaaaaatctaagtaaataaggatacctttgaatatcttaaaaaaaaaaaaaaaagaggccaggcttggtggctcacacctataatcccagcactttgggaggctgaggtaggaggattgcttgaggccgggagttcaaaaccagcccaggcaacaaagcgagacccctgtctctactaaaataaataaaacaataaaatgaaaaaaaatagagagattgaatcatcatctgccagtttgtattagaaaaaaagagagagagagggaaggctgggtgcagtaaggctcacgcctgtaatcccagcactttgggaggccaaggtgggaggattgcttgagcccagaagttgaagaccagcctgggcaacaaagcaagacccggtatctaaaaaaattttttaaatattagcttggcatggtggcatgcacctgtagtcccagctactcaggcagctgaggtaggaggatggcttgagcctaggagttggaggctacagtgagctatgaccacgccactgcactccagcctgggcaacagagcaacaagctgtctttccccaccccccagcccccccgcccaaaaaaaggagagtaagagcaagagtttgagattcagaaagaactgtttcccagcacctatctgctcctgttggggtcatgaggtgtggacggtgtacccagtccctctgtttctgcccctcctccacagtggccaaggccagcacctgaatgttatcagagcaggcccaacaaaggctgcctccccagtcccgtgatgtaacccagtttccacctgattctggtgaccttggggacacaggggtgttgctgggaaaggggaggagagaaggggcagagaccaggcagtggtgcaggcgtccagctgcatttcccacttctgactctgtgcctgctgttccctgctgggaagaaggaaagccagtgatgctggcttgaggcyrtagtgggaggcccagyggattstgagaagcyaggtattccaatgtcrggctcccccgggggctgctggtgctgcttctgtctcattgacaagctttcataggggagcaggtgggagatcagggtagaggccttgtaggttccaggctctctagaattacctgggagtgtcacctataagtgtagagttctgggtctcactggagaccccctgaagmagatcctttgaaggtgggcctctagaatctctattacacctatgctttcaacagtttccygaaagtttgggaactgatctagaaggtggggagcttgcctaggttttgctgttcagttctaggtccggatgcatgctggggctggaccttgcattattagtgtcactgcaaatgaccctgcagatggcccctttcatgcttgtctccaaatttgagtaaaaaatgtagacacacacacacacacacacacacacacacacacacrtatcttcaagggaccagtttttttcactgcagtcttttgttttacagctgyggaaactgrggcccaaggtcatgtgggttaggactgggatccaggactcaaagtgtttcytmtaaaattctggtgctccttagggttgagggtggtggrtgagtgctggacagggggaggggagkggacaggactgaggtcggatgcctgtgtttcagcccgggcagtgagtgtggatggcttggcaggtgagcctgccagagctggaggacyggcttcagtgtcccatcwgcctggaggtcttcaaggagcccctgatgctgcagtgtggccactcttactgcaagggctgcctggtttccctgtcctgccacctggatgccgagctgcgctgccccrtgtgccggcaggcggtggacggcagcagctccytgcccaacgtctccctggccagggtgatmgaagccctgaggctccctggggacccrgagcccaaggtctgcgtgcaccaccggaacccgctcagccttttctgcgagaaggaccaggagctcatctgtggcctctgcggtctgctgggctcccaccaacaccacccggtcacgcccgtctccaccgtctacagccgcatgaaggtggggagtgagggtgcaggggcggctggagaggcccgcggggaccagatcctgtgctctctggtgccatcacctggcaccaaaaggatccagctatcctcgatttccctgcagctgtgccctggcgcattcattccttagcgtttgagctgcagctcaacccaggtgccggggattgaagccacacgaacaggatgggagctccctggtgtcacgtgctcaccccttcctgtttttttatttgcagttctggtttgttcctttttcttttcttccttctccttccctcttccctcttccctcttcctctccctctccctctctcctttcttttttttctttctttttggagacagcgtctcactctgttgcccaggcyggagtgcagtggtgtgatcatggctcactgcagcctccaactcctaggctgaagcaatcctcccacctcagcctcccgagcagctggggctacaggtgcacaccaccatgcccagctcatttttcatattttgtagaaatggggtcttgttatgttgcccaggctggtgttgaactccttggcctccaatgatcctcctgcctgggcctcccaaagtgctggaattataggcatgcaccactgccctaggccccttgtttgtgtctggacactcccctgtttgcactctatggtgcatgagggtggggacttcattttgtcccctggtgtatttcagtgcctggagccatgcctggcacattgtaaatgtccaaaatgctgaatcagtgaattcctgcctttataggccatcaccaaacctagcagatcattctttaagacgagtaataataatacctggctggctgttatatatataaaacacctgttataaaacacgtgactgggtggcttatgcctataataacagcactttgggaggcygaggtgggtggatcacttgagtccaggagtttgagaccagcctgggcaacatagtgagaccctgcctctacaaaagtttcaaaattagccttgttggccaggcacagtggccactcctgtaatcccagcataaggctggagggaacatcgtgggggtgagatagggccagcgaggtaagctgcggctggggcatggagaggccagtgtgacccgggaagggatttggagtttattcacaggatgagggagcaaggcggaggctggagggttttaagccagtgatgaaatgctcagatctctctggcagaggggagctttgagggtgaggcaaaaggacagtgagagatgaaggtgccaggacctaagtcgatgggaactgggacaaaggcctggggcagaccaaagacaaatttcaaacagaaaaaaaccctgacaactgtgtgtggcaaggagggtgagggacgggaaggttgactccagctctgtgattcccccttgcacagaggaaatgatcgcaggggaggatccggcgtgggcaggtggagccggaggtgcctggatatgtgcagtcgggtcgaggggtgtgcagaccaggacagcggtggggctcagggcgagaggtgtggagggtccttcctcctggtggtcactgaagtcccctttggtggagaagaccaacccaggagagtctacatagtgataagggaagacactgatgatgaccccaaggggtaccaggcttaaaatctggattgagagagagccctgaaaaaagggatagaaagaatcctcagagcgggaacaccagctgagtgtggcctcccggaaatcagagagacagagactgaaggagatcacgtgtgtgaaatgtctctgaggactgaaaagtgttagatgtagcagtaagaactgattatcttggcaagagcaggtttaggggagtatggaaggtggaagctgactgcaggtgaggaagccgagtttatgttttattagttaatgggaaggagggagggaaacaggctgggagcttatctgtcctttgtggttaggatccagcagcccagcttgggtccctgttttagatttgggcttaattttgttgttgttgttgttgagacagagtctcgctctgtcgcccaggctggagcgcagtggtgcgatctcggctcactgcaagctccgcctcccgggttcacgccattctcctgcctcagcctcccaagtagctgggactacaggcgcccaccaccatgcccggctaattttttgtatttttagtagaggcggggtttcaccgtgttagccaggatggtctcgatctcctgacctcgtgatccacccgcgtcagcctcccaaagagttgggattccaggtgtgagccactgtacccggccagatttggggtttgatgatcccgaggctcttctctgttgcaacacagaatacaactaaattgcactcctttattgccctcttttaggtgttcccgttgcctcctgtttattgagattttgagatgctcgattgatgggtgcattgatttgcataacttagttcctctcacggggaaggaatgagtcccgtctgtctgcctggggagagtgacattggaatgtcgttcttgggccgctgtgaaatattctgatgcctcgttctccagagcaaggactctgtccgtttatgccagcaagtgcttgattctttacgcaactcccttcctgaaagccccttgcagctctctggtgcttgggcacgatccaagccaaaaattctgtatattgcatgggtacaaaccgacgggggctctggtcaaatcgtgcagtagatggtggtccaggggtcccggttggcacccccaaggctaggtcaggtttggggcccgggcagtccaggagaagtgcatttatgtcagcttggggaggtcgcaaatccgtgctgtgtccaagcccaccaggaatggattcaggtgtttatgggtgtggggattcaccaggtttaacccaggcccgtgtgagcaccactggccctagaattagcctcacctggcgccggcctttttgtgatggctcctgattaaatacccactaattctggatctgctggtgaccacagagttcacctgatgggtcccctacaggcagcattcaatccaggaagtgccagcatcacatggtgacttctggtagctgtaacgtttagtgactctctccatgtcatgcagaggggtgacattgagaccctcttatgcctgggaagttcctgctgtcaatgcagaatattctttaaaaaaaaattagagatgggatctcactgtgttgcccaggctggtctcaaactcctatcctcaagtgattctcccaccttggcctcctaaaatgctgggattacaggcacgagccattgtgcccagcctagaatattccttttttttttttttgagacggagtttcactcttgttgcccaggctggagtgcaatggcgcgatcttggctcactacaacctctgcctcccaggttcaagcaattctcctgcctcagcctcccgagtagctgggattacaggcatgcaccaccacgcctggctaattttgtatttttagtagagacagggtttctccatgttgaggctggtctcgaattcctgacctcaggtgatccactcgcctcggcctcccaaaatgctgggagtacaggcgtgagccactgcgcccagcctagaatattcttgaattaatttatcttattttttatttttatttttttgagacagagtctcactgtgtcacccaggctggagtgcagtggcatgatcttggctcactgcaacctccacctcccagattcaagcgattctcgtgccttagcctcccaagtagctgggactacaggtgtatgccaccacgcctggctaatttttgtatttttaatagaaatggggtttcactatgttggccaggctagtctcgaactcctgacctcaagtgaagtcccacctcagtctcccaaagtgctggaattacaggcgtgagcttctgcgcccagactattctcgaacaatttaacctgttttggactcaagggtacctgggtggctctggttcccgccctggtttccctgggagtgcttgtggccattgggatactcccaagaaggtgatccaaggagctgagaaggggagggatcagctgctcatggggccatggcctgttgcctccaggaggagctcgcagccctcwtctctgagctgaagcaggagcagaaraaggtggatgagctcatcgccaaactggtgaamaaccggacccgaatcgtcgtgagtgccccttccctctgcccctgcctgggaccggccaccttcactttcctgtagarctcagttctcattggtcctttacagaaaaccatgccttccatataaagccagaactcaaagcattcccagggcggggtggggaaagcgcaaatcctctcaggggaattcaacccagttgtcgttaggactggctccaagttggcttttgccctctgtgtccttgagactgagataacccaggacttgagtctcagggggtaaacagctsaaagcatgggcrtgactcctccgcccctgtgccacctgtgtctgcttgaccttgccagcctgtcatggtgccctcccagtacctgggtgckcaggcgtggagaggctggcagccctgggccctggctgatctccygaagtgagaggcacatggggctgggagccatagtgccccggccctggaggtggctgtgaaacagaaacaggagccgggcaagatccaggagcactcagcctccctcatttaccctcctcacccttgcgcggcaggcggtaccagccctgcctggtggaggcggagctcagggttctgcagggagttctggctccctcacagcaaagcctgctcgcctagggccttcctgctttccttcagttgtggaactctgggatatgcacatttaatagctgaaataggcaaagtggggtgtggtggcgtgcatctgtaatcccagcaactcgggaggctgaggcgggaggattgcttgaggctgggaggtcaaggctacagtgagctatgatcatgccactgtgctccagcctgggcaacagagtgagaccctgtctcttaaaaaaaaaaattaaaacaggccaaaacagagcctctccatttgaaaygggagctggggycaccctccccacggccaccgccagggctccccatgcatggggtgaactccctgcccggcgccaggccatgcagcctcccctgagactcaggtcccaggaccaacccggtcaggaaggccctggggacaccgaggccagccagacagagcctggcagctcggctgtgactctgcagtgascagccctccctgtcccagaatgagtcggatgtcttcagctgggtgatccgccgcgagttccaggagctgcaccacctggtggatgaggagaaggcccgctgcctggaggggatagggggtcacacccgtggcctggtggcctccctggacatgcagctggagcaggcccagggaacccgggagcggctggcccaagccgagtgtgtgctggaacagttcggmaatgaggaccaccacaagttcatccgggtgagtggacagggaggcgtcccatccccatacccgccagggccttccccttcccaacagtgccctagcttcccaccttctagccttaacctccctctctcttgccttccagaagttccactccatggcctccaggtaataaccttggagagagctcagccagggtctggtggctgcgggcacgggcatctcagctccactggttcctccattcggtttaaccagcgcctcccaagcagctgcccacagctggctctataactgagcctgggaaaaacagaggaaagtcatrtccctgccttcaagggtctcgtagatgggtggggaggcagatggtgaactgtgggtacctagaacagcagaagttcactcaagctacagaaatactagaggagggtagctcatgcctgcaatcccagtactttgggaagccaaggcaggaggattgcttgaggccaggagttcgagaccagcctggccaatgtagtaagaccccatctctacaaaaaatacaaaaataaaaaaattagttgggcatggtgtcatgtgcctatagtccccgctactcatgaggctgaggcgggaggattgcttgagcccagaagtttgatgctgcagtgagtcgtgaccatgctactgcatgatccagcctgggtgacggagcgagaccctgtctcagaaaacaaaacagaatgctagaggaggagcaggtgtctgggggacctggcagaggggcacaggcctgatggctgagaaggacccaggacctgagtttgccaggcaagccgaggaaacggtcctgtaaaagggggagtggcatgtggactctggttatgagttcagggtggctgggtgtaaggcaggatatcaccaggagtcggagctgggagaggtgggaaatggccagaagcaacatccaggagcaccgggcatcccttgcttaccctcctcacccttgcgcagcaggcagtatcagccctgcctgaaacttgctctgcagattgtgggaagagagtggatccatgttctagacccaacaaacgaacacgtgyagttcccaagccttcctcactccctgtttatgggagactccgtgtttctcacatttcttttagtcttagagacaatttggtcagaagacatgggtttaaatgaagggacagaggctgggcatggcggcttacacctgtaatcccagcattttggaaggctgaggcagaaggatgccttcaggtcaggagttcgagaccagcccagccaacatggtgaaaccccgtctctatgaaaaatacaaaaattagctgggtgtggtggcaggcacctgtaatcacagctgctggggaggctgaggcatgagaatcacttgaacctgggaggtagaggtttcaccgagctaagatcaccccactgcactccagcctgggcgacagagcaagactccatctcaaaaaaaaaaaaaaaaaaaaaagtcttggcatggtggctcatagctgtaatcccagcactttgggaggccaaggtgggtggattgcttgagctcaggagctcaagaccagcctgggcaacatggtgaaactgtctctaccaaaaatagaaaaaaattagctgggcatggtggcacatgcttatagtcccagctgctaggtaggctgaggtgggaggatcacttgagcccagggggttgaggctgcactgagtcgaaatcatgccactgcactccagcctgggtgacagagtgaaactctgactcaaaaaaaaaagacacattacttggcccccataattggtttctgattggcaggtctggtgtggggtctaagaacctgcatttctgaccatttcccaggtggaccattgactttctactgggaatgggttggaccattttccaaccaacactgctggtccccaaacctgcactctagaagcaccactatagagcgtttccccttctaggaaggagatgggtcctccctgaaggggctgtgcaggggaggggatgatgggcattgatgggcattgtgactgcagtcctgcactgtggatctggctgggcaaacatagataggatggaggggtggggtgggccacgtgatacctcactctcttgtactgtgaactgtcacctgcagagcagagatgccgcaggcccggcccttagaaggcgcattcagccccatctccttcaagccaggcctccaccaggctgacatcaagctgaccgtgtggaaaaggctcttccggaaagttttgccaggtgaggccctgacccgtcctccttcctgagggctgccgcccagggcaggtggcagttcatcgattgtatcagagagataataagctacagagaactcagatggaggtttgtggagggtcctagtgagagcatgggactgagtttccgaacagcttgggttcctgcttactctttcctttcctagctgctggctgggcaagttgtgtcatttctgagcccaggttcctcatctgtaaagtggggctatttgcacccacccggccaggctgcagagcttgtatatagacatacgtgtgttgcagcttagtgcttcataaatggtattaggttggtgcaaaagtaattgcagtttttgccattacttttaaaagtaatgtactttttggctgggcacagtggctcatgcctgtaatcccagcattttgggaggctgaggagggcggatcttctgaggtcaggagttcaagtccagcttggccaacatggtgaaaccccgtctctactaataatacaagaattagctgggcgtggtagtgtgcgcctgtaatcccagctactcaggagcctgaagcaggagaatcacttgaaccagggaggtggaggttgcagtgagttgatatcgtgccattgcactccagcctgggcaacaagagcaaaactccgtctcaaaaaaaaaaaaaaaagtaatatccttttaaaaatgtccttcctactcaaaggacaagtggtcttcaaagtaatggcaaaaaccgcaattacttttgaaccaacctattcttgttctctgtcaaaaacaactcaaacacatttcattcctttattactagcatgctgtcttgtacataagggagactgctaacagagcgatttcatccaccaaaagcaaaaatagggtttatataaaagaaggggctgggcacggcggctcacgcctgcaatcccagcaccttgggaggccaaggtgggaggactgcttgaggccaggagttcaaaaccagcctgggtaacatagtgagacgccatctctacaaaaaataattagtggggtgtggtgttatgtgcctgtgggcccagctactgaggaggctgaggcaggaggattgcttgagcccaggagttgggaggctgcagtgagctatgattgcaccactgcactccagcctgggtgacagaggagacctcatcagtaaaaaagaaaagaatgaaaaaaaaaaaaaggaaagataagaaggaaaaaaattgcagtttgtgaactgtgaatcctgtttgtacatctcacatttctttttttttttttgaaggaaaatttgtattattttcatgtacagaaaactcaacagtgtacgttttacccagtttagtggtagtttctttagtctttgcctttttgagcttggcaatgtgagccacagacttgggacccaggacactgcctccccagtgatggcggatctcatcacatttgttgttgtaattggtcctggtagcttccaccagcttagcccaagctcctttgtcttccaagttaacctgtgtgaaggcgacagtggtgcaggtcttcctggggactagacatcccagtcttgccttccccttgatgatgcagtcagggaccccactttacacacaggcacaggcaggaagacagccagcttgatgggacccatgttgcgtggagtcaccaccagctgagccttcctttttttttttttttttttgagacagagtctctgtcacccaggctggagtgcagtggtgtgatctcagctcactgcaacctctggctcctgggtacaagtgattcttctgcctcagcctcctgagtagttgggactataggcgtgtgccaccacgcccggctaatttttgtattttagtagagacggggtttttcattatgttggccaggctgcttgcaaactcctggcctcaagtgatctgcctgtctcagcctcccaaagtgctgagatgacaggcatgagccactgtgcctggcccagctgagcgttcttgttctccatcaaggtggtgacggtgttaattcctgctccaaggacaggtggcctcttagtggggacgtcccctttgctggcagctttcttctcagtcagggccaacagtctctgcttcttctcttgctttgcccctggtctgtacttctgggccagcttaagcagctgaatagctgtttggcggtccagggcctgggtgaactggttaatagcaggagacagtttctgctacttatagaggatggctgtccgccactgcaccctgaccgagcaggaccattgcacaaagtgggcgaggtccgttttggcctggaagtcctgtccagtgccaaaagtcttaggccttttctcaaacgggataaaccactttcttggcctcctgcttcttcacgccagcaggggccggagccaccttcttccccttggccttctttccttgcggcaacttgggtggcgggaaggggtgggaggcgggcaggggggagcacatctcacatttctggggtaaacggatcagctggtaactagcaaaaagctcaggtgggctagttcgtccttgaataggctgactaggctagcaaatccaacagctgcagttgttatgggttctccagaaatccctgagggctgagctataggctcacaggacaggtgtcttccgggtccttcccacaacacctctgtgtcaggcaggcaggccagaaccccgagcccagtgtccatttctttctccagccacctcagccccccacagcccaccaagctgctcccttttatataaacactgtttttgccttgggtggatgcaatcagtctgtgattgatcttccttatgtaaaacttcattcattcattcattcattcattcattcattcattcaagggagcagccctgtactggccccttctagaccctggggctagagagatgaggaagacacagcccctctccttggggagttcagggcctccatcagcttctgtgggccgggtctgctgccctccacgtggcctcacagaccctctgtgatctccctcccagccccggagcctctcaagttggaccctgccactgcccacccactcctggagctctccaagggcaacacggtggtgcagtgcsggcttctsgcccagcggcgagccagccagcctgagcgcttcgactacagcacctgcgtcctggccagccgcggcttctcctgcggccgccactactgggaggtggtggtgggcagcaagagcgactggcgcctgggggtcatcaagggcacagccagccgtaagggcaagctgaacaggtcccccgagcacggcgtgtggctgatcggcctgaaggagggccgggtgtacgaagcctttgcctgcccccgggtacccctgcccgtggccggccacccccaccgcatcgggctctacctgcactatgagcagggcgaactcaccttcttcgatgccgaccgccccgatgacctgcggccgctctacaccttccaggccgacttccagggcaagctctaccccatcctggacacctgctggcacgagaggggcagcaactcgctgcccatggtgctgcccccgcccagcgggcctggccccctcagccccgagcagcccaccaagctgtagggccgcccggagtcctgccggcccacaggcccatcccggcggggcaccggggactcgcgggcttctgctgggtcccgcctgaggtgatatcgtcactgtttaggaaggtcttcaggcctgtgtgtccctggaacatgtaatgatagggaacaggaccccagtccctttcccctcagccaagggtgtatttgtaaacttcggcccccaggccttggcagccagggacacactgaaatccccatggttcctgccacttgctaaccatgctatctgcgcagacgcttccgagggcagaaatagtcccatgtataccttttccatattactgtgaactttcaactactatcaaggataataaatttgacattatttctttctctttaaatgatttgcacatattagttgctatacatactgctttatgctcgagtcttttttttttttttttttttcctgagatggagtctctctctgtcacctaggctggagtgcagtggcacgatgtaggctcactgaaacctacacctcccggattcaagtgattctcctgcctcagcctcccgagtagctgggattataggcatgtgccccatacccagctaatttttgtatttttagtagagatggggtttcgctgtgttggccaggctggtcttgaactcctgacctcaaattatttacttgtctcagcctcccaaagtgctgggattacaggcgtgagccaccgtgcccagcctcgagtctagtttcagagacaggatcttgctctgtcacccaggctggagagcagtggcacaattgtagcttactgcagccttgacctctcaggctcaagtgatcctcctgcctcagcctcctgagtagctgagacaacaagtgtctgccaccatacccagctaatatttaaatttttagtagagacgggatcttgctatgttacccaggctggtctgggcctcaagcaatcctcccaccttggcctgccaaagcgctgggattacaggtgtgagccactgtgcctaggctgtcatacccctttgactcaccatacccacaggctaagtgggtcctggaagctctggggtagccctctaaccaagatgctggctctggccactggaagtcaaactgggtgcacagaccaataagagggcctgagggagactagctggggcaaacagcaaccctcagcctccccacaatcctgactttcctccctcctctcctcagtctccttcaaggattcagcctctcctcctggccactcatggcctgaggacctccaggctcctcttctggctgtctacccctccacacccatagctccagtcatcacttccacagggatgactcagaagttccctctccgggagacccgtcccttacatgccacatccagtagcgctccagccattcagcagctccgcctggacgtcaagggcatgtccaaaaccgcgctcatgatcttcctactcccccatccctgagatttatcctgtggctgtggtgtcctgtggctactgtaacaaatgaccacaaacttggtggcttcaaacaaatttaatctctcatggttctgaaggccagatgtccaagatcacgatgacggcaaggccgcgctccctctggagactgtcggggaaaacctgcccctttcctcttcagcttcaggtggtggctgccatgccctggtgtttcctggccctgtggccgcatcattccaatctctgcctccgtcttcacgtggccttttctgtatgtgccggtctaatcttcctctgcttcttattttttttttttttttttttttttttttttttttttttgagacagagtcttgctctgttgcccaggctggagtgcagtggtatgatcccagctcactgcaacctccgcctcccaggttcaagcaattcttttgcctcagcctcctgagtagcagggattacaggcatgcaccaccacacctggcaaatttttgtatttttagtagagatggggtttcaccatgttggccaggctggttgcgaactcctgggctcaagggatctgccagcctcggcctcccaaagtgctgggattacaggtgtgagtcactgcgcttgtccttcctctgcctctctcttatagggatactggtgatgccatgcaggacctgcccagataatcgaggataaccttctctccaaatccttcccctgatcattcctacagatctcttccatagaaggtgacatttccaggctctaggaattaggacctgctctctctgggtggccgttgttcactccatcaccccacgtttccccatcctaccaaaagacacagcagcattgtgtgaactgcccaaactgaaaacctacgagttattctcgacctgtcctttttcctgagcaagttctgtggatttaacttagcggtcacactgccaatttcaacctaactccactgccaccaactcagtccaggccaccagttcttgtttaggtgactcccatgacccccattggtctctccctgcctcaactctgccccctccatcctatatccccacactgtaaccagactgattatttattttttggggaaagaatcttgctctatccccctggctggagtgcagtggcacaatctcagcttactgcaaccccagcctcccaggttcaaatggttctcctgcttcagcctcccaagtagctgagattacaggtgtctaccaccatgcctggctaatctttgtatttttagtagagacggggttttgtcatgttggccaggctggtcttgaactcctgacctcaagtgatctgcctgcattggcctcccaaagtgctaggattacaggtgtgagccaccacacctggccagactgatcttttaaagaagtatatgttagcacagcactccatgacttaaaaaccttaagaggactaccatttctttcaagataaaagaataaaatcctcgctgggcacagtggttcatgcctgtaatcactgctttgggaagccgaggtgggaagatcactttaggccaggagttcgagaccatccatgggcaacatggtgagaccacatctctacaaaagataaaattagctaggagtggtggtgcatgcctgtagtcccagctacttggagagtgaagtgggaggatcgcttgagccctggagtttgaggctgcagtgagctatgacggtgccactgcactccagcctgggtgacggagtgggacctcatcaaaaacaaaaacaaaaccgttattgtggctttgaggcctggatcatacctacatcacttaatttggccaaaccggcccatttcaggtacccaaataccccacgtgctttcttgcttggctctgggactaatgtggttactggtgcagggtgaatggcaggtattgtaaaccacattgtggacctagagttgctaggaccttttttgccattacacagaagcctccctgagaacacagccattggatgacacatggcagaggaagataagacaataaacggagacacaaaattatggccagcgcgggggctcatgcctgtaatcccagaactttgggaggccagggtgggcagatcacctaaggtcaggagttcaaggccaacctggcaaacatagtgaaaccccatctctactaaaaatacaaaaattagccaggtgtggtggcgtgggcctgtagtcccagctactcgggaggctgaggcaggagaattgcttgaacccgggaggcggaggttgcagtgtgccgcgattgcgacactgcgcgacagagtgagactctgtgtcaaaaaaaaattatatatatatatatatatatataatgactaatacacatgtgaagatatttaacctcagtaacttcagttaaacagcagtaaaatcccattatttgcccatcagattggcaaaaacttaagaactagagaagaagtggcgaaacgggctgcagcgtcgcactccctaccccggcaggtgcgcgatcacacacacgccttgcagggcgacttcgaccggcacttccggtcccggaaggtcgtgctttttgaccccggaagtccgggcgggcgccgagccgggtgcgttttgccacagagccgtaaaggcgcgcgggaacatggggctgtatgctgcagctgcaggcgtgttggccggcgtggagagccgccagggctctatcaaggggttggtgtactccagcaacttccaggtagcggacctgggcgcgagtagtaggggtggggagtgaggaacccggggtggggtcggacgggcccgggtggggtcgggaggtggggcccggcgaggagggccgggggagcccccacccagcttgtcttcctcggccacacagaacgtgaagcagctgtacgcgctggtgtgcgaaacgcagcgctactccgccgtgctggatgctgtgatcgccagcgccggcctcctccgtgcggagaagaagctgcggccgcacctggccaaggtgaggggaggggagggacggggaagtgaaccccgacggtcagcgctttgtcatctggtctcagctctgctgccgtgcacggcgggactggagcaagtcgctcatctgaaatgagtatgagccgaccttccctgggttacgaattaagatgggatgaaaatgctttaactttgagtgttttgaaggattaaataaccgaagtacaaagtggtagtggcggagactgtaaggaagtcgggcgtggcggcgcgcacctgtggtcccagctactcgggaggctgagggaggaggatcacttgagcccaggaggtcgaagctgcagtgagctatgatctggccactgcacttcagcctgggcgacagagctagaccccattctaaaaagaaaacccaaacccacgaaagggtaatgttggcaagaagttgggtgcagaggtgtctactggtgaacatcggtggagaaagggtctaaggctgggaagcgagacgccaggttccgatcctgttctgtagttaatttctggtgtgatcttggataaggtatcccacctgtatcttgtcaggtgatctgtttagccattccattgccggggctccattagagttagttctaaggcattcatgcttcatgcttagggcatttttgtttttgtctttgttccctcattcccaggtgctagtgtatgagttgttgttgggaaagggctttcgagggggtgggggccgatggaaggctctgttgggccggcaccaggcgaggctcaaggctgagttggctcggctcaaggttcatcggggtgtgagccggaatgaggacctgttggaagtgggatccaggcctggtccaggtaagctggaaggagttggggggtgggggaggcggggaactttgctcctgcctactcactgctcattgcgtcctacgtagcctcccagctgcctcgatttgtgcgtgtgaacactctcaagacctgctccgatgatgtagttgattatttcaagagacaaggtttctcctatcagggtcgggcttccaggtgagagcttagagccctggctgtcctcatctagggaggtgtctggggtattgggaagagaagtggctggatagttgtgactttgctctctgggctttcttcctacctttccagcagtttatccatctccaaggtttgtcttcctgccatcccttaaacatcgaactcctaggagcctcatcctacattcttcttgatctctccgttttttctctagctttaactcctgcctcccacctggtgattctcaccacccagtgtagacttccctcttgcattcttacctcctcaggttcatatgaacgcaccacagatgctaacagtcgctgcatttgtcatctttcctctcagactttacacctagtacatccccagttaaatctaacagatgtcaccatcttccacccatttggtcaagccagaaactgagtcatcctaggtgcttccttctcctccctccaatcatttac

SEQ ID NO: 96296 - DNA, 33843 bp, Homo sapiens
accaacccaaatgtccatcaatgatagtctgcattaagtaaatgtggcacatatacaccatggaatactgtgcagccctaaaaaaggatgagttcatgtcctttgcagggccatggatgaagctggaaaccatcattctgagcaaactagcacaaggacagaaaaccaaacaccgcatgttctcactcataggtgggaattgaacaatgagaacacttggacacagggtagggaacatcacacactgggccctgttgtagggtggtggttgggggagggatagcattaggagaaatacctaatgtaaatgacgagttaatgggtgcaacaaaccaacatggcacatgtatacctatataacaaacctgcacgttgtgcacatgcaccctagaacttaaagtataaaaatatatatatatagactctataaaacagaaaaagaaaataatttatcagtttttgccaaaagacaatagaagttatgaaattataggtatttattcttatgctttctagtagactgaatgagaggctctggcggaactagctcagaatttgagacaggtcaaataatgtaattgtaatagctaaggtttttcaaccttggccaagtactttatcttaaatttcattatcaaatctctgaatagaggtgataatttacccgttttatggctacatataaaaaaattgacatttggatacagtaagtagcatgcccgaattagtttatggcgctcctgatcctaggactcatcgtgtctttactgaacctttactgatgcatgtccatattcccctcagctggtctctctctcttcaccgtggttctactctgggctacctgtgaacactggtaacctcaatgagttgcagttgtctcatagaacaatgatgaaaagatattcgtggacctggatcattatggtgaaaaaaatggtttgttaagagcttagaaaataataggcaatcaattattctagttctttccatatttcagaatatatatcaccttgagcaatataataaatcatttttcaaactttttgaaccacatatttgatgcccagtctcacaatggcatttctatgttctgctttatatctaatggagctggaaaaagttgtttttgagaatcctttgacagatggtttcttgtttagttttgtcaattgaaggcaatcacatggaaaaagtaagtggaaaggagaaggtgatttctttcctattcgtttctggttctgacattggagtggtaggtgactgcttatggctgtgagttcctggacttctgcaggctcagtgtgcatatgggaccctgacttcctattatagcagttcataaaaagtgctctagcagcctccaggagctcccagaacaccctttgctcctccaaacttagatgagccagtgactttctgcagttactgatttcaaggtatcttcatctttcttttttggttcctccagttttctaacactttcaccaccatttcactacattagagtctctgtctgaaatacttaaggtggtttttgttttccaaagagaatcttgcttgacaaacttctgtgaaaatacttcaaacttttaggttataattatattaaactgatacaggaaaatgtgacattgcaaaacatagttgctgccttgatgaccttaagcaatttcctttatgtgatggagtacattgtttaagggactattttgttaaaataataagctagcttaaaaaacctccactgttaaaatacagcatttattcttatcttttaatactatggtcaatgaaaggttatgtcatttaatgaaacaagcatggactttggagacatcagagctactactgtcaatataagacatctaaaaattaataaatacatattatatacatacaaccaggttaggaaataaatgcatcgttgactttatagtcaaactataaagtttaactcagtgactcttggggctattttctagccatacattatcctaattcagttgtaatgtctgtgggcaacgcaggaacattaagaaccattagaagagaaagcattgataatcacagtaggtaaaagaaaaacacaagctaaactggctagtgtactattatttgcaaaggagttctactagaaaataatatactgtttgattactgtaagtagaacatcaaatgataggacagaaaccaacctatgtatcagctctggaaacaaagtttttaattaaaataaacaaagtttgctttccaaagcttcctcttggtttgatttccattcatctgctagctataatgactggtacattcctgaatctggtttgttctgtttccaggcatatgagaaagttgtgtccacagctatcagatggttgccggcatgtgaaaagggaagaaatttaacttagagttggtaagcaaaatagccccagacaagcattcttatttggtctcaggaccctttgacagtgctaatttatagaagaccccaaaaaacttttatgagctaatcaatatttaccaaattaaaagttgaaattgagaatggtttacaatatatactaattcatttaaaaataagactcattgtattaacatactttattaaaaaaaaaaacactacattttccaaaacaaagctaactgaatgaaagaagagtgcagttttactttttttttttttttacatcgttttaatgactggtttaatagatatagtcaaattctcatatctgcttctataatcaatctattgctacatcacataccatgtagcttctggaaaactccactgtacatttgagagtgcaagtaaacaaagcaactagagtcttagtattattataagaacaattttccctcagacactctgcaagagtcaaaggacccctatgggtcactagataacacttggaacaccgccgccctaaactagccacatgagtggtttcaacgtacattctattgtaacacatcattttctcatgcattttcatggatgtcttcagatattaagtaaacaaaaaaaaatgctttgatccttaagtaaaacaaataacattggacaatttttgagtgttggaaggataaatggagaagagtaggtgcctggagatgtgtggtattcagcaaagtattttgtaagttgtgggaaatagacaataagctataagcaaacaggcaactgggtaattcctagcagtcagctgcaacttctttacctttgattcaatgaagcaaaatggaatcccagtgacagtaacattattacagaaatacattgaaactgttaggctctgatttatttaagcaaataatttgaagttttggtacttaaaattactggaaaccagttactcttaattactggaaaccagcactctgacaatgttgagaggtgctgtcctgtgttattcaaagatataaacttctatctttctttcaagtggctgatggaggtagggtgtatagtattccatgcattcaattctgcttttcatatgcaactactgaaaaatgagaagttcacttttattcatatatatatacaaatggggatatattcatatatatatataaatggagatatatatatattcatatatatatataaatggggatatatatacacactcacatacacaaatgtggtttctggggtttttttgagacggagtcttgctctgttgcagtgcaggctggagtgcagtgacacgatctcgggcaacttccgcctcccaggttcaagcgattctcctgcctcagcctcccgagtagctgggattacaggcgcgtgccaccatgcccagctaatttttttgtgtttttagtagagacagggtttcactgtgttagccacggtggtcttgatctactgacctcgtgatccgcccacttcggcctcctaaagtcctgggattacaggcgtgagctactgcccggccatgtgtgtattcattcattcattcattcatttactcattcatgtaacacatatttacagagaacctctttaagtgtgtcaggcactattcctggcagttgagatacaaaacagaacacacattcctggcctcctgtgtcttgcgtcctaatgtgatgagaaatatgatgaagattagtaagtaaaataaattatccattacactgtgataagtattaaaaagtaaaggaggaaatatgaaatattgggaatggaaacatcatgacttaaaatatgctgacaagtagagggactgactgaagagttggacatctgagcacatatggagggagcatgatggggaagagtgttctaagcagaggaaaccacaactgcaaagactatgaggttggcagcttgtggagagctttctgggaatacaaagctgggtaaacagtctgtggggtcaaagaggtaatgaggggaggattttaaagccatcgttaggactttggtttttacttgtgttgggaagccacaggagactttgagcaaaggagtggtacgatctcacttctttttaagtagatttatttaggattctgtattaaggatagagtcaaaagactagttcctggtctaccgtaacactataatccaaacaagagatgatgcagattgtagcggaggtggtaagtagttggatatactttgaaggaagagccaacaggttatatgccaaatgcatataagacataaaagagaggagttaaaggtgggtttgaacaaggaaagatgcaaccatttactgaaatacaaagaccttgggtatgagtgagaaggggttgaactagctgacatcttacagtctgtgcctggattcaaatctcagctgtgtgtgtctctctctctgtaaaatgggaataataatagtgcctacctcatagtttattatgagaattaagtgggtatatatgaataaagcacttagagcaacacctggcacattgttagttaatattagcattacctcttcaagctggaatcttcgagtacatatcaaattttagctattctctgttcatgggctgtgtaggatagagggacaaaactgagtggctaataagaagataaagatagaaaactaagcttaaagttaaaggatatacacttcaatatttctacatgtatggaacagtattgcatacacgcgcaagcatcactgaactagatgcacccttcaagagattgggttacatattgatatatatgaatgagaaccctgaaataaactgacttcagaggaataacagaaaacatatacatttctatacctataaggacactgaaaacttccaatcctgaatcaaacagttaatgaaatcccaaaatgcaacactaatgcaaatgagaagacgctgtcatagaatgttgaaatacatactcttctaaagataaaaggtctgctcttccaccctcttcattttcctacaaattaggaaaatttaatcagttctgaaaaaggaaatgtacatgctaaaatggtgaattactgctagagttctgatgtttaaaaccacaggcttgcgatcaaaataacctctttaattttagattatcatgcagattaatttcttcagtttctcaggcactattctgttttttttaaaaaaagggtggggtttcaaaagaaaactaatactcattttttccccgattaaattgctcaaccattaaaaaggagaacaaattggaaagtcctacagtactctctcccctccgtcccccccctccccattttttttcttgaaagggaacaagcagtacttttgctaagggatctttaagccgaaactcagctaggcgccccagagcttcctcaggatagcaaagctggatttttgagcagcaccacctgctggtcctacacacgttttacttcctccaccccaaatctctttctgttggaactgcactctttcagagcctctgggccctaatacaaagcaagcacactctaaagaagccagaagaatgcaagcagcgaagtcgccgctccccacaggcaagagagtaccggcagacagcggcgcgagacaggggcagaacgatgaggcgccggagtkagctcgccggtgcgggtgcgggtgcgcggcgcgtcgcggcccctcctccgcgacgcgccgggtggtcacgtgacggccgcgcgcgttcccggcagctgcgggctccgaggccagagagaaaagactgcgaggtggccgcagctgtggccggagaggtgggagtcggagcgaggccctctcgggggagcagggtgaacgccggccactctaggatcctcactcggggagaggaggcatagctcgcggtgtcacctccagccgcaacgtactccgggtcggccttgcgctcggggcctgagaggggcggcggcggggtcaggggccggtacgtagatggacgcccttgggctggcgcggccccggctgtccgcgcagaggcgggatgggacagttcagccctttccgccacccccgccttggctgctggggcaggcaagacgaccgtgacagcccctgcgctgcccgagggcgccgcagcccctgccctgggtgacggccggagctggtctcggtccgggtgcgaggggcggagcagcggccattactgcgcagcctcttccgcctgagcccgcttcgctgcctcgggtggcaggcgggtccctctcctcccctctgggccgtggttttaggcctttacccggggaccttctggcctcgaggtgtaggggcggcgatggtttttcggcggtagcctgctccatgttttcccgtgtggggtcagacagtttgggccttgggtcagatcgaagccagggcgtacagtctgcatttttgccttttcccggagtgtctctggctgctgctttctcttctctcgctcttcctccttttttttctcctgctcagtgtctcggtcttgcctaaaacgaagagagcaatccctgcaccttgtcctagtgaagcccagcgctgcatattcttagttgtttttgacggctgttgaagcatcggaacaattaagagatctcagaatatcccttgagcctccaaaccctctgcatcttaaaagctgaggctgttgctttgttctgattgttgggtggggagttctcttcctaccctccatcccgtctgaaggagtgtgggtcttccattgttgtcgctatttattttgctaaggcttctaaagaatgtaaaattgttttaagagtggagacggaaccgtcctctccacaggtaaaacctacaggactgtaagtttacacacacatcctggcaactagaatcttttctcgttaatcatattggtatatgttttaatttattttctctaagtgccattttagtgagcacttatttctcaagttttgaacattttgtttaatatttttgtaatatcgaaacagtgtagaactgaggagagaagaaagcccaaagatgatagggaacgctttgttctttgtatgattggcatttcaggtagtgggcacatcccccccacctcgtgtgtgtacttttcaaatgggatgtgaacgtataatattggcattcaatccagtatataattatagaatttggaagacttaggacattttagtcagtgaatctatatttagacttttcaaagacatggcacgtaaggacacgtggagaaaatgtcccacacagataacaggatttgtgattttggctttgctgttttatgattagcaaatattgtttgtatagagtgtctgggtgccctaaaaacacatgaaaataggtcaactaaatctcgttttaaagagaaaaccggaagagtgaacaccactctaaaaatagattttggatgtgtttgttttggtgccttgtatatcttaaagtggaggatgttgttcagcccaatctttcatttagaatttatgtctcaaatgagccagtgtatcatgtgggcagactggaaatacatttaaatattttttttcttcgctggttgttcagaacttggtagaattataattatcaggaaaactctctccaaatagctggtcttttagacaagagaagaaaaaagaaataacttcttttaaaaggagatgtcaacttacaaagtgttttgtttcagtctccaccaacctaacttgtcagaggaaaggaacagacttttttttttaaaggatccaaaacgatattttgagtcaaaagaagaaaaggatattaaatcttttgttttcacaatatcgatctttttaaagaatattattttatatgttaaccatatactaccaggaaacatctaacagcactgacagttgggaattcgaatgcgtatttttctcccgtgttagtaatagaaggtactgagccttttccattctcttggttgccttgtgcctgaggaatctgaatttgtgaaacaacatctttgtggatatagaaactaatttatgtaacacttggctacaaccacctgtgcttacttacggactatctttagttttcatggcgtgttaccttttgggttaattcaaatccaaaatgttgttaacggactgctaattaaagyatttagaacttagaattacagaattatagagtaggatgagataacaaaagactgggggttatgacttgaccaaggtcacacagataatttgccaaagagctttcttatttatgaaatggttgctggctaagaaacatctgtgtgtgatatgattaaaagacaatattcgttcacttttacatctcatgttttgaaataaaatgcaaagctcacttttttgttgttttgagaaaaattaaagggtttaatgggctagtataaagattgtgaaggcagtaagtagactgccacatagtaacgtcttaaagggaaataattctttaaagtatcagaccccatttagttgaaatgagttttgtctgaagtttccaagtatgacctatgctttttcttagctaatttttagcaggagatgatgagggctaaaarttgagacattagggcatttagttacatctctcaatttgtgactggtttataaaaaatactaagatgtgtctgctaactcacacctgatttatctactccttttatgtatatataattttttttgagttgtgtaccaaaagttggaacatttcaagtattttttctttctgtcactgagtgatttcatgtagaacatttactgttttgtgtattttgaataaatggcaaaaatcttattaaacattagctgttaataattagaaaaatacagtaagtcttcaaatatttataattgatatttgtctttgtttttatatgtatttatattgatgttatatgctcatctttttctttgattaaagataatcgcttgcttgaatctattacctgaaaaaaactcttgactttgatcttgtgactgacttgaaaagtgggagtatgagtattttgagttgttacaaattataaatggtacaatattacttcatttttagttgtatttatttttcacttatttgaatgggtcaagatttaaattcattgataatccctaaacccctttgtgtatttttaagttttacctgtcactgtttttttcctccagaattgttaggggcaaagtatctaatttggttttagactttttcttttttttatgttaccttcttcatacatcatcatattaagtttggtgtaaaatttacaggtcattcattccagtaggaattatgtatgtttgagttatttatgtttggcaaattaattctggcctgtagttgaaatcatactgttctgttttacatccccctattggttaaaataaaagcatcccttctcctccaactttaaaaaaactttggtttcaaataatgtgggagttttctgagggcttcttcacatgattgttataagtattacatgtatgccctattttgtgcccagttgaaattatagttgaccattgaacaaaggtttgaaccgtgtagttccacttatacaatactttttttttctgcccctgccacccctgagagagcaaaaccaatgtttctttctcgtcctcctgaaaaagatgaaggcctttatgatgatccatttctacttaatgaatgtaaacatatttttcttccttatgattttttttttttttgagatggagtcttgctctgtcattaggctggagtgcagtggtgcgatcttggctcactgcaacctccacctcccagattcaagagattctcctgcctcagcctcccaattagctgggactacaggtgtgcgccaccatgcccagctaatttttgtatttttagtagagacggggtttcaccatgttggccaggatggtattgatctcttgacctcatgatcttcctgcctcagcttcccaaagtgctaagattacaggcgtgagccaccgcacctggcctccttacgattttttaaataatgttttcttttttttagtttattgcaagaaaacaatatataatacaacatacaaaacatatattaatccactgtttatgttatcagtaaagcttccaggcaatagtagactattagtagttaagtttttggaaactcaaaagtttacatggaattttgactgcgcagggtgtagacattcttaactcctcacattgttcaagggtcaactgtataaattctsagagttaataggtgatgggtcagtttggcagaattggggctacctaaacccattaactttgattataacagaatatgcagttttcttttttaatgtgtcttcggcaaaagtctaggtaaattaacattgaattcattgtctctattaaacaattcctgtagtgacttgtcagttttgtatttaacaagattaatatgcaagacattctagaccagcattgcccagtaaagtagccactagccacatggagttattgagcacttgacatgtatccagtctgaattaagttgtgctgtaagtgtaaaatacacactggatttcaaagaagtatgcatacgcttacccaagaacataaaatattacattaacaatttatattgaaacatactgaagcagtaatgtagaaacgttggattaaataaaatatattattgaaattaattttacctgtttctttctattattatttttgtagaaatgggggtctcaccatcttgcccaggctggtctataactcctaggctcaagccatcctcctgtgtcactacccacaaagtgctaggattacagatgtgaggcaccatgccctgcctctttttattattaatgtgrctaatagaaaatttgaaattgcatacgtggcttgcatcatatttctattagataatacgtgaccttttctgtgagagacaatacattgtagaaagacatttttaaaggtaaatttgaatttgaatcgcatctcccaatattgatggctttgactttgggtaagtcatttaacttcctgagcttaggcttcctcatttgtgaaataggtatagtcatatttcacagggttgttttgaggattcagtgacatatggatttggtagtgtttcactaactaatatatgtgaatcacttggagatctggttctgtaggtctagggtggcacttaggattttcatttgtgaagagctcccaggtagtgctgatagtactagttgggaatcccagtttgtttgtatagctaggatctagagcattatgttagttttaattcattttccttccccagcrtttatccagttagtctgcactttgaaaaaattattcatgaggatatagaaattgaaaaagtcaccaaagcatgcaagatttactaaaattatatgaactgtggactcttagggctgctgtaggattcctgtttacatctgttaagttttttgtctgcttttatctggagtcacttttattggttgcataagatggctaaatctcagccaagaagaacctggttgtgttgttctacgcaaatgtatttttgaaagataatgcataatgagaggtgaaataaaagaatgctcaaagacaataagagggcagtacaattgacccttgagcaacatggggttaagggtgccaaccccttgcacaattgaaaatctgagtataagttttgacttccccaaaatttaactactaatagcctactgtaaagtcagttaacacgttgtttgttatatgcattacatactatattcttacaataagctaaaggaaaataaattcctaaggaagaaaaaatacatttacagtactgcatttaccgatactgtgtttatgttacctgtttataaggtgtctgtctgaaatgatgggtaactgcagctgcagacccatctagggtgtgtaccaggtaatttaacttcttgtaatggcatgacttttcttggcttcttgggagcacttctagcatcactagtggcacttcacatgggtcccatggtgttattcaaggtttatggtattgtactaaacatgatgaaaaatacacaagaacaagagattacattttactccaatacatgcagagatgattagtgtccacagcattttaagtggaaattcataatagcaacaggaaattattacagtatgtactacaattaattttatacagctatgattcatactgcatctttacatttgtttaaatttcttgtaccacctcaagtggcaccatatgtgtctgtgtttactaagttttgatacactttaacttcttataatttctctatattttataatactaaatgataaaatagactatatatgttttatgcattcataatatacctaatttttwcttttcctttttttgatgtttcaagactacatgattcatctgcaagttttttcaaattgtcacaaatctccaaaaaaatttccaacatatttattgaaaaaactgtatgtatataagtcaacttgttcatttccaacctgtgttgttgaaaggtcagctgtatgaggttatcgtcaaagatctttaaagaaagaaatgacatcatcaatattttgaaaattagagaaagccatttctaaaggaatcctagaaatgacttcaggccagaattagaaaaaaaaaaattgaagaaataggctaaataaatatgtctttggctgtgttcttttgaaaatggcattaatgtatagaaagatactcgaatgtgagttatggtcactgatacattcttttgtttactgctgaacataactggactagaggagtgtaatgagggcaaggatgttctttctgttgaaggagaaagtttatattgatggaaagtcattattcatagatactttgctgttatttcagtactattaagtaaatagttctctgctcctgggtttgtgtgtgtgtgtgttttctttataaggggctttttcaaataattttgctattgataagttacttgaatttaatcattagtcttcaaataaggaaagcagaatgagagaatgcatctccttgaattaaccagatttttttttagtacctttgttctagtggatatgtagcaaagcttttactttaatatttgtggctatagctttatttcagctatgtgaaatagttttataggaaagatcacagcttatttgggtgttcaaatatgggttctttagaggatttttttgtacttattttgaagctgctttgtttcagttaacttagattcctttaagaatcaacttttgtttcagagataaaatatttatggataagacctaagtaaagtaagtgaatagagaggaataaattarattggttacagataatgtgtaaatgcattcaggagataaggagaattagaaacaaggacattttttgtgtatttcttaggaataaaatggtaccttctacacatctcaattattaaagtacaaatagtgattgaacgaaatttttagaagaaatgttttaattgaatcttcacactagaggttttamcattcaatcaattaggttctgagaaggatggattggtacatcttaaaagacttgtaagatagcgaaggataggcagtgctaatgaccaacagcaacactcagcaggactttgtggaccaaaaaacttcaagttagaattgtgggtaaaggctgggcatggtggccctcacctgtaatcccaacactttgggagcctgtggtaggagcatcacatgaggccaggagtttgaggtttaagttacctgcagtcataccactggactcctgcctggttaacagacgctgtctcttaaaacaaaacaaaacaaaagaattgtgggtaaagtaagagcaaattgacttttgagtgatggtccgaaaacctttgtgatgggtaaagggtagaatgtctgtataatttttctgaactggaacacttgttgggagaccaagggcaaactggatagatgctgggctgacctatgtggtcatcctagtgaagaatcataagctttattggggaaagagctttgtgaagctgttttggctgttcagaaacccatcttggtttatgcttagatttttatctccattttggagaattcattgacaatgaacaatagctgggtaaatgatttgcttgccaaaagatacaaagatgggttgaattttatatttgtaaatgtaggaactcctttagattttaagttatataaagcaaggattagaacttagatatttttatgtatcttacagattccagcttgagttcacaattagaactcaagtgttgtgttatttgaataaatctaatcctttgatattctgttcctcacaatagttacttttaggagttgatttttcattcatccaaaaaatatcagttcaacaaaaattgattgacaatttactagctatttaaagatataaaaatctccctatcttcaggggattcatgatttcacagaagagtcagacttcacaaatgaattgaaattagtgcatgtgataaattcagtaatagaaaaacatacaaaacatagaggagagaacagttaactttctggaggtagtcagagaaaatggtagagataaccatttctgtgtaatatattaaagaacaaataggcattcataagctgtaaaagggaatagatcgtaccaggcaggaggaaatacagagctacaaagggaggtttgcaggactatgagtaattttrtacaactagattattaatctatgggtggttgttgaagataaaaaagactagagactaattatttacagtttagatctttaaaaccttttaatgttgtcctaaggagctttgtctttattgtgtaggctgaggacccaatattgtgcttcacatatggaagaaacctggtccattttgccttttaaatatatcagtcagtcctagctacttgggaggctgagatgggaggatcgcttgagccaagcagtttgaggttttagtgagctatgatcatgccacagcattctagcctgggaaacagactgtagagtgagtgtatgtgtgtgtgtgtgagagagtgagagagagagaatctcactcaaaggcttaataaatgagggtgatactgacacaagataatcaggctgaacaatagtccaggtgagagttatgtaggtttaaactagggcactagcaatgggtagagagtacaggatagattccaaagggattaggaataaaagttgacagaatttatggtgtggttggttggggtgggggagcagggggctgtgtggtgagagaaaggactttctctttttctccatgaacacaaagtagttaagrcatgaaacctgagatgtcatattgtaagaattatgcagaaatgggggtttgtaaaatgtgtgtatatgagataaagatatgagggggccaagggttctgttaagaagtaaaaaagattgggttccagaatgggcaggaaaggaaatgagatcaggaactggataaaggaaaggagatggtcaagagatsgtaggtccccatgaaattgaagagcaggtgtgggaatgagtaggctggaagaaccagagcttgtgatctgagagtcggattaagatttcagagaggcagcagtttaggtgacaactagctttaaatgtgattataatatttggttgctggagagtagattaatttcttcaaatttaggatttaaggaactgaaaattgaggatggtgtttctcagattgtatttgaaggactaaagcatgagtaccacctggggtgagattcctaggtttaaacctatgtctactggcctagaatttctaaggaaaggggctgagaatatgtatttctaacaagcaatttcagtgattctgatgaatagaagttgggacaagtttaagaacctgtgcaataggtgttggatggttcattttcaaggctatttaaataggctgatagtcatgtcaggagttaggatgaagaggatgatcagtagtgaaaagatgacattaatcccttacaggtggtgagagagcagttttaggggattatggggtatgttaaagtcagtgtgatagagacttgaaagaaaaagtaatgatgttggagcagtaaattgtctcctcctgtcctatatatagggagtgtatgaaaatgtgcagttttctgtttggcgtaggctgcagcaaggaaatgaacatagccttctttgatgccattgaagttgtaggctccttgaagttggtgaaagggttgagaggaaagtcaaaatagtggagtccatttcatctaaagtcagagtaaaacaaaaaggttacttagaaaccttgtttagtcagtatattaggcagtgttctctagagggacagaactaatagaatatatatatgagtttattaagtattagcttacacgatcacaaagtcccacaacaggctgtctgcaaggagcaaggagagctagtccgagtcccaaaactgaagaacytggagtctgatgttcgagggcaggaagcatccagtacaggagaaagatgtaggctgggaggctaggcccatctttctttttcacatttttctgcccgctttatattcactggcagctgattagattgtgcccaccagattaagggtgagtctgccttgcccagcccactgactcaaatgttaatctcttggcaacaccctcacagacacacccaggatcaatactttgtatccttcactccaatcaagttgacactcggtattaaccatcacagtcagttacttttgaaagttctctgattttaaaacaaattgtttgttctgttaaacatttggtaggataagtcagcttgtatttaggggccacataatggcattaagaatatgtttctttaaacactagaatcttaagataccgtagggagatagatgcccatagtatgagagccacatggaaataaaagaagattgaagtctcctctatcttgtgtttactgtgagatctatcatttctttagttatcatgtgttcttgattattctgtgtaatatgatgtgcgtcctgtagtggacatggtgaggtggagatggaaatactaaatgagaagaaagaagattaatgactgagatggtacaggtttttaagagtacaattccatgtagttaatttcatttacaatgttatgcaactatcaccattatagattttccacaacttttttttagcattacaaacagaaactctgtacccattaggcaataactctccactttccttccttcactctctggtaacttctgataccttctgcttctatgaatttgcctattcttgatatttcatgtaagtggaatcatacttttctgtatgtggcttattagtatgttttcaaggttcatctatattgtagcacatatttctttttattactgaataatgtactgttgtatttatagaccacattttgtttatccattcatctgttggtagatacttgaattgtgtccaccttttgcctaatatttccgcagtgaatattggcatacaagtgtctgagaacctcttcaattctattgctatatccctgggagtggcattgctgtgttagctttttgaggaagcaacaaattattattcacagcagctacacccttttaccttcctaccagcagttttcaaaggtcctatttttctacatcctcaccaacacttattatttttccctttaaaaaagttgtagcctccttatagatgtatcattgtgattttgatttacatttccctaattactaataatgttaaggatctttttgtgtgtttattggccatttgtgtatcttctttaagttctttactcattttttgctcactttttaattggtttgtctttgttgttgagctgcagttctttacatattctggatattaaacctttatcagatacatgatttgccaagatactctcccattctgcagtttgtctttttattttcttaacagtgtcttttgatgcacaaaaattttaaacttatataaagcccaatttatttcctatgtttctcatgcttttgatgtcatatctaggaatccattgcaaatctaaggccatgaagatttgctcctgtgttttctattaagagttttatggttttatttcttatatttaggttattgattcattctgagttaacttttatatatagtatacggtagaggtccagcttaattattttgcatgtggaaatccagttgtcccaacaacattagttagaggtgcctgttttcccccattgagtagacttgacacccttttggaaaatcagttggctattgatgtatgagtttatttctggactctcaattctatatcattggtgtatttatctrtcctatgccagcaccaaactgtcttgttaccttagctttgtagtaagttttgacattggatttttcaagatkgggttacttagggtcctttgcaattccatatgaatttgaggattgcttttccatttctgcaaaaaaggttgttggaattgtgataggaattatgttgaatctgtagatcactttgggtagtattgtcattttaatatgttaagtcttccaatccatacatcacttgtctatttacttagctcttctttaatttctttcagtaatgctttatagttttctgtgtacaagtccttcacctcctgggttaagttgattcctggctattttattcccttagttactttatgaatgaactgttttcttgatttcttttttggattgttgtctcctggtgtatcagaacacaactgatttttttgtgtgtcaaacttgtaacctgcaactttgctgaatttgtttattagctttcttggggattctatgagatcttctatctagagagaatagacatagttttacttcctccttacccgtctgtatgcctttatctcttttccctaatttgctctgctagaacttacagtcatgttgaatagcagyggtaaaagcatgcatcttgtctttaatttttcccacttttaagataaagttttccactgaattttttgaaaggattatacataattaactgattctcttgatcttaattactctttttttcttttgcagcacaaagaatgaaccagcagtggaagagaaaatacygtaagctggctgactgctggtgaagaaaatgctttatttttgtggcaggcatctgtgggatctgtaatagaaatgtaagtgtagcatcatggtttttttcagtgctgcagtaaattaaatggattggtttaacgtgtggtaaattgagtatctgtcatatgtagttttaattatattaaatgagcattttcttttgacttataggtgctttattaacaatttatttacattaagttatcgttaatgtagatttccaagtctcctcaaaaggaaaagtctctataagaaaaactgaagacacaggagtttgctcaaagaatgctgaaatagatctccaggtcctctgggttctaccttctttttacataataattttcttaaataactaagctaggcaagtagtactagcttttgtaaataagacagactactaggttataaaaactctagttactaaaaacttgtttcactaaattaaaggaatttctacataattgatttttttaatgtaataatacatcactgcattttattcatatcacttcactctgatccccagttttactagttgtgctttcatcatttatctttgcatgatatgctttaaagtgttacacactaccttggatttgtccatatttaacttcaccgtattgatgaaacatttttcactatgaatatatttctgttttctaaattcatataagccctatgcaacttgatgtcattcatgaaaaatgtagtgaatattttattgacttttaattacagtgtttttcttattagagcaagagtgaccttggtagatgctatttcacattttcccagtttgacataaaactcttgctttctactcttccagtatgatactggttacatgtaatgatatgtattaacaataattaatttattattaaaagtatgaccatattatttttattcagtattgaaaatttgataattgaaaaatgatactaataagcatttgtctttaaaaatatatattttatttaatcctgtccatttatctatctgtatacattttttaaaatcttaataggtcagatagtctaggtgctggtcatcaaggaacttactgtgatccagtaaatgagacatgtatgtaattaacaaacagtggaatagatgccatattaaggtaacaatcagatgctattgaaactgaacagaggaagagattaatttcatctgaagggttcagaatgaacagaataagtttcaccttgccttcaaagaatgagtagaattttaacagtcaaagaaaattaggaaatatttttcaagccaagggaatgaggagggaaacagctgcctaatcatcaacacattttagaggagtcagggaacagtaatatgtgggaaggcagggtaggagaaagagacttcaaaataagtgcagggagtgaacatttatttagtacttactatattaccagattttacatttatttaacatacaatcaatcttaattgattttgatacttagggacagagtatattgatcagtcttggaggagttaggggacagtacttactagatgttgaggggttagctttgtaaacaagtagcagtaccccatattgagccaggaggaataatgataagacagtaaaggtaaagatagattttcaggatttatttttgacttacctaatttctcagtgatacaggtgttagtatatcgataaactaggagggagaagttttatgatagtctctggggaatagggaaagaaagatgtcttggccgagtaaaagtttactgggattgatggtgtttaggaaatcaaaatagctattaagtgtgtggggttcacaacttttgcaccacacaaaagtgaattgtatggtgaaatttttgtcacttagagtaacttgcttgattattcttttttgcgaatgtctcccttgttggcttttgtggtggtggtctatctttatttcctgttcttctctgaccattccttacaccccttcctggctattttacctcacagatattggagtaattcaagattctgtggttggcccttttgactgctctctctacaggtttaatttgggcatttactcattttcatggctccaaggaccatgtatgtgttggtgagtcaccagacttttttcagctcagatttattcttggagtatcaaactagtaaattcagctgtcatctacctatctccacctggagaccttaataaagtcattatgtctgagacagaactctcctcaaattctgaattttggtgaatgtgtcaccatccatcagtaatcaaatgctttcatttctttttccttagcattcttctattctattgttggaaacttacatcagcaacctccctctaattatcttatacttgcattactacctggatattctagtttccctttcgccatacctcctcctgcattaccaaactttcctccaacctgctgttcaaatggtctggaagctactaaactggctgttatttcctgacgtaaaacctttcagtgaactcctcttgtctcattagtggttcatatgtggaccagcttcatagaaatccttaagccccttgaaattatatgtaggattgttccctttttgtgtgtctgtaattggattctaaattcagactttaaaaatctgatttttaatatttggagtttttattgcaagctaaaaatttcttgaatactacacatactaaagatcttttttgcttataataattttgcctttcatttgactagttgtccaagaagtttcaaggaaatctgagttcttggagatttccactaactctgcccatacccctctatattttgtcttcttgagaagaagacttagtattaatagactcttattagtctggcagaaatatttcacatggtttatctattggaagaaggggatttatacttaaaagttggaatatcacatgaagaattcagtaaaaacgtctttgaaagtaaatgatgtattatacttattaatagaattggactaacgtcactccaaatttctgtgtattaaattcttagtttagtaaactggaaataaattccctttttcaaaattagaattttctgagacatttatgagatagggaatacctcttttgattagcattaatacttgctctacacaaagggaggggaaaagctttcttatttacatattggtatgatcatctgcatacatttagtctcccacctattttaagatcattggaactgcaaaacagagactgtgtagggtagattaaaatggttttttaaaaagccttgaagtatgtcttataggtagactagcagtttggggttactttgtgtctatcttgttacacattttatctctatcttacttattgcatgtgcctcattcagaattaaataagaaatatcactaagtttttctgcccatttgttagttggtgatagactaacagtatacttgatgggctaaacagaatcagaatttataaattgctatggcaaattgatagttaagagtgcttcagatgaaataatgaccatttagctgtctggtgtccattgtttgcagattaactttgtccaacttcacttcattctgatgatggaaccaaaatacctgcacaaacaggattgttttgcctttccaattatgttattataattcatgccttctcctgggatgattgtaattgctttcttagttttgaaattatgtgttttggtttattcataaatgcaagagtaagagtcatgcaaaatattaatcatattaagtagggtggaggataatgtttttaggttggaaacttttttttctgtagataaacgagctgtatgtgatggaaaactgacttcttgggcccattttacttaaagcaaatacaataggtttggaattatgtatttaaaagcatggcattggtccacgtgacatgttgggtgtcttgttttcattttaccagactctgtttttatttatgttttcagtttatgatcctgtcctttgttcataaggtacttagatggtttaagatgtagacttcttatatgaagatgttgctgttgtttttccaaagtaatggtggtcatcagcccatttttctatttagtctcatgaatagaatcatgagtagaatctttcttaaattattacttgtaaatggatcactttcttgttttctttttcttaattggagctttaaataaatatggaacttggaacaaaaagattttcaggaattttatggaaactaacttttttgacctaaatcgaaagggatgaaagtttctgaaaacctaacaaaatgtgtgcacagccaattcttttaggggaggaaataggcagggaatgtgtaattggctattttaaaaacatatgccttcttttgtaacttattgttgtttcaagttacaagatctttgaaggcaagtgtttatctcaaaatatttgaaagcttttatagtgcttaacatattaagacgtcctattagggtttacttagaacaagcttatccaacttgtgggccacatgtggcccaggatggctttgaaagcggcctaacacaaattcataagctttcttaaaacattatgtgatttttttttttagcttatcagctatcattagtgttaatgcattttatgtgtggcccaagacaattctttttcttccagtgtggcccagggaaaccaaaagattagacacccctgacttagaactttccataggttaggaraaagttgtactttcttgatgtctataacctagaatttctggtaaaggaattgattggaaatgttattaaaagttgaaaataatttggaaattaaacattttagtgatcagttcttccattgagactgtgttggttcctttactagatatgtgccatctttttaaaaacttactgtgttgcttcctttactagaaaattgccatctttttgagccttgtctattgaggaaccaagaacacagaaaaggcagtaaaaagaaaaaaaaggattgtttgaagattgaatgtgctgtgatgatagcctaggattattgtttttcaatttttgatgagcgtaagcattcttgttgactatatcttttgtaactactgacccatttagaatggcagaattagctggcagagagattgtcattcattttaagcttccaatctctgacatcttcatctttatttctcagtcttttttacttatcagtggtttactccattattttctccccttttaaaatgtctttttttttttttttttttttaccatggggaaaaaaattagatgtttccttggcagggcacaataacacaataaggctttcatgacttaacttttgattacctttacaccttcatctcctgctcttccattgcttgtatgactatttgactcagtgtcttgcatgtgcttctgcctggaatctgctccactgcccagcccctctgaatgaacactaaactttctaacctatgtccatcctctcatctctctcttactgttattttagtaagtatgttaacacattttgattacgcaggaatcaggccatattgtaattatctgcatgtatgtttccttatttaacagagtagttgtgtgtcttatttatctttagacccatcagtacttagtattgtatctggaacatggcaggtgtttagtaaatgtttatctgaatcaataaggcagaaattayaaattttatgtcagtgtttaagctagatacatccaatttgacaaatcttttttcttcttcctcttcaggggatcttcaatattcatgttattttctcctttggtcttatatgattgttacctttatgaagctttagtgattacaaagcactttttttgtccatttttacctgagctttgtaaactctgatttgcaggtaaggaaatttagactaatggtttaactgagtgcctaagagcacataattaataaaggactctaaaactcagatttttagatttcttgtctagcattcatttcactgtataatagctgccatgattcaaggtatccttttcccctcactggatgcagcttttcattatatagttcttcagtgtgtttctccagggctgatctgttaagtgcactgatggaatttttatacattcccaaggtatgtacaagtagatgcttacaaaaaattttcatcggttggagagtttttcctctactttcatcttcatatccccattgtstagtatgtggcttgcatataatgcacatcataggtggttagtgttttcataattgttaaattaagatattgcaagaattaaaacatgactttaatattatatgtattttttcttaggatggctggctgtggtgaaattgatcattcaataaacatgcttcctacaaacaggaaagcgaacgagtccygttctaatactgcaccttctttaaccgtccctgaatgtgccatttgtctgcaaacatgtgttcatccagtcagtctgccctgtaagcacgttttctgctatctatgtgtaaaaggagcttcatggcttggaaagcggtgtgctctttgtcgacaagaaattcccgaggatttccttgacaagccaaccttgttgtcaccagaagaactcaaggcagcaagtagaggaaatggtgaatatgcatggtattatgaaggaagaaatgggtggtggcagtacgatgagcgcactagtagagagctggaagatgctttttccaaaggtaaaaagaacactgaaatgttaattgctggctttctgtatgtcgctgatcttgaaaacatggttcaatataggagaaatgaacatggacgtcgcaggaagattaagcgagatataatagatataccaaagaagggagtagctggacttaggctagactgtgatgctaataccgtaaacctagcaagagagagctctgctgacggagcggacagtgtatcagcacagagtggagcttctgttcagcccctagtgtcttctgtaaggcccctaacatcagtagatggtcagttaacaagccctgcaacaccatcccctgatgcaagcacttctctggaagactcttttgctcatttacaactcagtggagacaacacagctgaaaggagtcataggggagaaggagaagaagatcatgaatcaccatcttcaggcagggtaccagcaccagacacctccattgaagaaactgaatcagatgccagtagtgatagtgaggatgtatctgcagttgttgcacagcactccttgacccaacagagacttttggtttctaatgcaaaccagacagtacccgatcgatcagatcgatcgggaactgatcgatcagtagcagggggtggaacagtgagtgtcagtgtcagatctagaaggcctgatggacagtgcacagtaactgaagtttaaataaaaatgtcttcagctccatgctcaaggttgaaagggttacctgtaaatttctgcccacataacattatactcatccctagtagtgcattttgggagttggggtgggaaggggtatgggaaggatagactcataattaaaatgtctaacatgtctctgttgagaaatttatttaatgtaaggaacttgggtgttaatagttgagagctgtttagtaataacccagttttcttgaggtctgtttactttatactttttaaaaacttctgtagttcttttggccagtgtgtttgtattatctgtgcattaatggtcctcatctgactcctgcattgtgtcttatttttctgcatggattggcataagaccattactaaaatttggcacctgtgagatgtttgatattatgaacaggaaacataatttaatgtatgaatagatgtgaatttgggatttcaaaatagatgaataacaactattttatagtaaagttattgaaatggaaatgaaaacagccagtaacttatgtttcagaatgtttgtaacacacttcatggtgttcccataggctttgmtgtctagtcttatagtttgaggtttttttggtctgcatttttctttttgattacaaaatttataatttaataaatactagagtttatcaaaaacagtttgtctcttgtttgagggtggaaagggtgtggaaacattttgacatttgtgaccaaaggtcacttaaaaagtggtggttttaattggttgttttcagcttaatcacctgctcagaaaagtttgatttttttcttagagattatttaaacagaatctataggcagtgtgtatataataaatatgtatggaaataaaactaaagcctgtgagacttaaaattcctcaaatagcatataccgttaatattttatattttccttaccatattcattagtagtctaacactctggattaaatggcagacttaacggtgttagcagacatgaattcactttacacaaaatgttgtagaccacaaaatccacttttatttggtagtttttacatctatggccaaatagtattgggttgacacagtaatctagagtttacctctgaaaaaaagtaatgtgagtctgtctaaccatattttcctaactcaacagtaggatcatgatggtaaggcaaatacaagttatttttaccatgattctcaaatgtgaattgaatgttacagtagcaaatacttttgacctcttgtgatgagtcagaactagaacttaattctttgactttcacattttttaaaaagtgtattgctgggatcataaacattttatgttgtgcatttttattacatttacttttgaaagatagttgttagaaggttagttgtttttcaggaaaaaaaagaaatctgatgtaaaaatgcaaatttatgttgcaggatgcttcatgagtcccttcaagtggtttaaaactacatcaacagtagttgtttattactagttggaaattccagggcacacaaatgaatgtccaattgtagaatcagttgactttccatgtcatggctaccactgtttagtaggtaatttacaatagaaaactaattattgaaaagaacaaagttccaaatttgtagtgggtagtgaggtacatctttttttaaatgaagggccatttcccatgaattttactccagctgtttggagcagaagaaaatgattgatcataccctttcttgttttcttgttccctgatacctccccacttttgttctttagcagcaacactcagttattttggtaaattatttccaggtaaaacagaacaaaaattgtatgaaaagtaacgccaggaataggttttgtatagaagctctccttttaaacactgctctttggttataagctaagaattattattggaattgacagcaataatttttaagccaaaagtgtatattttagctaaatgttccagattacgcagtaaatacccaagtgagtaattggcaagaaatgaggtaaatgagttcagatattcaaatgattaaaagtaagtctgcatattaatagtagccttcaaagtaattctgatgttcatatttaatatcatttaacatttatacatattagtcactggagctttacttggagtacatccacacgaaaaaccaattatttattaaattttcctttcttagcaatagcctctaaatttgcaggcccaccccaaactgttcctaaaagatctctttcgttctgtaatgcttcctccaaatatagctctctgcctgaacaaacagattttttcaaagctctaattacttccggtggcccttggatgaattgctttagccattcttgtgcctcttctagagatttagtttcatctgaagactgcaagacctcttcaaccattcctatgtttagagcattttttgaatccagtttaagggccccactcaacactttgagagcttgtctacttccgattatttcaactagccgggtggtgccaccccagcttggtattatgcccatctctttgtggacgaatctgatcttactctctggagtcattaacctgtaaaagaaaaaagaaaagcttaattgtaactctctctgtatgctctaatcataaagtactatccattcatgatctgatgtgaattctccatagatctttataggtaggtatattaaaaacaatgtttgaaaaatatggctgtttcatctagaatttaatttactaatagtatttaaaacttccctttgaaaacagtatcattttttgttgtgcttgtttaccctttgcaaacaagaaccttctaaaagcccaaagttgatctttcttaagtgagtggtgacctaatgagaggatgtggatcaagtgaaagtatgggagtaggaaatgttaggtgcatactaagaaaaacaaaccgaaaagcatagtaagttaaggttctcaaaagtccttagtggggaaaaatgctttttaaatacagcatctattcagcaagtatttacaaagaactaccagtgccaggtggtggtttaggtgctgagactacaggaatgaccaaaacaaaacccttgtgctcaggagctgttttcagtttggagagaaaggcattaaaccatataaagtcagtggcaatgagtgctttatagcaaaaagagaaaaagaaaatgaggcaggagacaaatgaattgaggatatgtgtgctgggggtgtgctattttcgatgaagaaggacactgaatatttgagcagccacctgaggaaatgagcaatgcaaaaatctgggaaaagatgttccaggaagaaggaattgcaagtgcaaaagtcttgaagtagagaactgcttagtatctctggggacgagtacagtgtaactggaacatgggggataaaatgagaagcatacttaacaggccttagtaaggagttcggattttattttttaagtgtaaagttatttagaggaggtcaaccaaagcattaacatctgacattttacaagggctgctctagttgccatgtgcatgaagagcttatttagcatttcaaagctcttataccttttttttttttttttttttaaggaactggcaatacagctattgcagagctaggatttaaacccaggcaggttggcttcagttatcttcatggtacacataatagctagacgaggtggaagcagggataccagtaagaaagttattgatagtggcttggattagactgatagcagtgagtttccctaacgggttcattttccccagtcatgggatttttatgaataggatgattaataagaaagtataacaataaaggggagttaacatttgccagttcaacagactgagtaaagctacacgatttagctttactaaataaacgcccatgcgttttattttgactgcatgcttcaagaagctttcactttcaaattactcattacaaaaaagaagaccttaagttgggttggctttccaacgtgttaaatactcaaatgcaggtgatttggttctattagcactaagaacaaaaaactcagtctttgacccgagagaattctgacaaatgccaacttattaactcactgggaaactttctcttcacagctgtgaatttctacaaaggaaaatatgcctccattatgaacaattgcttctagaggcaaatagctatgaaaaataatagttttcaagaaataattttaaaattgggaggaaaaaagaacaagtcttataaaaatctgaatttatcacaatattgtaagaggagtactgccttgttaaaacaatatcaaaaggaatagaaattacagaaataatgtctaatattcttagaaataggaatattgtcaatattgaacccaatcctataaagctttttacataatacactaaatatgtaactgttctgaattgaatcctagaattggttcagagctgtgcctataatggagtaaaggactatgccaggaatagattcatttagaatcagctgaacataaaaactggttaaagtcctagatgttggaataatgtagatgagcttatgacaacaaaagttattacctatgtaagcacattcatatttggaattatttgcttctaaagaaaaatcatcatctctatggtgatttttttccatttgccttattttataaggtaaagtgtgtcttttggaatcatattttacaactccaacaaatcttgaggttatctttgtaaaaataccttttgtgatcaaaatctaacatccattctttgcaaattgtatacctcgggtgtgcttatgtactgatatacattaaatatatattaaataaatatgaccaaaaaattcattggtgataaaagaacacaagtagtttcctctaataaacagagcattcagatggtaacctttacaggactcttttaacctaaaaatgaaagtttaaatataaaatttaaaatgctgaaaaacctaatttaagaaggacattattatattaacaacaagatatatcccaaaatagtttcctgatagaccctacaggattatacactaattctttctagagtttagatgcagttacctagtaatataattattgcaagggataatctacgtagagtaatggaagacttagctcttataattttgaagactaatgacagactcaatttataaaaccatattaaacttgcttattttgacaagtaaaagaatgataagtgtcttctaactgtttaatagcataatcattggcaatgtttaaaatttcctctgacatcctggggcaaaggagatgagattaatcaaatgtggatatatttcttgttactactgtctggatgaaacaatgttataagaaagactactcataactggggaaagagttacacctttgacaggtgatacaaagtcaagtgttgatgataccaggaaggactgttcagtgagttactacttcttgatgagttaactcttaagtttcaggtcttgaacaaatgtattcaagaacattctaaaaagaaattaccaaattttactaaaataggaagtttttagtggaaaagttgcaaaaaaacagcctttttgtaatgttgattattaaagcaaggtacttctagtaaattctgtgatgaaggatggaaatataaataattgaattggaagagtgtacagctttgatgtgaagtgcatacactcagaagccagactgctgggcttgaaatcctaggatggccactagactggctacatatccacacattgtaaaatacagcaaaggcaaaagaaacatggtacaaagaggagaggaagattcatctctagatcttaggaagttacttaacatctctgtgtctcttgatagatactttgaacatatgtactccacaattcttttatagatagagtgtgtctgtatgttttaaaaaattgtgtgaaattgcctcaaacacatctacaagagaatacagtattacctacttttatttggaaatataaaagttgtatatattttgtagtctgatacataataaactctgtatactagcttttaatactattaagttggtggtattgataggtccgtaaaaataacagtagtgtttctgctagtgaagtagtataaagttgtcccctggactaaaatcacataatctctaaaatattcagagtaaaagagctatactcaacactgtataaccagcaaatactcttcttcttcgatgttggttttataaatggagagcacaagaaatattcaatttttatattgccaaataaagttagaaataatactgtattctaatacagatatggttgaagcagaagattgcaagctgatcttttttaaaaaacaggtaagacagttatccctctaagatttcttagaactgtccaatacaagtaacaagataaatatcttgaaattttaaagaaaaccattgatgttacaaaattaacatgatgttatacatttaaagtttggaatcactgatttaaatataaataagctttagtgtagggccagaaacggctagtccttttacactgattgcataaagggccaaagacaacaaagtaaacttgctcgcatggggaaatatagcatagaaaattatagaattcgcaacagcatctctgaccacaaacaatactttaaaattatgcctcgaacataaacttacttgttcacacgtatattttcctggcactttctcccttttgttttctaccatctataacatcacaaaacaatggaaaagagaaagaacccaaaaattctccctataatctcacctttctgatttccaagtctcagatgattggcttcatgagtttccattcattatatg

SEQ ID NO: 96297 - DNA, 24364 bp, Homo sapiens
gagtagggtctatgtctgccaactctaacagcctgcccgtgctttccaagcgctgcgcttcagggaataacattctgaggggaagacagacagacagaaaaatcagaattttacttaaattctgcaaatcatgacactttttaaccctcatttgaaaacaacacaacacagttgctggctactgacagctggagagagtggcaggagcctcttggattatatagcaccagataagaggcacggcccgccactgaggcggctctaacctgaggcgcgaggcaagcacacaatgggaaagcattctccaaagctaaatcagtacatgtactttttaaaggtaagtaagtaagtttaaagtaacatctgctcagctgcattcttgtagaaacataagcttgatgtgcctcatgtttcgatgtgaaagttgtattatttcttgtgtgacaaatcatcagttttgattctctagaatttgaatgtatcagcctttagaactcttcacgctaaaagagttacttttttttgctaaaagtttgaaaatatagctgataggaaaatataattattcctcttgttatttttcaagcatctttaaaactgatttgaagtagaggatatattttaaatttcatctatccaaattgaaccattgttttaaaatgaatagcagaactgcttgaaatgctgcggagttaggcctggattgcatttttcttcaagtctcagggctcttacagagctcatcccaaggggcttggaaggtgtcatggccaggggagatagatagcatgttgcttataggctgatggtcctttcaacaaggaattgcatgtcccccacactttcagggtgaggtgacagatctttgagttcagtttcatggcaaagagggcctgatggcagtttctaatatctgaagaacaccaataagtcaaagtcctttgacctgttaccctgggtggcacagtatctggtccatgtctgtcctgaggatggtgtatctgaaatgaatagggcccttcacttagctggggggttgccttggaaacgctagtgccagctctaggctcagaccaattccaggatttccaaaagcacataaaaggacatagttttgtgctcccccctcccccatgaatcagggctatcaggtacagctgtgtgggtcctgctctgcgtgaggggtaagtgtgagccgaaatccagcttctgtttcactcaccagcagtgcacagtagctgggggctgcagccaaaatggctggccagtggcatctctgtcaccagctctgcaccttaagtctctgctagagaagcaggaactatctggtaaggtgggaattctggcttaattagaggcaacaagtggcaggctgaggctccagcttctgccatctggcatcctcagcaatgggctttgtggactgcagcactcttaggagctgatgcccagctggcccctaaaataatctgctgtcatttcatatgctaaagggacacttcggaccttgtgaaagagagaattacaatgaagccatgtgaggaggttttagaaaatgagaaatatgtgcctctcacgccgagcctctttaaacagcggactatggatagattatcgtagatggaaatcttttacaaatacactttcctgccttcttaagcagactatcactgggcttaactaaacagcttcttggctctttctggatctgcaacaaggctgtggtccttcagagcccatcgaggtgggcgacctctagaccaccaggccctgtcaggttttcccagtgattcctgagagcctcttggcagcagcagctttctgtgagatggaaacgtgcttacgtgaggacttcgtgatatgattttggctgctcagaattcatatttgcttcctagttctcaagtgtgtccttaaagaagagatagggcaactcggtagaaagcaagcatttaaaaaacccattattatctgtcttgagtcctcactggggaaccacgagctccctggtacagagcctctgtgagctgtgcagtcaccaattccaggctgcgcttatgtttaagccaccctgagagaggccacctgaggtctagcaagtctttgctctctcctcattggcagtgaagtcttgtccgtcacaggactgaactaagtgtaatactcagagctttaagaatagagcaaacaaggttctcactcttaaaaagtgcctgaggattttataaagactgcaactgaagagaagaaaaggcattcttacctgagccctcgatggcagtatttccttcggaactgaaatacattctgaaccactttttccaccagcttgaatggctgctctatcttgggctgtatcaagggagtgaagtgcaccacgcccacgtccaccttcgttgtaagcaaacatattatcattctgtggcatgatatgtggcatagtgtgatcaatcaactcatccttgtaaaacaggaagatgggctgtcaacagcctgttttcataaacagacctttccacgtacttcggtttcatctctaggcatggaagatggtacattctggattcgcaaatgacatggagaaatcagccggctgcacctgttctctaatgacatccaccagacctgtgcttgatggtcacttaattttaaaacacagtttcacaatggcttaaaaatcaatccaaatcagtaaagtcagtcagcagataatagatggcattagaatattttagtttttgaatgaggaaaaaaataagctgcagcagcagcttcaagacacagagagatggcagacaggcccccagggaccactcagtgctaaacttcccagatagagacaccacttattttcggtagacactgattaatcagctggactgaattcatgagtgtagtctgaaaagccacagaactttctagtagcaattttaaatgccccgaaaggcataggcaggactgaaattgaaaatggaaaccatcaaaaaatgtcactgtttgatagtgtttaagctactgccagctgtggagattctttaattgtcagaagataaaacttttcaggcatatctgataagagatttataccctgatttgttccaaaaatggactcatggtgattcacaaggacaaattcaaataccaaaggaaaaacatttaaagacagagggaaatggattcaaaacagtaactacacacacaaaaatgctaacggagaccatggtctaggaaatgggaagtctcgtcataattgacaaaagcctcagtctccaggaattgttaaacttgttaatgaggatctcatacagactcaacaaaaggcgaagaaagtacggcaatttaggaggtgtgggctgcaccactgcttttcaaaaggaactccattgttgaaatcccatagaggttgtcattttctcctaagaggacttgcttctaaagatccttgtggctacataattccttaaacagatgaaaatgggagactggcttttctggttgtgtttcttttagggtagaaggaaaacaactgaatatgatgtgagactttatggacaagaaagtgaaaataagctgtgctcagcctcacacagcctgacgcgcttgtgggaggtgcctgtggtgcctgagctgtgtcatcaaggccccggacccctgagagcttgcacctccctatttaaacaatcaatgagcctgtccccgaaggtttcaggtcagctacagctgctcctactggatggaatgggaaatagaaggctttggtggtaaggggcggtgtgggctggcgcatgctgagaatgtgccaagcggcctttccacaccccaaatgcccacccccaacatccatcagccttcttgtgaagtccagcaggctgttcttgtgaagattctatggtggaacagtagttatgaacagtgacttaactaagatgtcaaatgctcttaataaattttagtaagttttttgaattgtgtgctatatgttgtttcatgtttcctcaagtttagtaacaactacctcttcctacaggacttcccttagactttaacaaaacgcaccatagaacagtgcccagcttggagaggtctgtggtcatcagggaaagagggactgaagaagacaaggggctgtggagtggatgcagggtgtaggtggggtagatgtactgctatagggagagaagaaaggtggtttcagctcagggcagttctggggaaggaaaaagaagacctgatctatgaatggcagagtgcaggcagcagcccaagacacactccactgacttcagatgtcaggttccttcccacaaactctgaactatcctgcctacctcgcctcctcctgatttgtatagagaagtggtcccaactgtcaggcatgtgtctggccactctctacacctcaccagccttctctcactggactctccatttccctttcatcccctgagcttcctggcacccttgtccctgcctccccttctccaggactcatctcctgtaacccttcaactccagttctcccagtgacacagagccaattctatcaattcttactagcagcctgctagtctccagaagaaatactcttagcaaaatctgagataaaatctaatccctgcctaggcctaaaaccatgaaatattatcaaaactctacataaggcttacaaactattaagaccaaaagcacaaatacagagatagatgcactctcttccagtacagaaactgccactttcagcttccttagattttaaattttggcctcatctttatttgcctgatttcattcctttgagatatagttggtatttgcaaatacaggaagtgtctaacttttgcttgatttaaataaagttttaaaaccctgaacaaatatagtagtaccccatgtaaactatagcgtcgacttctaaagtttgaatacaattccaatactctgttaagttggcttatattatgtcacggctaaaagagaattcccctcacaaatgcagttactatttagtgggagattctgtaaaactcagcgtcaacaaagctcttccagttatgtctcctgcttctgggacggccaggacctctcctgtaccaccccttcctctccctttcccccaaaggcacctttcagaattactctgaatgatggagcccatttttttctagaactataggaaagctgcttggtaactatggtaacgaatacaaaaatgctttttacttataattgaatgcttatttaaaattacaagtattattttttcttccttgagttttaagtctattaatgggtttgattacaaaaaagaaatcagtacaaaggcatcagaagtacttaaaatattctagtttaatgccgccagccttttccaaactcagtccatcagtataccaaaatgacctactaaaatttcaaatgaaaggatttaaaatgaatttaaatatttgcctttctaaccctatacgtcaacgctgtaacaagctaagactgtttctcagtgttagcagccttggccataacaggcccgaggcagatgtcctagtttccaggccagggtgtctaggacgtgactggttatcagctcagagcagcacttggaactcacaagggacccgggctaaggagatattaaatcttaaatcttagatattagatattacaactgagaactgtaatcaacatgatatacagaggacactgaagagacgtacaactcagttcctgatgattatcatatgcccaaaagctaagtcacgaccacatgcacagacacagaaacaatgctggccactgtctacaaaagggtcttcattcaacactctcacggtgttcaagaccattagaggacaagatagtggagatgaaaaaatgatgaggaagttactatgtaaatagccaagacacagccataacttaagacaacagaagggctagtggaaaaaaaaaaaaagaccacagggaataatcagtaagactttaaagaacaacatataagaaggattcaaagttcraagtgggatgatcacgggcagacctgggtggttgggaacaggaagcatatggcatcttgcaggctataggcaccacaagatggaacgcaggaggacaggggcttgggagagccacttcactgtygggtaaaacaacggagcaagatgagtgcctccggatgcttggtttcyccaccctccagtgtctgcttgctcttcaagtacctccaccaagctaatgacagtccactttaggacatcacgggcctcgaggttacaactttcccaggtaaggagaatcccaggtagaggcagcaagtcactgatgcctgtgatatgataattatgcatgtcatagaaaaagaaaatactgacaaatgtgaatgtagatcacattttctggaattggttcactctacctgtgatccatgtccaaaagccaatttaaggaaagaatttccactgtaaaaccttaaagctgacagcattctaagtatttcaaaccaactggttcaataaagatcaactacacggtcagtacctatcctaaagtttacaatttgtgttattgtaacaatatttatttctgcagaagttctgtcctcacccttttttcttcctacagatctttgtttttttctctttcttcttgggatcataaaaaaagaacagattttaaacagtcacatagtgtttcctctcagagcagatgtggtaggaagaactgaggccaaragaatgacagcaaactcagatcacaagagaaataagactaagaaatgtggtgagggggatgaagagtttttttactgtgtaaattatgtaaatgtacatatgtatgtatgtaaattacacctattagtaataacaacaacaagatgagtcagtgtctcttggtcccaagagattaaacaatttcagggagatgcacgtgtaatcctcaagaaagcacaaatggaacaagaactgacaattgttgtataaaggttttctgttayatttaatctggagttcctggatgatcagagggaaaagaccttcctaaaactaggccttttccacaaaccacgcccttggtgtctgtgaagcagcagcatctggacgtgccctgtgtttcctgtcccgggctgtgctcccgcttgggtttgtggatgtggcaggagctgcctgaggcagcttcgaggctgcccagccgggccatgggtgtggcagcacattggcaactgccagggtctggaccccagcgctgcaggtcctgagcaactcccgtccctcagagagaagacaggacctcagagaggctctcaatctaaacaaactcagaaggcacttgataaatgctgctagtaatattattaaaagactgagaaatagaacatgcatacaaatatagtaattcataataaaccataattatcaaacggactagacatcacactgaagatgcttggtcagtacattcgtmtattcatagctgatactgttaatttcctaaggctgggacagaagarcattattttaggattaggtcaaatcactttaaatttgtagggctggaacaggtaactattttatcttactctgaactgtcattattttcaagattgaatggaaagcaaagaagaaaaaacatttgtattagggttctctagagggacagaactaatggaatatatatatatgagtttattaaatataaatattaaatatatttatatataatataaatatatattatatataatatataatatatatttaatatataatatgtaaatattaaatatatatataaagaagagtttattaagtattaactcacatgatcacaaggtcccacaataggccatctgcaggctgagaagcaaggagagccagtccaagttccaaaactgaagaacttgggagtccaatgtttgaggataggaagcatccagcacgtgagaaaagatgtgggctgggaggctaagccagtctctcttttcacatttttctgcccacttatattctagctgagccggcagctgattagatggtgcccacccagattgagggcgggtataccttccccacctcactgactcaaatgttaatctcctttgacaacaccctcacagatacacccaggatcaatactttgtatccttcaatccaatcaagttgacactcagtgttaaccatcacaacattttttttaaaattcagaaccccaacttttcattagaattaaatggacagcatttgaaaaatacaaggatggggctccatcccagaaaattaaataaragccactgggttgggcctgagcctcttggggcttttccaaagccctcgtgtgggcagaaatgagaatcacaggtttggggaacaatcctagttgcttgggaaagtatcacacagtcaactcaaatcctggagattaaattcactagaagtgcagctagagccctgtgacacccmcaaagccagcctgagtccctgctggatacagctcaccaggggggatgaaaagccagatacaaacttccccagtctcgctcacagttaagaatgaccaaatgaggccgggcgcggtggctcacacctgtaatcccagcactttggaaggccraagcgggcgaatcatgaggtcaggagatcgagaccatcctggctaacacggtgaaaccccgtctctactaaaaaatacaaaaaattagccaggcgtggtggcggccgcctgtagtccccgctacttgggaggctgaggcaggagaatggcgtgagcccgggaggcggagcttgcagtgagctgagatcgtgccactgcactccagggtgggcgacagagcgagactccgtctcaaaaaaaaaaaaaaaaaaaaaaaaaagaatgaccaaatgagccagttctggaaagtgagacattaaagcatagtctggggtggtggtgggagaggggaagagaactctagaatactttgctgcctttttttttttttttttgagacagagtctcactctatcgcccaggctggagtgcagtgcagtggcatgatctcggctcactgcaacctccacctcctgggttcaagcaattctcgtgtctcagcctcctgagtagctggaaatacaggtgggtggcaccacacccggccaatttttgtatttttaatagagactgggtttcaccatgttggccaggctggtctcaaacttctggccgcaagcaatccacctgccttggcctcccaaagtgctgggattatgggcgtgagccaccacacctggccgtagaatatggtgcttcttgatgaaagggtcagctgaggcagccatctcatarctgttgaagtaaacctaaaatayagagacaaatctccaaattcaatgttttatttgggaagcaagaattgtaaattagggcctacacacagaccaggtggtcttcagtatgtccaaagaacaaaaggaaggttgggagttttattagagaaatgttatgtgttgttttgaaagaaagctcattggcactagagaagcttttgggtgtggacaagctctgaytggtgagtgacgacagcaggtaaaaccagtcttagagtcacagtaggtggtcccagcagctactagctaaaactggtcttggtgttacagcaggccatttcagcagctaggcttatagaaagtgtaaattttggagcaggtgcgacagtgctatgtgccctgagtgctttttcctcctggccccttgactctgatttagttgggtaagacaagaatgacctaatttgtataatcaaccttcacacagccaagaaaagttcagtttgaaggaacagaaaaacagaatgagctggaatacttaagaagagttttaaattgcagaactaaccttgaacagtactgactttcaaacaatgagtccttatagtttagtctactgttagatttttctgtaatttgtccactgaaacatctgaaaccaatacaagcccaaagccccttctacaaatttgttttcaaaatgtagacaggaaattttgggttctttttacagaccgaagatgcccttgactacattatatatatttaattatatttccagaatttatgaacaccctttatcttgaatccatttcctatgcaatatctctactcatctagttatttccatttaatcgctcccattaccacagcctcccagagtctgtctgtctccaattctgatctctttaaatcctccacaccatagccaagtgctcttaaaccacaaattccaccacaaaaaaacactctgatggttcacactgcctctagtggtggccttcaaactccttcttgaagaaaatgtcagccaccaaagtgtttccccttaaccctgatccccaggcttctttgattagggtagaggtctctctcataagcctgttactgtgatccagtgatgagaagatggagtgcaatgctttataaactgttaagctctatgaaaaggtgtggtattgttatttccaaaatactcagttaaattactgattctttcagaaagacaataaaagcctacctgaacatccagattaacatcactaagcaacaccacacactaagggaagctaaagtaatttctgcttaaagataaatgaaaacatgatctatgaccttacccccaacccggtgctctctgaaacatgtgctgtgtccactcagggttaartggattaagggcggtgcaagatgtgctttgttaaacaratgcttgaaggcagcatgcttgctaagagtcatcaccactccctaatctcaagtacccagggacacaaacactgcggaaggccscagggtcctctgcctaggaaaaccagagacctttgttcacttgtttatctgctgaccttccctccactattgtcctatgaccctgccaaatccccctctgcgagaaacacccaagaatgatcaattaaaaaaaaaaaaaagaaaaaagaaaaaaaattaaaaaattaaaaaaaaaaaaagataaatgaaaacattctaaagaagaaagatggactgcaatcactcaacccacagtggactttgcaggactgagaagtaaatgctgatatgtaaagctacagagatttctgggttaatttgtttccatagcttataaactaccaagagaggtaggacttacaaatatgctcttttctaattagaggtggggcaatgctatgtagtatgtcagggtttcaaaaatcattgttttgggactcaaccccattcctgcaatttactcattttatggccttagtcaaaagttacttctctgtagcttagttttcttttcttttcttttctttttttttttttttttgagatggagtctcgctctgtcacccaggctggagtgctatgacaygatcttggctcaatgcaacttccgtctgctgggttcaagcgattctcttgcctcagcctcccgagaagctggggctaatggcatgtgccactacgcctggctaatttttgtatttttagtagaggcaaggtttcaccatgttggccaggctgctcttgaattcctgacctcaggygatccgcctgcctcagcctcccaaagtgttgggattacaggtgtgagccaccacgcccggccagttttcttgtctataaaattcttcttatctgctaggtttgtcttgagaattatgtattatagcaccttaaacagtacctggcatatggaaagcaggttataaatggtagataatgttattagcaagatgacaaactagagttccaaaattacttaaaattctagtcctgcttagaaataaaattgtatttttaatcattcaagtgcaatttatagtttaacattatatacttaaagtcagtttctgaattcattcattgggcaaatatttattgtatccctactatgtgccaggcactgatcctggcacaggagaatcagtgatgaatgaaacagagagaagtgcttgccctgtggggctgaacttctacctcagaggtcttgcgctacagtggaagcagaagaggagctcagaggtggaaggttcttgttctagtctgaagtcagaaacaaaacaacttgttgactcaagggatgttgggtatggaatcagggattacttttaagatctcaggcggccaaatggaaggaaggatttgccactaatgaacctgggaagaccgtggggagaacagtttgggaatggtcaggaattcagttttgtgccatgacaggtctgagctatccatcagtgacgccaagtcagcaracagaaacacaacttgggagttcaggggagagggctgggcaagagatttaagctgaggggtcataagacttacctaggagagtctctggacttaaaagattaatatccctttaatgtccacatcagaagtggatagtaatgttgatraactatatttctatttacacttctactttcctagctccttttttatataagaaattctgccttcattaaaggtctatagctaaygaaagttgcttccagttcagaagttttccttctaaagcaggcaattaatattttataggattattgttttcatcaaggcaaaaaaataatcaacatgttttgagaatagaaatgtacattaaatgtacattaaagcatgcttaacccatttatcctccagccagcttccttatgctagaggttagagtggggagcagccgggtccctccatctgccatcagtcagcctcacaaagcttatgtctgcactaacaaccatggcgaccagcgaaacaagccaggacgctggagggccctggtgaggtgtcttcggatgcagcactaatgacactgctgcgactattagtgtctgcaattcaactcaacttcttccagtatttatttatgcactgaattgtttgtatttcccatgaaataaaatcaaagaacaaagccagtacacataaagcttacaacgacttagagagctaagacttaacatgtaatcaatactatggctgaaaagcaaacccacagatgttagacttagaaaagaggaaaaagagtatcttgctcaatgcaaaacttaggattaaaacaaaccaaaacaaaaaatccagataaccgaaacatgtgtttgtttatttactacttttaaagaaatgattaaagtctaacatggttattaacagttgttaaatttaaaaatccaataataaaattatcttctttctgtataatggctatgaatttatagcttgtagaataaaacttactgaggaagaaaaaaatgagaacccaaaaggatggcagtgaaatccatctgtaccattattcatgggctacaacctcagtatctgatcacagtcttatctgatgtgtctcatcacatcattttgggtaatttattcataacatttcctgaatctctatagttatactccacaaatctaagtggaagcaataacaagaaaactcagggcaccacacacacaaaaatacctgtaggtttagtgatcagattctagtcaaaagttgttgctgggttttcttttttcttttattgaaaaaaatacatatgttaaaaaactttcttctgaatgattattttgaaaattaacaattttatgaattcaggttccagacaagtcaagaataccagggaaaaaagggagtctcaactctcatttgcaaggcacgacattgttaaaaatatttcagaccacattcttgaactgaggacataaaataatacattatatctttcaacatagagaaaatttcaaaaataagttataactatgtgactaaaacattatattaaaagaaaagaaggcctttttgtgagcacccaaataattcctcctctgtacacagtgacacaaaagcatttttagctttcaggtttcaacaaatcctgttgtaacaacaattccctcccttccccgcctctcctttcttaattctcccacatctcaaaaaatgagatggagaacctggtatttatcttctaacaccatcagcagtttttacctctcagatttctacgttgtcctttatttgcttttttcaagttaacttattggagctttataaacatatccagaatttctgaaataagcctcacgtatatggtttttcttcaccataactaactgaggttaatttgaagacaactgaccgaaggagttaagacagtgaaggctactgacaaaaggtatggtaaataaaacctgtcttaatgcttagagatctaagaataggtctttcggtattatttagttcgaattataagcagtaaatctgcttttaaatattatttttgatataaataaaccttgtctggaaagctgactttacattttagtgaaatctacaacagactttctgttggcgagtagttcataaactgaaggtgcctgggttctgttctgtgtgcactgtgttttgggaccatgagagagttttcactgtagaccatgtaagtgtttacatgcgacccctcccctctgcttctgcttgccttcacagtatttctctaccaccaccaccacagctgctggaacaaagtgtgcctttattctctacgagatagaaattttgagagaacaggccacaaacggtattatactcgtggctggagggtaaagcgcaatgcagctaaaatgccagtatatttgtatgagcagaaagtgaccttcatttggagaacaaattctttctacataagttctctatgcagaaaaaaaagcatttgaatccaatattcaacagtaagcaagcactatgctaattaaatgacacgtcatattgtttacactgattttggctgtctgtaattgatcactgccagtacttgttaatcatgatgaacaaactgtcttcatgtctgaaatatactgaaagttataaaatrtatcagttaatgggaagaaaaggattataattggtaagctgaacatagattgacaacaaaggttattcagtcaaagtagaaagaaagagagagggagagagaaaagtgagcaagcagatgctgttagaaaatgttccagcaaccccacacttgaagaatccctaagctgaaaatggtccagaggcagtaatttagcaagctggctggagtccgaaatgctaaaacctaaacttgaaagcagctattacaaaactgtaaacatgtgcttgattttttttctagaaactttaacttttgttctattttggtctaagtttggaaaacagaaaagaaactgtatgatagcaggtgaatcctaggcacactgatgtctacagataagtctgactcttaagaacttaaaatcctagggaaatccttttctaaaatggtaagatttacattttcagattatgaacaaaaacagaacagcacaatccagatagtctaggatctaatgtcttagagaatcaatgtttgtagctatgcaaagtttatactttaaatataggcaatggattagtactatttcaaatatttaaccaaagccaggcatcaatctccttgctgagtcatctgaagctgagccatgtggcctattaacatcctctacagtcctttttttccttggtggggaggggagtgggtgaagtagacagttaatggtgctttttgcctccagatacagtgttttccctggttcccatgggaaacacacagggggagaaagaatttcagcaggaagtgttgtggtaaaaggggaaaggatgcgggatgaccctgtgaggtaggaggggtggagagagatctggacgctgcaggttggctgctgaagactgtatgacatggggtgatatyctatctgaacattctgacctgaaaaaacaaggatgcttgagattgtctgtctgaggtttctttcagctccaagattctatgaaaataaatcagcccaaggaaggaagagaaaaagggaaaagatccaaataattttaaacatcaattgtcacaatacataagaaataaaaatactaataatgatgtcaattttaaattactgaggactttctgtggcttaaatattggtctaagcccttaaaatgtattaacttatttaaccctatgaacgaagtatttcaatcctccccattttccagaagaggatactgaggcacagagaggtataaagctaagaactggcccaagtgtctttgactcaagagcctgtatcaccttttgtaaaatacatatgaatcacgacagagccactttagcataccattcaaaattaactcagaatgacaaagaaagtcagtactgcagtatttcagaaaccattacatttttctcaaataaggcagtaagcagtgccagatgggctagataggggaacaggaatagaaagatggaatcsaaagcctttttgtttcttaaaacacagccaagccacaaagtaggtggtcttttccttcctcttaaaaataaacaaagaaaataaagggttaatttatttctggtatcctttcacatacaactaatgatgtggttatttctggtatgtatttttgagatctgccatcactacttctgaattgttcagaatagccggcttcatttgggccaggaaatkattctggtcccaattagaaaggacctcatgttcttatatacaaaaaacagtggcttaattgttttgagtaccaggcacctgaagtaaaacaagtactaacctcagtcaggattttgcaaacaggtaytaactagaacttagggataaccatgccagtgactcagacttctttccactgctgtccttcctcctcaaatggttcacttgggctatgtgcctggcactgtgggtgtgtcataaagatctgtttatgaaagccacttcctaaatacttttctaaaatgtatttataaaccatctttaaaaggtggccttaatttattttcttccttattatgtattgagtattttcattaaaaataaaatcatttgggcgaggcgtggtggctcacgcctgtaatcccagcacttcgggaggccgaggtgggyggatcacgaggtcaggagatcgagaccatcctggctaacagggtgaaaccccatctctactaaaaatacaaaaaaaaaaaaaattagccgggcatggtggcgggcgcctgtagtcccagctactcgggaggctgaggcaggagaatggtgtgaacccrggaggtggagcttgcagtgagccaagatcgctccactgcactccagcctgggtgacagagygagactccatctcaaaaaaaataaaaataaaaaataaaatcatttgaaaaacctataatgctattaaaattctttatcagatactatagctggaatttcaaatgtctaaatctcctaacaacgtacatgtccacgctacagtttcagcatatgttgagttttaaaaagaattaagtgggcaactgctttctttatgccctgtatcaacaccacccatgcatatcactcagaccagtcttcaaggcctggtgggagcttttctcctccagcctacagcatcctcatctgcttgggggctggagaagggggatactcagatgtgttcttggctcctactctaaagggaagcctttygtttacttactttctttcgctcaatcctggttttgccttttttccttaggctttgttatttggttctctactgcacagaaatagatagaattctgacagccatcattgttaaacatcaggattttctaagaggacagacttaacagtaacatcatggcctcagcaggactccagctccttgctttcatcctggccttatcyggggtctctggagtgctcacagccactctgctgcccaactggaaggtgaatgtggatgtggactccaacatcataacagccattgtacagctgcacgggctctggatggactgtacgtggtacagcactgggatgttcagctgtgccctgaaacactccattctgtccctccccatccacgtgcaggctgcgagagccaccatggtcctggcgtgtgttctgtctgctttggrgatctgcacttcyacagtaggaatgaaatgtactcgcttaggaggggacagagaaaccaagagccatgcttcctttgctggaggagtctgtttcatgtctgcaggaatctctagtttaatctcgacagtgtggtacacaaaggagatcatagcaaactttctggatctgacagttccagaaagcaacaaacatgaacctggaggagctatctatatcggattcatttctgcaatgctgttgtttatctctggcatgattttctgcacctcctgtataaaaaggaatccagaagctagactcgacccacccacacagcagcctatctctaacacacagctcgagaacaattccacacacaatctgaaggattatgtgtaaataactgagtaatgcatatgaaatggaacttttgggtgccaaatgggacttttagattaaaaaaaaatcagaattatgcttaactttccctacaaagaaagtagaatgtaaaatactttaacaactacaaggtagtttaaaatgccaataaaactatcatatacaattacatgtgtctgaagagttctttattttttccattattgtttccatgttttacttaaagatttataattgaaagaggttctgattacattcataaggcaattatttgatagctttttctaagataatttgctgatacacctttcaaactggattttataaaagaactaaactgccaagtataaaaagtaccttgccctggtgttaaccaagaatattatccactttgctatctggttggcaacaacacagcaacttgcttctgttttaaagctacagtgtgtgaaagtacattaggaatacaagagctgcctactccattcagatgctgctaaaaccatccatcccaagtccccacctcctgtgaccagcccatttctttttcattttagaaaactatctacatatatttgtaagagctgacaatattatatgcaaactaagattaggcagaactgaagaaattggtaaatgctaccacagtaaagaaagccaaaccaaactaaaatctctaggactcttaaagcattaagtacaagctaagtgataagaacaaaagtttgttttaaaatgtttaagaactcccttcttctgcttctagcaagaggattctccacagattaagttcatttatcctatcacattctggatttactaccatcccacttcctctctcatttattcatatttggatgataaaagttacctttgtcactttttctctcaaatttcattcatgttaacaaaaacattcttacaaataagctgtttcaattaatgaatgtcaaaatatattttaaagaatgcttttaaaatataaattatgatatgtgattcaaatattttagcaagtaaataaaaatctaggaaacactgcccactattgtttctaacaatttatttgttaattgaagcttagtcattgtcaatgattcaatggtaaaggggaaaaaagattatttctttgtacattaataactcaggaagtgggaagaatatcttttacgtaagtaaataactttcatttgtgcatacagaaatagactaacatatcctatacctattttactgggtagacattctcttctgcaacaatgtcattagctattactggaatagctaaaacgaaaaggtattatcacaaacgggaattaggaaggggatcattttgtagaaggttaaatgattgtttaaagtatgtattccttttgagtggtcaaaatgttattttatacacaagtgtcatactaaaaagaattctgatgcaaagaatgatttcatgcaaattaatgtgctagaactgctttgatctcattaatagttcttctctcactttgctgaatgtggctgggtttacatagtctatgtagcctttagtcctacagtaaaagttatctttatatctgctatatcattctatatatacttcaaaaataatttttatttagctctggagtattttcttcctaagtagaaacacgaatgtttcaaactctcagaaaaccagccattttatatgaaataatggcccagtgtattgtttggaagtggcaatcctgcaataaatgatgtggagtctctctattcctacaggaattcctatcccgctgtgttcattcctccacctgcactcctcccagcctcactccctcactaccaaagctcctgctcacccttcaggattcacacggacctctcctgtaaactcaatcctgacagcctagaagttcaagcccgcatctgcactcgcagaaaatgctctatttaacaaactatgaatttaataaatgctctcatttaatcctcacaatagctcacatgagcacaccaagacttaagtaatgtgtactgtgtaaaaacgctctatttaagaagtcatgaaattatgagtttacatgattgcatctccaactagactgggaggtgtggtgtcatttttagctctgcattctcagtgacatgtcatggcaagtgcttcctaacacatgccagtcctggtctaaaacctaacacatgccagtcctggcttaaacctaacaactctaccaggtaggcactattctcaggatcttacaggacactgagggcgacagaggtgacataagttccctaacttgcccaagttcacacagctagtaagtggggagatggttccaacctgagggaaccaggttctggagtcaaactacccgggtgcaagccctggtgtgggtgcatggttacacagcatgcattacttaactaaggtcttggtttgcttaagaatggcatctaccctcagagttctcgtggggattaaatgagatgatacacagaaagcagttggtgcacagaaagcatatgactagtgttactcaatggttcttagtctaatccagtggctctccctggggtgagtttagcctgcaggggacattcggcaatgctgggacacttttttggttatcttaactgaggtagtgctactggaatctagtaggaagaggccagggatgcctttatgtatcttacaatgcacaggacagactctggcaacaaagaattatctggccccaaatgtcaacagttctgagtttgagaaatcatagtctaatttatcgaatatacttattcattcttctttgataaaaagttaccaaaacaaaacccaaaagaccaaaaatatcatacttttttttttttttaacctgtggagcacgtgtatatctatacatatgactgaagaattcatctagtaattctgacaaaaatgatagacttaaattaagtcagaagaattgggtacaaaattgggatgggtttgggagaaatttaggtaatgtcagaagctggttaacgactgactagttctgagggtcagcagttgtaaaggtctggggaggtggtgcttaagatgacctccaaggtttaggcttggatgacctgggtggatgatgccattagtcagcatagtgaataagaggtgcagggagggcaggcccactagggtagttagacagaagttcagttttggatgtggacaatgttttctcatatgtctttcatcactatattgtcagctacatgactttagcaaatactaacttacttgacttttgagatttttagcctagcctataattctgcagaacactatcacattattatcattatctccagttacttttgtattaatttcattgcattttatacatacataaaagtactgtctgcaaaaatgcaattttgttttttccctccttggatttagaatacttaccatttattcttgagcagtttatggaagcatgcctagtactgaattaaaattgtaatagcaaatactcttatctctattcaacacgtattttacctgatttttaaggaggatgactctggtactactttaattataaaaatggcttttggtttatatttatttttattttggactcaagggctttaaaaaagaatttgaggcaacttataaaattgcaggtataataagtataaaaacaactgataaagatgaaagactaaagttacaaacaaaaagaagagagaaaaaatgctattaaatgttcctggttgaagcatgctaaagcaattaaacatgaaacttagtttagaacttccaagcaactgcggcagagaggtggccatgtaagtaatctgacagctttgtctactggtaggaagctagacaggatgctgtgtcttggccaagctccttccactgggccagggcagccacccccagctgctggcactgatgggtgctaatggctcccagagatggagctgcctctactgggaagtgactgccccgttgctccctgcaaagactggctggcacaggttccaataagctggtcccttgcctcaagggaacacagacgcgtggggcaatttgtgctacacagcttctcctcccgccgtggttctaggctgaagctcctccaggaggaacaatatgtttacttagctcttcccctgccctttcctgctaccctcatgccccttctcctgagggcccttgtcaatacatcacctttatgaaaatcccatctcaatctgattctaggaggagaatacaaaccaaagacagaagagtcttagttaagtaggaaaacactagtgttctgacctcataccaaaatgattcttgaatacaaggtaaatatacagcagaaataacatcctcaatgtcagatttcaaaaaacacaaaagcatgaaaaacagttgtctcttctgtggacccatccacccaccaaactcaagactatctcccacagaggtcaaggcctcaatagctgtgaacaagcagggttggaagcctctaaaacgctcttcaaaagtcaagagtggatgtctcaagttccaatcttttctttatatgtcatggatatatcattaattcatctacaatttaatggacactatttatgctttaaatgtgtaccatgtttgaaggtaacttgttctatataccacacttccaaataggaaaaattaaatataaattctatatatagcttaaaaattataatccttatttttatatcagaatactacaacttagtccataaatatttgtttatatcataacaataacaactactttgactggcagcattcactgccagatactcatattaggcactctgcattgattatttctattcctcacaaatgtccttcaagggtggtattattggtcaaatctggatgtagtaaactcagcctattaacccgaccaagctctcaaaactagcagtactggaattccagcaggtctagcttacttggaagtctactgcctctaccagtgtcaattaaaaagaacccgttacaactctcataatataactaaatgatttttctactaagtcagagtagagaatagtgttgagaactggctgggcgtggtggctcatgcctgtaatcccagcactttgggaggccgaggcggatggatcacctgaggccaggagttcgagaccagcttggccaacatggtgaaacctcgtctctactaaaaatacaaaacttagcggggcatgatggcgggcgcctgtaatcccagctactcagaaggctgaggcaggagaatcatttgaacccagaaggtggaggttgcagtgagccgagattgtgccactgcactccagcctgggcggcagagtgagactctgtctcaaaaaaaaaaaaaaaaaaaaaaaaatagtgttgagaactaaaaagcctttccactctttacgaactatgttagattatgaagcctatcaccataattcataaaaaaaagacagaattttgaggatctagctaatagctcagtatttcccaaacttgagaaatgtgcagagtagctgaaaaaaaagattaagcgtggaaccccagaaatatgtggattctcagggatctacagaggctaatagagaaaagctagcttgagaaacttaagaaacaggttgtattctgtcatgaaaacaattttagttctgaatttgcattgcaaaagacattgtcttgtaaacgtaaataatttcattaacagtgaaatgaaaacacaaaattaaaaaaattctaacttaaaagctacatactacagactctaatagtttaagagacactaaagtagaccaattaattagtctaattttaagaacctcagaggttgtctgttttgcagacacaaagtattttgggttcaaattttgggaactacactagagagcttaataagagtaaagttcagcagtaattcagttcaactagtcagaacaggattgtaatagttcaatggtagtgaaagttctgccattaaagcttgattgagttagttaaa

SEQ ID NO: 96298 - DNA, 17175 bp, Homo sapiens
gggctaggtgtcagacagtccgagtgacttctggctgcagtctctgggatggagaactctgaccttgccctcttttctagtggactctccacttcctgcccccgaatctgcagggccctgggcaaggctcatcaggtgagtgtggaccttactcaccttatgcagttctttgggtcctcatcacagttaatgttgcagcggaagcgttcccaggccagccagcccatgggtggtgtctgcaggagcccattgtccagcatcagcacctgggccacatgtcccagcaagagcactagggggcaagggaggaggggatggtgactatcagttgcccccacagctccagccctcatcccaccccatctgtatgttgctcagccctacagaggctgcctgcctatatataagggaaactggactcctgggtttagggtagaattggctcttcctgcaatggctggctcttgcaaagcagtaagtgggaggatggtgcctgggccaggcagtggcttgaggtctggccgtcaccacagcattgctggaattagcaaaactaacacctggaattagcaaaactaacaccttatgtcctaaccttcctataacccccatcagctcctcccatcccatatatagaacttaacagtacagatgctcctaggcctaccacggaactacgttctcataagcccagtgtaagttgaaaatatcacatcagccagatgcagtggctcatgcctgtaatcccaacgctctggaaggccgaggcgagtggatcacttgaggtcaggccaacatggtgaaaccttgtctctactaaaaattcaaaaacttagccaggcgtggtggcatgcgctgtactcgggaggctgaggcaagaggatcacttgaaccccagaggcggaggctgcagtgagctgagatcgtgccactgaactctagcctgggctgtgacagtgcgagaccccatcccaaaataataaaaaagaaaatatcatgtcaaaaatgtacttaatacacctaacctggcaaacatcatagctgagcctagcctaccttaaaaatgtggacaggccaggcacggtggctcactcctgtaattccagcactttgggaggccgaggtgggcggatcaccgtaagtcaggggttcaagaccagcttgggcaatatggtgaaaccctgtctctactaaaactacaaaaaaataccggggtgaggtggtgagtgcctgtaatcccagctacttaggaggctgagcaggagacttgcttgaacctgggagatggaggttgcagtgagccgagatcacgccactctactccactccagcctgggtgacagagtgagactccgtctcaaaaaaaaaaaaaaaaaaagtgcgacaacgcacattagcctacagctggccaaaatcatctaacacaaagcctattttataataaattgttgaatatttcatgcaatttactgaatactgaaacacaggttgtatacgtactgtggtttctactgaatgtgcgtcgctttcacaccacagtaaagttgaaaaatcgttaagtcgggaccattggccagactccaggtctcctgagccccagtccagagctctttgctctctaccacagaccctcaagaggcctcagagaggcttaagaagtaagccagccaggataggcacccaatcagctcacctaagtgagacctttccccctcgggcctcagtttccttatctgtaatatggagttactgtagggactgtacaggcggttctccgcacatgctgatatccatcagttagggcctctgtgcttgagggagaggaagtgagaaaggaagggcccctttgaaggagaaatgattcccgtatggggaagcatctcctcccttcctgcccagctctaagtaaaagagagaggaacctgtctctccacatacccacattagggaagaagggccaaagcactccttgtagcactcacccctacccttccaagccaccccagccggtgtaggtacctgtcttcagcagcatcgctctggactcagcttccgaggacctgaccagatctggtctgcgtgtatcagctgtatgtgttgggctctggaagctaagaaacgtctgaaaagcactggggtcacggctgcctggctagctcggccgccctcaaccttaggcgtggatcgtacactcggtccccaagttgcccgccccatccccagccatcacttcccggagcttgagttcttccttcagaaatacgaaacaacgtgtcttggatgtcagacctcacaccctctgcagtgctgggagtcccgagggcctacgggccgccttcggccccgcccgggctcagaaaaaggcagccactggcttaaggtcaccaagaaagagcggaggggcggggctgcggccaggctccggacttccagccgggtccgggttcccgccctgggctccccaaaaccgcagagccccctcccaccgcacttatcctaccgaagcgttcagacctgccgccgcttctgactcgaatccggtaacctgataagtccgaagcgttccagtgagggcggggcctcacgaaggcaacccttcgcgcaacctatcagaatcccccctagcaacgctgtgccctgcccatatgggtccggcctcccagcctccctaagcccttccccattgggctcccgccctgcgtgctagcgaggctggcattggcagaacggactcggggctgtccttcgtggcccggaccccgcgaggcctgtccttccacctctgtggggaccaagagggcaaggatcgtgccaggctcaccgtgggcgctcagtaagcggccgtgcagaggacggttgagggctttgtgcagaggaaatgagagactgctctgaagcaaggcccgcctagtgagctgctaggaaaatggaagtctgggattaatcgtctctacaaggagggtgcgtgggaggcaccaaagcaggcggtcacagctcccgcaaaggcagccggctctccttccccgcctgacgctcagggactactcgcacagactgggctacttccttcttcattcattcatcaagtatttattgagaaactgctaagtgccaaatgctttgttctgggcattgtaggggcagaaaggtgtgatattttcccttactcatcccaaaggtcacagcggacactcctacaaataaaatataggttagcaagagaaaagcataatagattgatttactcaatgttttatgtgacttgagagccttcaggaatgaagacacaaatactcagggaaatctttatttttatgtctcggtttgatgaagaatggacagccctggccgggtctggtggctcatgcctgtaatcccagcactttggaaggctgaggcagggggatcgcttgaggccagacatttaacgacagtctgggcaacatagtgagaccctgtctctacaaaaaattaaaaagccaggcaggtgcctgtggtcccagctactcgggaggctgaggtgggaggattgcttgagtccaggaggtcgaggttgcagtgagctgtgattgtgtcactgtactccagcccgggcaacagaaaaaaaaaaaaaggaataaggaatggacaactgtgttaaacgcgattagacaaaagggaatgatttaatgttaatagctgagtgtggaaacccagcaatgtctgttcagattcggattcttcttgttctctctgtgtggcattccctcctgctgggaggagggcaggaccccttctggaatgagagtcttatgacctagtatcaggcaaggtagatcagagaattcctttatggccaggcccgacacagaaaggtgggggatgtttccagtaatatttgtagttacttttttttctttttttttttcttttgagacagagtctccctctgtcaccaggctggagtgcagtggcgcgatctctgctcactgcaacctccgccgcccaggttcaagcgattctcctgcctcagcctcccaagtagttgggactacaggcgcacgccaccatgcccagctaatttttgtatttttagtagagatggggtttcaccatgttggccaggatggtcttgatctcttgacctcgtgatccgcccacctcagcctcccaaagtgctgggattacaggcatgagccactgtgcccagccaatatttgtagttgctataactcaccttagggaggaggatttttagtttctatggcctgccttgcaggagaaaaacgggagaaagaaggggggcaggagaaggtcagagagatactttgcttctgaggctcttccagtgtcctttggttcaaagtactcagcatgcccaagtgccatatttttaggcatcgctttctgagccccaacagcaccttcactcagatggccactgggtgtctcaaacataacccagaccaagcaccggccactttccacatctcagataatgacaactctcctaggtgctcaagccaaaactgtgcagtcctgcctgctctttccctcactccccacatccaactcctcagcaaatcctgtgttctctaccttcaacagccattctaattctggctgcctctccctccccgctcttgccgcgtttgtgacatcttgcctggatagtggcagcaggctcctcactggtctccagcctccactgacattgattctcaccacagaagccagagtatgccttgaaatcgctcaggtccctcctcacagccctgtctagagtaacagccctcccagatttacagagccccatcccaccccttctacccccacctcctactgtctgcccctccccaggcctcccagcctcactggccttcttgcaggtcctcaagcacaacaggcctgagggccactgcgctgactgttccctctgcctggaattggcatggctggctccctcatttccttcaagtatttgtccaatgttactttctcagtgaggcctaccctgaccactctatttgcaattgcaacctccctactcccacaatttcccatctcccttaccctcctctgtttttccatgccacttattatcttctaacacatttattatggtgtacagtattaactgaataaaatttagtaggggagacaggcaataaacaagaaaataaaagcatgagcataggaaagtttactctagcagtgagtgctctgatggaaataacaccccagggatgggacagagactgcagggcaggttgctttacaatggtcccagaggagaccactgagcagagactcaaatctgtgtccagaggcgtcctgaggagtggagctgcggttgggggtgggaaggaaggccattctaggctgcaggaactgcaagggcaaaggctctgaggcgggagccaggttcatgggcagatgtttgaggacacctccggcttccagggccttccagaagttccagtctcttgggtttggttgtgcattcctgcgaccttcaccgcaggcctcctcctccacccactagtgcagagcctgggggctgccggtgggtttcaggccagggaagcagaaatgggtaatttccagaggcagaaatcagccgaccccggtggcccggtgggtggccaacaaagcttggctggccctcgcgggctgtgtaggagcccaccctagggaggtacccagagacatccctggtttggctctgccgggaaagtgggccgagcagggagagggggaccagagaggaagagatggacagagttttccggacggtgggctgggtccgaggcccgcggaccgtccgaggggggcctctgggttcgaggccgcccgcaccgaccagtgctgtggctcgggcagttcaccgccctctcgggcctcagtttcccgccctggcagacctcgaggcggcctcggagatcccgggcctggcgaatactgggcggggaggggcgttaactccagcctcccgggcggggtctcccggctcccgcggccacgttgcagcccaggcggaggcgcgggatctcgagctgggatcgccctcctgggcttcggtgcgatcggcggcgggaggtgagagtgggcccggcgggctccgggaggaggtggccccagggaaggtgtggccgcggggaagtggcggcgaacagccccgacgcgaggacggggaaaccaaggcggcagccagggagaccctgaccgaggtgacctctgtttagggcgacaaccgggttggggctccccgcagtggccactggcccggcggtcccgcacccccagcccgcctctcctccaacaaaagaatccaggaagacgstggggcgggcgggaggccsggtgtgcggtggcctggcccccctactggtggagaggagggagcgcccttccccagacgcgggggaggggaggggtcatggccccacgggctgcccaccccctccctgtgccccagtgctgggcccaggacccccagtgaggccactcctctggcaaacatctgtgatctcttcccccttcctgggccccccctactggaatggcgtctctccccatccaggggcctggcttgtttttctccataacccttagcattaccggtccttatgttatctcttatttcactaattattctttcattaatttattagtatttattttgtttgcctacagtgtgtttccccctgtgggaatgtaggctccaggagggcgggagacttcgatttgtccactgatgtatccccattaattcaacagatccctcctgagggcctctctgagccctgcacggtgctgggtattggggttctcctgggaacttagctgagccccaccctagacattctggggmtgggaacagtgctgtaaacacatatgacatcgtcgtgggatgaaggaaacaaaccagaaatgggggggtctactggtcaggtgaccttaggtcaggccaccttggtggtcagggccaccttagatgatatggtgatcatggaaggcctcccagattaggtgacttcagttaaagccaggaagtgctagaagggaaaagctaggaaccatgagggcatgtgtagctctgacctggactcaggcagggagctggggtctgaagagtaaaggtcaagacaaggggacccatccccttaagctgctcaggggttcctggctgggtggatgggtggggggattctcaggggtcagggaaggcttcccggtggaggctgtggtttcattaggcctcgaaggtggagtaggagttctcattctttgggataagctgactgggcttgagaattgttttgcaggttccctgggaaccaggtggtcgaagggctgagctgtgtggccagacaagaggtccctgccctcccccagtgagccctgctggtaagtgggtacagtgtgagggatttgggagacgaagctctgcgtctcattggccatgtaaccttgggcaagttcccctcactgcgctgggccttggttttccatgagtaaggacagytggactaagtgccgttcatgatgctgggggcacccacattcaatggctgtggttagctcttctcagctgtaccctgggtttgtgccacactcttgtgtacagagtagctccccatctggccctgaaggctgcagattgagacagaaaaataatgttttatctgaggaattggagcccctttaaataatcaggcccagacatactgaaacgcaacagctgtcaagtcttactcctcccttgagctaaagaattatctctttttctttttttttcttttcttttcttcatgtcagatcggtaatgtgcctacatggtaacaaggttcgagggtggcacagctcacacatgcatgtgaacacccaatcatcacgctcatgaactacaaaaggatcaagaattacctcttgaagccacttgctatgtggctctagagtgacaccaagtagccataaaatgctgtacmctggacaccctatagttcataccctatagttcaacaatgtatagccaatcactaatcaatgttatttctttttttttttttgagatggagtttctctcttgtcacccaggtggagtgcaatggcacaatcttggctcactgcaacctctgcctcctgggatcaagcaattctcctgcctcagcctcccgagtagctgggattacaggcacccaccaccgtgcctggctaatttttgtatttagagacggggtttcaccatgttggccaggctggtctccaactcctgagctcaggtgatccacccacctcggcctcccaaagtgctgggattacagatgtgagccaccgcaccccaccaatcaatgttatttctataaaccaaggagaattcctgccaaacaactttgtcatccttgcccccttctgcctataaaaacctgtaggaaaggcccaacgcagcacaccccacggcaacttagaagtttgttctgggcagttatccttactctcgctcaagtaaactctttaaagttatatttgtgcctcagcttctgcctgtaggtcaataagattcaacagctatatgcaaataagaggccagtagaggcccaggagggtcatggaaaccctggaagcttggcctcagagttsgagttgagaggaccccagatgaggggatagtttaagcacagtggtttcgatgggtctggggtccatttcagctcagctggggcctgtttctttggattttagaaagccgtgcccaggtcctgccatgcctcctgtctgatgcaatctcgttattcttttctcgaagtccgccagtgtccagttttttttgcatgatcctcacgacatccctttgagagaaaaggaaggaaagacgagcccacttctcaggagactttagggaccttagggacacagcaagcgagtaggagtcccagggctggggtccaggttgcctctggagccggtgctgttccccaggagggcacggaaccacctccctctctgatctgctgccatctctcttgcctcacagttccygtgggagccatgaagctgaacgagaggagtgtagcccactatgcactcagcgactccccagcggaccacatgggcttcctgcgcacctgggggggcccagggaccccaccgacccccagtggcactggccgaagatgctggtttgtcctcaagggcaacctgctattctcctttgagagtcgcgagggccgggccccactgagcctggtggtgctggaaggctgcacagtggaactggccgaggctcccgtgcccgaggagtttgcctttgccatctgctttgatgcccctggagtgygcccacacctgctggcygcagaagggccggcggcccaggaggcctgggtgaaggtkctgtcccgggcaagctttggctacatgcgcctggtggtacgcgagttggagagccagttgcaggacgcacgccagagcctggctttgcaacgccgctcatcctggaagtctgttgccagccgctgtaagccccaggctcctaaccaccgagctgcgggcctggagaatggccactgcctctccaaggacagcagccctgtgggcttggttgaagaagsgggcagcaggtctgcagggtgggggttggctgagtgggagctgcagggccctgccagcctcctcctaggcaaggggcagagccctgtgtcccctgagacctcctgcttctctaccctgcatgactggtatggccaggagatcgtggagctgcggcagtgttggcagaagagggcccaggggagccactcaaaatgtgaggaacaggataggccctaagtctgggccctttgagtcaggaaaccagggccagttctttttcaggagttaaatgtttacscatttccaaggttgcgttttgggaggggacatgggttctctccttcctgctatttaggcattctccaggttcgagatccacccgtgtgtctggaagggactgcgggaccattccttccatcctctttatttcctgaggtccagagaaggaaggagacttagcagccacagagcaagaccccaatctcctgactgcactggcctgactgccccctcccaggggatgttaatgaaatgaaggaagtggggaatgtcacccgagactgtcacaggcttgccatacctttggcctacacaccgggctctagagccataatttccaacctggggagtctcctgtgcacttaaatccgaggtaggctgcagtatcggcttgaagctctgacactgtcagagaaagtggatttattgtgtcataggagtttctgggacccagctcttcctgagaggggtgggaagattggggatgggatcctcactcagcagtctgggtagggccctttgaggcagagggtcttcggccagtgaagagagatttattctgctcagagtgctggggtcccatcctttctccctggctgccctgttaacagatggtgctggaccttgccccggaaggggcttgtagcttttttacgtcaacgaaatgccctcctgtactctgtcttcagcagccaactcctggagctgccaagtgaggggttaaagaagaggtggggaggcagtgtggctccctgggaaaagtctgttgctttggttctcagtcctgggtattctaggagcttggacacgggattgcgtttcctgtgctaaaattctctctcctggctgggctccggtaaactgaagctgctcgagaaatcacctgggaactctcatagccgtttgtcacccagggtgtacttgccaggacctctccttgctactcttcccaaagtcgggaggcaaagcggctgggtcaccagagcctgaccatactgacgctccagggggaagacgcagaggccgggaagagacaccccctcccaaacacataaaacttgccccttcctagcctcggctcccctcactggggccttgggcaggaccgacccgcatccaactaggcctaaggggtaggctctgagcctcttacccctaagaggcggagatgcgcccaaggcgggcgcccggcctgttccccagccctgcctggaagccccgcagccactgcattttgtttaaacacagatagcacgggcctttctcttattgctacagtgttttgtacacggttaaaacactagtaaagctttttcgttattactccttccgctccctgggtttatttccacaaccggccgctgaggcctgttctgacggccgggcggacccaagaccgcggccacgcccagcaggacgcggactgagggagccggggctgcgccgccactctcgtgacgccaccatgccggccagtgacaaacacctccctcccgccgccccaggagccgccggcactgcgcgagtgggagggctgggcttctcgtgtactcctcaaactctcgcgaggcttcgggcggctttcttcccgagggcggcacgagggctgggcggtggggtgcgggtgcccgggtgaggggcggagctgggggcatggcgtccggagcggctcgctggctagtattggcacccgtcaggtccggggctctccggagcgggcctagcttgaggaaagatggcgatgtctccgccgcatggagcggctcaggccggagcctggtaccgtcgaggtcagtcatcgttacccgcagcggcgccattttgcccaaaccggtgaaagtgagtgtcctcctggagacggggcgaaggggctgaggccaatcattgtggggagtgcgtgagggcggcgctgattgataggagccaaggccaatcataacgattaccgtagactggaaggcggaccaagaatacgctaatgagttgctaattttgacaggtgtgtagaaaatggtaggtagacagaagatggggggcaaacgctgaggaagttggccttttacattagcttgtcctgagaggtgcggtgctctgctcctctggagtcagaagactaggccgtgtgcttctagcttagagcagtcctgtaatctctgccctgcctgtctcctagtttatgggatgaaatatgaattttgaaaggactctgtaaataaagggtacgtgggacgggcctcatctttttattagttgtcacctaatatttaattcatgtgatttacagtcctgatagatgtgcagggaattattacaatcacgggttttcaaatgaagaatcgggctagagcggtgaagctcgtatccaaggccagcgctgaggacgcagcatccgggtttcttcctggtaccgtccccaccaggtcctgtctttttccaacactgaacgctatcacatgcttgagtttttctagggaaaacggaaacagtcccttatatcaagcgaaagtttgctttacgactgcagggctgtgtggtgtgggagttaaaaaaacaaattctcttaaagctagtctagcctatgctaactcacacaattgactgtaggtccatgttgggaaagacctgccttatcaaaacagttgaaaaaaaaatttttttaattctaggaatacgagagaaatgttgctgagattttactgacattctcccaatccatctaaagtctttgagtgtaaatacatgcccactttcaaatacatctgtttctaaaatttttaaatcaaatttctcaggcatcagggaacctgttacttagtgaactgtgtagaatatcccttcactgtacatctttctgtcatcggttttcgtgtatttcgtgttcaggcagagctcaccgtagtctggccctcctagtactggtgcacccgattgcctgtagggatttaaagtaattagcaggctgtgtcctaactttagatgtctagggtgccttagacttttctttccagtggacttttcgtccattttgatggccataacagtcaccttatctccttttttttttttttgagacggagtctcactctgtcacccaggctggagtacagtggcacaatcttggctcactgcagcctccgcctcccgggttcaagtgattcttctgcctcagccttctgagtagctgggactacaggcatgtaccaccacacccggctaattttttgtatttttagtagagacggggtttcactatgttagccaggctgatttcgaacttctgacctcgtgatccgcccgcctcagcctcccaaagtgctgggattacaggtgtgagccactgcgcccggccttttgtcttttttttagacagagcctcactctgtctcccaggctggagtggaatggtgcaatcttggctcactgcaacttctgcctcctggattcaagcaattatcctgcctcagcctcccgagtagctgggattacaggtgcgcaccaccatgctgggtcaattttttgtatttttagtagagacgggatttcaccatgttggccaggctggtctcaagctcctgacctcaggtggtccacccacctcagcctcccaaagtgctgggattaaaggtgtgagccaccctgcctggccttctccttttctaattacttttcttgccctgaatttttccaaggactttaaaatcaagttgcttatgatgggtctgagggtatgtctgtgagagggccaggtcttctttggtcctgccagagtgggctctggagctcacagctgccactctgaccctctgcagatgtccttcggccttctccgtgtgttctccattgtgatcccctttctctatgtcgggacactcattagcaagaactttgctgctctacttgaggaacatgacatttttgttccagaggatgatgatgatgatgactaacaggtaagacttgctttaccctagatggagcaggaagcagggtggagcatctgtctgtgatgcagtctggcctggtagcagcatttggacactgggggcagaagcattaatgaattggcccacttggtggctaatgttttcgtttgtttgttttttgagacggagtttcgctcttgttgcccaggctggagtgcaatggcatgatctcgactcactgcaacctctgccttccaggttcaagcgattctcctgcctcagcctaccgggtagctgggattacagacatgcgccactgtgcctggctaattttgtatttttagtagagacggggtttctccatgttagccaggctagtctcaaactcccgacctcaggtgatccacccaccttggcctcccaaagtgctgtgattacaggcgtgagccactgcgcccagccaacttcatgtgctctaatatgtgctgcatggcattctgtcaagagatgaggacactcctgttccttagcctggcattcaaggcttgccataatctggtcacacctcttattccagtctcatcttccatatttccagccacacaccgattcccagtattcaccatttcttgagttttcacactcatacccacccccaaacattggctcattgttcctcccacatggaaggctccttcccagagctctgggtcttaattccacccattctacagtgtctttgaagtcttcgttcctcctttcatttgaaagttgacggctccttcctctaagcaaccagtacctctcttcaaatactcggtattatgtggctaaacacacacaaagcaaaattttactagactctgagcttcttgctggcaggggacgttttttatacattgcggcccccagtgcctggcctgtggtgaatgcccagttaacgtgcgcatgaacaaccaaacgtgctcaaagctgcctttctcctgccatgtttgatagaagcactttgtggaattctttcagtctgcggatggaagactacgctgttgcccagttcactgctgctttcctttcttacaggaattacagaaaggagaaagcactaactgaagaaatggtgatgctctcagtttctctgccttccctatcagcagaaaggctcggggaaggccctcagcctcccagtctggtgaagcttcctgtatggtccatgaccgtattccaccccaggctctgggaggctccctgagatgtgctgtccactaagcactgcacaaacaagcaatcaaattatgaataaacataataaatatcagccgtgcgtgactgagtgatggctgcagtttctcagtatccctaggttctagttggtgcagttgtctctgctgtcctttatttatgggagaaacataggcccaggctatccaggctgcagtggagcctggtgaactattctgggggccctgggaactattttcattgtttacaaaagcccaacagaaactgtgcattttcccttaagaaagcttcatgggctaactaaagcctcatgccattctgtgttcagtgccagtcatgacagctctgcttgttagcatactacttaaatataactagaatgattcaaaactcgggttctgtgatatgaggatatagataggttttcatctatttcctggcttataactcccaaaacccttgttttaggcttttgttataatgttgggcacttcgggcctcagaaaacagcaggctgtttctcagatcttctcctgacctcctttcacctgctgctttttctccccaaggcaggccatagaaactaaaagtataatcttcctttgcccgtcttccagttggccataaaaagaatcctctgacctaccttgtctgattttaggtcatgagacccccatttcagaagggattctgccccatacctgagaggaagaaatgtagacaggccttgttggacttccccactccatctgtattagattatgcctcttttgtccaatcccatttctccagtgttgtccatgcttcaatcatccctatccaatgaggtctccataaaaggcccaagaagacaggtttagagagctttcggagaacagaacacttggctttgcaaagtggcacgcctggagagaacttggaagctccacgccccttctatacctcaccctatgcatctcttcagctgtatcttttgtgatatcctttataataaaccagtaaacggacctaagtgttcctctgagttctgcaagctgctccagcaaattaaaaagaaggggtcagccaggtgcggtggctcacacctgtaaccccagcactttgggaggccaaggcgggcagatcacaaggtcaggagagcgagaccatcctggctaacacagtgaaactctgtctctattaaaaaatagaagaaattagccgggtgtggtggcgggcacctgtagtcccagctactcgggaggctgaggcaggagaagaatggcgtgaacccgcgaggcagagcttgcagtgagccgagatggcaccactgcactccagcctgggcgacagagtgagactccatctcaaaaaaaaaaaaaaaaaaagaaggggtcatgggaacttgaagctcagaagttctggaggcttggacttgtgaatgttgtctaatgggggtgggagcagtcttgtgggactgagccccaaacctgtggaatctgttgctatctccaggtagatagtgttcgaagagaattggaggacaggcagctggtgtctgctgcagaactgactgcttgcttagtgtggggagaaaccctcataacgtttgatcacagaagtcttatgtgtttattgttattgagtgagagaacacaaaaacaccttgagtttttccctcaggttccttacgtgaaaagattataaagggatccttggtgccataaggtttggggccatgcacaatggctgatgcctgtagtcccaacactttgggaggcggaggcaggaggatcacttgagcccaggagttcaagactggcctgggcgcggtggctcacgccagcactttgggaggccacggcgggtggattacttgaggtcaagagtttgagaccagcctggccaacatggtgaaactccgtcttttctaaaaatataaaactagctggatgtggtggtccatgcctgtaatcccagctacttgggaggctgaggcagggagaattacttgaaccaggaggtggaaggtgcagtgagccaagatcacaccagtgcactccagcctgggcaacaacagcgagactccatctcaaaaaaaagaaaagaaaaaaagaccagcctgggcaatggagagacgccatctctatttaaaaaaaaaaaaaaagtatgggagtcctca

SEQ ID NO: 96299 - DNA, 13344 bp, Homo sapiens
ggatgtagccctggccattcttttagacaccaaatatctgatggtgatgacaggctcagttgtggatgtgtagtctgtataaaaatgggtctggagctgagaaatctgggaatgtgctagagaggcaagcatggaggtcaagtctgcatgtatcagcatagagactaaactgtaagtcctgggagctagggggtcaaccagtaagactgcattaaatgaaaaaagaccaagggaaaatacggaggaaaagcggcatgtgctctcaggaagctgagatacaattgctggagggagaggaggacagccaggatgtcttcaggaattcacaagtgagagcctatgaaatcatcagaggggtcacctgtgtagaatgagcaataaaggtcagggttaaaaatggtttactgggtgtgaccatgcagaggtcattttgcagtcttttgtctgaagcaatgaagaggtgaagaacacagtaggtagttctgtttctaccagaagacatcgctttctccaagactgacagaagatgaagatagatgcagatccaggtgcatggcctggaatttgagggacgtcgagcctcattttctccatggcatagaagaggccttctgaaggaggagaggagacctagtagccattaccaagaacactgatgagtttgattacataaaaactgaaatgttatgtatggtgaaagaaataacaaatagaaataaaagatggaccataaactgggagagaatatttgaaaagcataaaacaaaggattaacatccctaatctataaaatgtgaaaggggaaaactcaactacactgttgccaagtccactcagaacaactagtgtacataatggaaaataaaacaaccaatccatttgacctcactggaatcaagcaagttcatattaaaacaacaaaatacctctttttgtctatcaaatcagcaaaaaaaaaaacaacttagtatcattcactgctgttgaagaaataggggctatatgtcttattgatagaggaataaattacttcaacattttgggggatagcaatcttatgatctcttcaaaatgtacatatgcatttcctatgaaacggccatcctattttgagaatttagccttcagaaataaaactacaggaatgtccaagatacacgttgaaataagtagcagtattgcttctagtgacgaaatattcaatgtgaagatccatcagtaatgaaatggtagaataaaaaccggaatatccatactatgaaagagacgttaaaaagatggttggcttaagaatatcatgatgtaaatgtaactgggcagcataacctcaaaatgcattttaaaacttttttttttcctctttctcttgggtttcaagatgtaaccttgaagcaaactacagaagcctgtttcctttagccttaaaatagactccacgtccctccgtttttctccagatatactcccttcttatttatctaactgtacgctagcatctaattatgtgccttctttgaagatttgggggctaatcttgagacagacagaccaagcctggagacccagctgcagagttccagagatggcctcagagggctaatcagcagccccgccactgttgagatgacgccagaccatgtaccaggtggactgggacccaagatagccactggaacaagatgcacaggcatcgtcctcagcacagttctggcatgcctttcgtatcaagttctccctttttaaactctttccttccccaccaaaatttgaagtagttgctttggatgggaatccaaccacttccccacgactagttttggttaataaagtcactttctttctaacaggcctcacgcttgttaattctactctgcaagcagcgagctttgtgttacataaatgatcacaattcagaatatataaatcataattcagaataagttatacattccctttaaatgaacttatgtaaatgtatttcacgtttgtataaataagagaaaagtacggaaagatgctagccaaatttttaactaggaaggggtgggtgatggaagtggcattggtagaccagaggatgtgactcattattaaaatgtagaaacctcaatatcacttgggttactagcaaaagcatatatgacccatttaattcacatcactaaaataaaatgagtaaataattttataacaaaagagacagtaaacagaacagacttagtagaagcaagctgggtctagctggaacgttgtcacaacgaggaggtttcaaaggatggaagaactcgaaggtgttatgatcctcaggaaggggaccaatatctatgcatgggagcactgaaagtctgcagacgacagagagccagaaagatctccaaatcagctcctgggcctgcctgtgcacgagaggcagtgtcctccttggggagcttgcatgaaaaaaggtggaagcttgcatgcacagagtgagggctgggaggtcttagtttttgaggtaagcctgcatttcagttttaggatcacccattggaatgagtgattcagtccaaggcttggaactcattttctgtttggaatctacccaaatatataagacattctaaaaatggaaaatggagcacccagaaagtgaaaaatgtaattgtaaataaaattaagagatgattttgagaaatgtgggcatttaaaggacagtttttaagatattctgtatgtctggcaattaagatttcaatgaaacacttctgttgccttttactgactgttgatagctttattaatgacagggggtgacacacagatattaaaaatgcagaggagaattactggggagcaaagggaagagccccagggggttttgtttgtttttaggttacgcagagttttttgagaatagtttcacagccacaggaacctaaattttctataaatatttttaaaggaatggatggataatgtatgtctgcataataagtgttatcattcatgatttcctgattgattttactgaaagagctagtgagattcctttaatgctttctttcaatagaattgataatatttttctttccctggtaggacattttgtagtaaagtaaggacactctgaaaggaatatttcagtgccccaaatactgtaaaatgatattgcccccatgaagacgttttgctctctctagtgacagacttaaggatgtctgtctacacctggcccatcaggatagtaattcggatgctgtgacaacttcactgctccattatcttcattctgcagatgacagctggagcaagaggagctaagctggattacaaagccaattaatgtcagggcttagctgtaaatcttcttgtgtaagtcttggatatgttttctgtagccataaattctttttcacgagtgctgagtgtttattctgtagcagtatggaagcatgtagagtaaaacccaagttacttaacattatgcaggagatcatagtaagcaataatttgggatatggattttcctggaaaatttaactcattcagcatgacagactgaaggccaccttcagaacctacgtggacattcaaagacacatttgggacaggtgagacagtacctaaagggggtaatagagggccagagctcaagtctaggtgccaggatgcaggctggatgggtaatgagatgggggatagtcaaagatacactaattgttcaatcctaggtttgcatctggaatgtctgtttgtttttttttccaaatttgtctaagcatttctgtgctctcaggtcatctgtacctttattatacttgcttttgaatgtattggtctcagataacatgacagggcaatgagtctcacatttgtggtttaatattttattgatagtgcagttacttatctgcattttcctagttctcttcatatttctcttgctgtttatcctgtatgccacctctgggctctttcctcgttgagcatatgttgcctgcctcctagctccatgccaggcttctccctgaagtgccagctcaggcaccttgctcctggctccctcaacttggacatcccacgggtactttacatccagctaaaatcttcattgctgcccctaaatcaatggctgttttctcgtgtggggaagtcacatctacccagtcctccatactagagttttctgttttatcccttctcactgagtgcctacattcaaccaatcacaaattttatctgccaaaagtttgtcaaagcagttttaatttttttgcctaactattgcctctgatcagtcctgaatcatcttttcactagattatcttttttaattattatttttgtgggtacatagtatgcgtgtatatttataggatacataaggtgctttttttcatttgttttgcttttttttttttttttgaaatgagtttttctctgttgcccaggctggagtgcaatggcacgatctcggctcactgcaacctctgcctcctgagttcaagcgattctcctgtctcagcctcccaagtagctgagattacaggtatccaccaccacgcccatctaatttttgtatttttagtagagacaggggtttcactatgttggctaggctggccttgaactcctgacctcaggtgatccacctgcctcagcctcctaaagtactagcattataggcatgagccactgtgcccagccatgagatattttgatacaggcatgcaatgtgaaataatcacaacatggaaaatggagtatccatcccctcaagcatttatcctttgagttacaaacaatccaattacactctttaagttattttaaaatacacaattaagttattattgactgtggtcaccctgttatgctatcaaatagtaggtcttattcattctatttttttccctcccatcctccctctaccttcccaacctctgataactattctcctactctctatgtccatgggttcaactgttttgattactagattccacaaataagtgagaacatgtgatgtttgtctttctctgcctggcttatttaatagtttccaattctatccaggttgttgcaaatgactggctctcactcttttttatggctgaatagtactccattgtacatgtgtaccacgttttccttatgcattattcatctgttgatggatgcttaggttgcttccaaatcttaactatgatatacagagctttagcaaacataggagtgcagatatatcttgtatacactgatttcctttcttgtggatatatacccagcagtggtattgcaggatcaaatagtagcttaatttttagtttttgaggaacctcaaaactaaaaaataatcttctccatagtggttgtagtaatttacattttcaccaacagtatatgagggttcccttttctccacaaccttgacagcatttgttattgcctgtcttttgggatacaagccattttacctggggtgagatgatagctcattgtagttttgattcgcctttctctgatgatgagtgatgttgaccaccttttcatatgcctgtttgccatttgtatgtcttcttttgagaaatgtctgttcaaatcttttgcctatttaaaatgatcagattattatatttttttttcctatagcattgtttgagctccttgtatattctgattattaatcccctggcagggtttgcaaatatgttctcccattattttggttgtctcttcactttgttgattgtatcctttttctgtgcagaagcctttttttcagggctagctgaggttttattttggggggaaaaaaataaaagcaattgagttgttttgtagctgaaggcatgggcaaggtggtccccaggcagtaaactcccccgtgggtgggctgagggctagggctgagcctcaggtgggtctcccattccctgtgctccgctgcacagcagcctccctcccaggctctggggcagccaccagaggggcaggctgggaggggctgtcgcagctgttcacttaggaaggacatcagaggactcggataccagcttcccatcgcaggtcttgatcttcttcacaaccatggccctggtggagctggtgcagctgaaggagctggagcccatgtcagagccaaagctggagcccaggccatagctgaggccagggcttgtgagacccccataggccaagctcagaccatctgcataggcgctggtggtctttgtatggatactcatgttctgcatcccagactccaggtggctctcctcactctccagcagcttcctgtaggtggcaatctcgatgtccagggccagcttcatgttcttcagcttctggtactcatgcagctgccacgccatgtcctgcatggcctgttgcagggcagcctccagcttggacagcttggtgttggcatccttaatggccagctccccacgctgcttgacatctgcgatggtggcctccagggaagccctctggcttttgaggccctcagtctcagcctggggctggctgatgttccagttcatcttggagatctcagtctttgcatctgcagctccttatacttgatctggtacatgctcttagcctcagcccggctgaggttgggtgatctcctcatactacgccttgacctcagcaatgatgctgtccatgtccaggaagtggctgttgtcctggacagcaccatagatgtgtccgagatctgggactgcagctccrrggtctcctcttcatacagctgcctgaggaaattgatctcgtcagccagcccttccagctgagactacagctctaccttgttcacgtaagcatcatccatgtccttcctgatgaggataaattcattctccatctctgtacacttattgatctcatccttgtacttgttcttaaagtcctccaccagcccctgcatgttgccaagctctgcctttagcttcagcttctcctggaccagagtgtccggctgccccctagggttgttgatgtagctcttgaacatgttgcccatgttgctccaagccatcttctgctgctgcaggaggctccacttggtctctagcatgttgttctgctgctccaggaaccgtaccttgcctatgaaggaggcaaacttgttgttgagggtcctgatctgctccttctcctgctcctgcacggcctggatgttggggtccacctccaggttaaggaggctcagcagtctctggttgaccacaacggcggtgatgcctcccatgccgccggccccaccagagcctccacccaggccacccccggaagctgctgctgcccwtagaggtggacaccttataggacttctgggtcaccctgatggacatggtggaggcaggagtagaggcaagtggattgaaccaggcagagattccagaaggagcagagaagctgcttcttggtcactgtgcagaagctttttgacttgatatgatcccctttgtccatttttgctttggttgcttgtgcttgtggggtattgctcaagaaatttttacccagacagaccagtgtcctggagagtttccccaatgttttcttgaagtaatttcatagtttgaggttttctatttaatttttaaatcgattttgctttgatttttatatatggtgagagatagaagtctagtttcattcttctgcctattgatatcctgtcttctcagcaccacttactgaagaaactctttttcccagtgtatgttcttggcacttttgtcaaaaatgagtttgctgtaggtgtgtggatttgtttcttggctctctgttctgtttcattgctctgtgtgtctgtttttatgccagtaccatgctgttttgcttacaatagctctgtagtataatttgaagtcaagtaatgtgattccttcagttttgttccttttgcttaggataactttggctattctgggtcttttgtggtgccatgtaacttttaggattcttttttctatttcccagaagaatgtcattggcattttgatagagattgcactgaaactgtagattgctttgtgtagtatggacattttaacaatattggattttatccatgaacatggaatatttttccttttttggcattctctttgatttatttcattagtgttttatagttttcattatagagatcttttgcttctttgggtaattcctaagaatttaattttatgtgtggctattgtaaatggaatttttaaaaatttcttttatttatttcacattgttctctgttggcatttagaaatgctactgatttttgtatgtagattttgtgtcctgcaactctactgaatttgggtatcagttctaatggtttcttgtggaatcttaaggtttttccaaatataagatcatatcatctgcagacaaggataatttgacttcttcctttacaatttggatgccttttatttctttctcttttctgattgctctagctaggacttccagtactatgttgaataacagtggtgacatcaggcatccttgtcatgttcccgatcttagaagaaaggctttcagtttttccccatgtagtatgatactacctgtgggtctgtcatttatggcttttaataaaagccatatgttgagatgtgttccttttatccccagtattttgagaatttttatcatgaaggatgttgaattttattaaatgctttttcagcatcaattgaaatcatcatatgatttttatctttcattctgttgatatgatgtatcacattgattgacttgaatattttgaatcatccttgcatcccagggataaatcccactttctgatgtaatgttgaattcagtttgctagtattttgttgaggatttttgcatcaatattcatcagaaatattggcctgtagttttctttttttgatgtgtctctggttttggtatcagagtaatactggccttgtagaacaagtttggaagtattccctcctcctctgtcttttggaatagtttgagtagggttggtattagttcttctttaaatgtttggtagaattcagcagtgaagccatcaggtcctgggcttttctttactggaagattttttattatggctttaatcttgttacttgttattggtctgtttgggttttggatttttttgcctggttcaataatggtaggttgtatttatctaggaatttgtccacttcttctagactttccaatatattgacatatagttgctcatagtagccactaatgatcctttgaacttttgcagtatcagttgcaatgtttcgtttttcatttatggttttatttggatcttctctctttttttctttgttagcctggctaaagatttgtctattttgtttgacttttcaagaaaccaactttttgttttattgatcttttgtatttttttcatttcaatttatttatttctgctctgatctttattattattttcttctactaattcttggcatatagaaatgctgctgatttttgggctatcatgaagattaagtctgatgtttctttgttgattttctatttgaagacctgtccagttctgaaagtggggtactgaagtctctagttattattgtattgaggcttatctctctctttggctctaataccatgtgctttatcttaatatatctgggtgctccagtgttgggtgcatatatatttaaagttcttatatcgtcttgctgaattgacccctttatcattatatagtgacctttttatatcttcttatagtttttgtcttgaaatctattttttctgatataagtatagcaactcctgccattttttgttttccattagcatagaatatcttcttccatccctttattttcaatctatgtggatctttatagtgaagtgtgtttcttgtaggcaacatataaatgagtcttgtttttttcatccattcacccagtctgtgtctttttgttgcagagtttagtccctttacattcattatatgtatgtatgtatgtatgtatgtatgtatgtatgtatgtatttattttgagactgagtttcactcttgtcacccaggctggagtgcaatggcacgatctcagctcactgcaacctctgcctgtcaggttcaagcaattatcttgcctcagcctttggagtggctgggattacaggcacacaccaccacgcctggttaatttttgtatttttagtagagatagggtttcaccatgtttgccaggcttgtctccaactcctgacctcccaggcaggtgacccgcccacctcagccttccaaagtgccgggattatacacattgagccaccgctcccggccaatgttattatttataagtaaggacttactcctccattttgttatttgttttctcgttgttttgttgtcttctcttccttctttcttttcttcctatcttcctctagcagaggtgattttctctggtgatacgttttagtttcttgctttttcttttttgtgtctccactgtgtgttgttttggtttgatattatcattttaacctcataacaacttaacaccaattgcataaacaaagagacaaaaagaaaactaataaaaactctataccttaactttatcccctggcattttaactttttattgtgtctatttatatcttattgtactcactatgccttgaaaagttatttcagttattatttttgattcgttcattgtttagtctttttacttagggtaagagtagtttacacaccacagttacactgttataatattctaggttttcctgtgtacttactattaccagtgagttttgtaccttcaggtgattatttattgctcattaatttttttttttttttttctgattgaagtactccttttagcatttcctgtaggacaggtctgctattggtgaaattctccagcttttgtttgtctgggaaagtctttatttctccttcatgtttaaaggatagttttgccagatacactattataagataaaagatttttccttcagcactttaaatatgtcatgccattctctcctagcctgtaaggtttccactgaaaagtctgctgccagatgttttggagctccattgtatgttatttatttctttccttttgctgcctttaggatcctttctttatccttgacctttgggagtttgattattaaatgccttgaggtagttttctttgcattaaatctccttggtgttctgtaaccttgttgtagttgtatattgatatctttctctaggtttgggaagttctctgttattatccctttaaatacattttctacccctatcttgtcctttattttctctttaaggccaataggccaattactgttttttttgtttttgttcttttttttttgagatggagtcttgctctattgccaggctggagtgcagtggtgttatctcagctcactgcaacctctgcctccctgattcaagcgattcttctgccttagcctcccaactagctgggattacaggcacccaccaccacacctggctaatttttgtattttttgtagagacggggtttcaccatgttggccaggatggtctcgatctcctgactctgtgatccacccacctcggcctcccaaagtgctgggattacaggcatgagccaccgcacccagcccaattactcttagatttacccttttaaggctattttatagatcctgtaggcaaggcataatttattgtggtttttttttttgtctcctcagactctgtattttcaaatagtctgtattcaagcttactaattcttacttctccttgatcagttcagctattaaaagactctgatacattcttcagtatgccaattgtgtttttcagctccagaatttctgcttgattctttttaattatttcattctctttgttaaatgtatctgataggattatgagttgcttctctgtgttatcatgaattttctttgtgttttcttagcacagctattttgaattctctgtctgaaaggtcacatagctctatttatccaggattggtccctggtgccttatttagttcatttgatgagatcatgttttcctggatggtgttgatgctagcagatgttctttggtgtctgggcattgaagagttgggtacttattttagtcttcactgtctgggcttatttgtagccatctttctcagaaaggctttctagatatttaacaggacttgggtattgtgatctaagctgtatctactttagggggaaccccaagcccagtaatgctgtggttcttgcagactcatagaggtgctgctttgatggtcttggacaagatctgtgataattctcttgattaccagacagagagtcttgttctcttctcttgctttctctttttttgtttttttttttttgttttttgttttttaagatggagtctcgctctgtcgccgaagctggagtgcagtggcgcgatctcagctcactgcaagctccgcctcctgggttcacgccattctcctgcctcagcctcccgagtagctgggactacaggcgcccaccactacgtctggctaatttttttgtattccttagtaaagacagggtttcactgctttagccaagatggtcttgatctcctgacttcatgatccgcccgcctcggcctcccagagtgctgggattacaggcgtgagccactgcgcccggctctcttgctttctcttaaacaaagagtttctctctctctgttctgagccacctaaagcttgaggtggagtgacacaagcacccctgtggccaccaccactatgactttgttgagtcagacatgaagccaacaaagggctgagtctcacccaagtcctgctgtaaccactccctggctactgcctatgttcactcaaggccctggggttttgtaatcagtaggtgataaaggcctgttttttccccttcagggcagtgaggtctgccaggctctctgggtaggtccagaggtgccatctgggggtcaggaactagagtcaaaagtcttagacatcaacctggtattgctgctgagctgacactcaaaacacaaaatacagtccttcccagttttctctcccctttccaaaggcagaggagcctcaccctgtaatcaccactaccccagaccatgaggagtactgccagactagccctgatgttcccttaaggcccaaaggctcttaagtcagcttgtagtgaatgccacctggtctgggactcacccttcagagcagtggacttcccactggcccagggcaggtccagaaatgccatccaagggtcaagtcctggaactggggaccccaagagcacacttggcat

SEQ ID NO: 96300 - DNA, 32879 bp, Homo sapiens
caagactccatctcaaaaaataaaaataaaaataaatgttctggaataagatagtggtgaaaaaaaaagaaaaagacaggttggttcagcaagtgcaaaggccacattggtggaacagcaagtgcaaaggtcctggggccaactcaagcttggtatgcaataaacagaaagacagagagagtagatggatatagcaaaacatggagagggtgatacaagatgaggtttgagagaaagctgagaccaggtcattcagggtcttgtggagtgcttggattttattctgtgcaagggaacggcattagagtttttttgtttgtttgtttttgagacagagtttcactcttgttgcccaggcttgagtgcaatggcgcgatctcggctcatcacaacctctgcctcccaggttcaggcaattctcctgcctcagcctcccaagtagctaggattacaggcatgcaccaccacacctggctaattttttttttttttttttgtatttttagtagagatggggtttctccatgttggtcaggctggtctcgaactcccgacctcaggtgattcgcccacctgggcaaatggtcttgatcgcctgacctcgtgatccgcctgccttggcctcccaaagtgctgggatcacaggcctgagccactgtgcccagctaaaaattttttaaaattagctaagtgtagtggcatgtacctgtggtcccagatactctggaggctgaggagggaggattgcttgagcccaggaggttgaggctacagtgaaccatgttcatgccactgcactctaccctggtgacagagaaaaaaaaaagttgtctggctgggcatggtggctcacacctgtaatcccagcactttgggacgctgaggcaggtggataacttgatatcaggagttctgccagacgcggtggctcacgcctgtaatcccaggactttgggaggccaaggtgggcggatcacctgaggtcaggagttcaagaccagcctggccgacatggtgaaaccccatctttactaaaaatacaaaaattagccgggcttggtgaggcatgcctgtaatcccagcaactccggaggctgaggcaggagaatcgcttgaacctgggaggcggaagttgcagtgagctgagatcgcgccattgcactccagcttggaaaaaaaacaaaaaaggaattctagaccaccctggccaacatggtgaaaaccctgtgtcaattaaaaaaaattacaaaatattagcctggtgtggtggcacaagcgtatagtcccagctacttgggaggctgaggtgggtggatcacttgaggtcaggagtttgagaccagcctagctaacatggtgaaaccccatctctactaaaaatagaaaaatattggccgggcacagtggctcatgcctgtaatccaaggactttggaaggctgaggcaggtggatcacctgaggtcaggagttcgagaccagcctgaccaatatggtgaaaccccatctgtgctaaaactacaaaaattagccgggtgtggtgacatgcgcctgtagtctcagctactcgggaggctgagaccggagaattgcttgaatcagggcggtggaggatgcagtgagccgagattatgccactgtactccagcctgggcgacagagcaagattttctctcaaaaaacaaacaaacaaacaaaaaccaacaacaacaaaaaagttgtctgggtggaatagcacaatggcagggcatagagcagaagaggtgagtttaagggatttatgtacatagtttggaacagaagagcacgtttgtgttgctattgggagtgatctagtagagagagacagatcaatgatcccagacagagggacagtgatgcacagagggagggccttaaaagagaggagcgtattaggtccacatgtagagggatgaattagtccagccaaaaagggtacctttgctgcaggatgaaacccctgcccaggagctccatagcagaaggaactgccacactgttactgttctggggcggccactattgcttagcaacctgtgcttaataagatgtttcaactgaattcctaataaacggccatttcaacttacgccaacggttcctgtcactggtgttcctgctctgcttatctcatacgctgaaactggatgctcaggtttttacttccttgtactgttgatgtatgcattttttgcttttgttttttttttttctggagacggagtttcgctcttgttgcccaagctagagtgcaatggcgtgatctcagctcactgcaacgtctgcttcctgggttcaagcgattctcctgcctcagcctcccgagtagctgggattacaggcatgcgccaccatgctaggctaatttttgtatttagtagagacggggtttcaccatgttggtcaggctggtctcgaactcctgacctcagttaatccaccaacgtcagtctccctaaagagctgggattacaggtgtgagccaccgtgactggcctaattttgtatttttagtagagacaaggtttctccgtgttggtcaggctggtctcgaactcccaacctcaggtgatctgcccgcctcggcctcccaaagtgctgggattaggattacaggcgtgagccactgcgcctggctttttttttttttttttaaaatagagtctcagcccagcacggtgcctcacgcctgtaatcccagcactttgggagaccgaggcaggtgggtcatgaggtcaggagttcaagaccagcctggccaagatggtgaaacaccgtctctactaaaaatacaaaaattagctgggtatgttggtgggtgcctgtaaccccagctgctcaggaggctgaggcagagaattgcttgaacccaggaggtggaggttgcagtgagccgagatcatgccactgcactccagcttggacgacagagtgagactccgtctcaaaaaaaaaaaaaaaaaagaaagaaagaaagaaaagaaacagagtcaagctctgtcatccaggctggagtgcagtgacacaatctcagctcactgcaacctccgcctctgaggttcaagcgattctcctgcctcagtctccggagtagctgggactatgggtacgtgccaccatgctgggctaatgttttgtactttttttagtagaggcagggtttcgccatgttggacagggtggtctagaacccctgacctcaagtgatccacttgtcttggcctcccaaagtgctgggattacaggtgtgtccaccacatccagccacaagaaacatctttttttcttttccttttttttttttttttttgaggtagggtcttgctctgtcaccacccaggctggagtgcagtggtacaatcacagctcactgcagccccaacctcccagggtcaagtaatcctcccatctcagcctcctgagtagtggggaccacaggtgtgcgcctccaggcatggctattttttgtattttttgtagagagggggtttctccatgttgcccaagctggtcttgaactcctggactcaagcaatccacccaccttgtcctcccaaagtgctgggattacaggcacaagtcactgcacctggcccccttgcttcttctcttgatccacctccagttcattcttcgcacagacactaaatgtaatacagacatcaaatcaatttactcgcctgcttaaaaccttcaaaggttttccattgtgctctcctgctaactggaacttttctccacctcagtctctatattctgggtctctgcctgaaatgctcttcccccacaattcccttcccagaaatagctccttcttatcctgcaagtaaaggtatgttccctacctagcaggcctttccccccttgcctaggctccatcacaacacctgctaaattcctcctcagttggaattagatgtttgataagtcttcactgtctccctgcaggaggtaggaagctctgtgaggacagaaattcacctgtgttttcccagagtccagcaccgggcctggtgcacggtaggcactaaataaatatttgatgaggccaggcgcagtggctcacacctgtaatcccagcactttgggaggccgaggcgggcagatcacctgaggtcaggagttcgagacttgcctggctaacatggtgaaacgccgtctctactaaaaatacaaaaattagctgggcgtggcagcaggcacctataattccagctacttgggaggctgagacaggagaatcgcttgaacccaggaggcacaggtcgcagtgagctgagattgcgccactgcactccagcctgggcaagaaagagcgaaactccgtctcaaataaataaatagataaatatttgatgaataagatgatttgtcactagcagattctctgtgaaatgtatggctgtgcccctaaagtattaataaaagattaagcaactaataaaggttatttttctcaaccggttgctaccatcccagtgtctaataggatgatcataactaccatatactgtgcccagtactgcacacttattatttattttatttatttatttttgaaactgactgtcgcccaagctagagtgcagtggcatgatcttggctcactgaaacctctgcttcccaagttcaagcgattctcctccctcagcctcccgagtagctgggactacagacgtgcaccaccatgccaggctaattgctgcatttttattagagacagggtttcaccatgttggccaggctggtcttgaactcctgacctagtgatccacctgcctcgacctcccaaagtgctgggattacaggcgtgagccaccggcgcccggcagtttttgcattttaatacatagcactaccaaccattcagtgatttcctcttgatttctccctctccatcccttattgttcaatccatcagcaaatcccgtttattctccaaaagctacctcaaatattttttacttctatttatttttttgagactgggtctccctctgtcgcccaggctagagtgcagtggcacgatcacgactcactgcagcctccacctcctggtggagcctcacacgtcagccaacccccaaaccccgccccagtagctgggactacaggagtgacaatcacacggataattaaaaaaaaaaaaaaaacttttttttttttttttgtagagacagggtctcattatgttgcccaggctggaatttttacttctttttatccctactgccatcacttaaatccagaccaccatcatatcaacaccctggatcccactgaagctcctagctgggttctcctcttaccctatcctattatttttctacgtagcaatctttttaaaactgtacattggatggactaactcccttgtgtcactgatttgcaggacgagggcttttacccatatgagccacttctgtttcctcttcccctggttgttttataagactcctggggagggggcgggtgacccaagtagaagtgagagagttagagaaaggccaggataagaaagttattcattcaaataatgtaccgcgtgcccctgtgctctgcgcactgtgggtacagcagtgaaatcaaggaccgcacagttcgggcgctacgagagctgccgttccaattccatccgaaggaagggagacaacgctttcccgcgcggacgagcggccaggcgcggcgctaactgcttggacgccccgcctgccaccgtgcctcagctcgcctcttctgcacaacgggactctgccccacagggacaccgggaaggtcccgacccgagcgctcagtgggacggggtcgcaccaagagtccgcgcggaactcccgatctgggcggggcccaaaggtcacgtggccgggaaggcgggcgcgcgggctgcgagcaccaaccgccggccgccccgcgctgcgtcgccccgcctcccccgccccacccccgtcgcccccagcgcgtgcccgcccggcgccctctagggtggaaggctgcgggcgtcctaccagtgccaggactgccagagcgggaggagcgcggcgcgggccagccgggactgctggacagcggggtccaggctagaggcgagcgagcggtcagtgacggctgtggaggagggaggcgctgggcgtcagcgcgggacccgagcctctggaccactgagctggggggctggctgaggtgggtctcccgccctgagggcgcgccttagggaggggacaggggccggtgggacccttgctttgtctcagtcgcactgaggtgagggggctgcactcggccgagcagcgaggaccgtgcccagctcagagagagccctcagagtgtccgggctggattgcggccgcggtgcgggagaagtcggaggagggagtgacaggtgaccgggctggcagggcaactgccattattaagcactcggccgcccgggtgcggttgccacctcctccttcccgagctggcagcccaggccaccagggacacgcacctgtcctaagagggtgtaatctttgaggcagaggtgggacacgaacccgggacggtttgcccttgggccactcccttaggctgagggaaaagtgtacttaaaccaggctttgagaattgggcagagtttgaagcgcagagatcaccgagcccttcgttggctgtcaggactttagaaagacgtttggtctctaaaagaccacactttcctcctccccaaaagtggctggacctgtgaacactaattactcatgtgtaaggagtgctttgcaatctgtaaagcactttccattcyggtgtcgtagataattcgtcacaatgaacttgccaagtaagcgttttttttatttaccttttttacagatgaagaaattttgtcccagagacgtttattaaatcagggagtagcaatagagccttactcttttttttttttttttttttttgagacggagtctcactctgtcgcccagggccggagtgcaatggcgccatctcggctcagtgaaacctctgcctcccaggttcaagcaattctccttgcctcagcctcccaagtagctgggactacaggcgccagccaccacacccagctgctttttgtgtttttaatagagacgggggtttcaccatgttggccaggctggtcttgaactcctgacctcaagtgatctccccacctcggcctcccaaagtgttgggattacaggtgttagccaccgcacccagtggagccttactctttttttttttttttgagacagagttatgctcttgttgcccaggctggagtgcaatggtgcaatctcagctcactgcaacctccgcctcccgagttcaaacgattctcgtgcctcagcctctcaagtagctgggattacaggcatgagccaccacgcccggcctttttttttttttttttttttttagtagagacggggtttctccgtgttggtcaggctggccttgaactcccaacctcaggtgatccgccttccacggcctctcaaagtgctgggattacaggcatgagccaccgcgcctggctgagccttactcttatacatcaaatgttttccacgataggaaaccacctgggatgaccatcaagccccaaactcaaacatcctgtgatttcatcatcagagctcctggcttagggcacaattcttggctggatctgcctgccactccccagctacmaacaaccgtatctcggcaacacaaccaccctggcacagcacttttaattatttgttaaatgtttcttactgggttgggctaaaccaactgtgaggagtcctttaggcagtgtcaaaacttggagacagttggatgggcttgattgaattctgaaaattccccgagtgtactggggtttctacccaaagtgacgattactttgagagtattggtgataataattttttgtccttcctattgacaggtccacctcctaacaaattattggaaggaatatgagaaaagtaagtagggattttgaagtatcagttaaaagacccaaaattgtttatgtttagaataatggtagttaatttggtgatgttatttctggatgtataaggttaattggcaagtgcttatcaaatgcrtgtgtgtgtgtgtgtgtgtgtgtgtgtgtgtgtgtgtgtgtgtgtgagatacggagtctcattcactctgtcagccaggctgaagtgtggtggcacaatctcagctcactgcaaactgtgcctcccaggttcaagtgattctcctgtctcagcctcctgcgtagctggagttacaggcgcccgccaccacaccagactaattttttgtattttagtagagacaaggtttcaccatgttggccaggctggtcttgaactcctgacctcaggtgatctgctcacctcggcctcctaaagtgctgggattacaggcgtgagccaccatgcccggctcccaaatgtccgtttttgaggaatgtatttattaatacatgctgagaggtctacacaggtggtagtccatcaccacaaacactgacagtataccaagagatgctatttttttaaaatccccataggactgtgaaagggaagagaagccggctgttacccttttgcctatgatatgtgtcaggtgctggggctaagtgtttttcacttatcctatagcttgtttatcctcccaacaaacttgaaagacagaagttatttgtttgtttatttattttgagggtttcactgttgtccaggctagagtgcagtggtgtgatcatggctcacttcagccttgacttgggctcaagtgagcctcctgcctcagcctcctgagtaactgggaccacaggtgcatgccaccacgttcagctaatttttttttttttatttttaagaaatgcagagtctcactgtgttgctcaggcaggtctctagactcctggactcaagccatcctcctgcctctgcctctcaaagtgctgagattacaggtgtgagccactgcgctcaggttaaagtgtaagtcttgccgatgctatatctaagacacatcccagatctgtccatcgcctactaccccagatgaagtcacttgtcatttcttgcctgcagtcctataatagcttcctaattttctgcttcctttcttgccaccctaaaacctattctccacacaacagcctgactgatttatttaaaatgtaagacaaatcatgccacccttctcttaaagtgctcccctagcccctcattgcgcttaaaataatacctaaggccaggcgcagtgcctcacgcctgtaatcctagcactttgggaggcagaggcaggaggatcacttgaggtcaggagatcacttgagttgcagtgagctgagattgcgccactgcactccagcctgggagacacagcgagactccatctacaaaataataatgataatcatcatcatcatcatcatcatcatcaccatcatcatcatcatcatctaattccttgccttgacctatcaggacctactgatctgtcaactagttgctttacaacttcattttgcatcgttttcttcctctatcattgaattccagccttgtttccctccctccctccctcccttcctccctcccttttttgagacagggtctcactctgttgcccaggctggagtgcagtggtgcgatctcagctcactgcaacctccacctcctgggttcaactgattctcatgcctcagcctcccgagtagctgagattacaggcgtgcaccaccatgcccggctcatttttttgtattcttagtagagacagggtttcaccatgttggccaggctggtctctaactcctgacctcaaatgatccacccaccttgacctcccaaagtgctgggattacaggcatgagccactgcgcccggctgttacccttttttctgtccctgggatgtgctaagcttgttctcgccctggggagtttgcattcattgtttctttccagaatgttattttcctagatattttcatgtctggccccttgctatttaggtctcagattaaatgtcatctccggagcacctaagtgaagtagttcatgaagttctctatatctcctttttaaatgttcttctttgaacttaccataacctaatatttagtgctagtttattttctgcttcccttcactagaatgaaagctccttaaattgtaatagctaaaacttaatatgctttttctttttctttcttttttttttgagacagggtcttgctctgttgcccaggctggaatatgtcaacccccacttcccgggctcaagtgatcctcccacctcagcctcccaagtagctgggaccagaggtgtgcaccaccatgcctggctagttttttgtattttttgtagagacagggccttgacatgttgcccaggctggtctcaaactcctaggctcaggtaatgctttcgccttggcctcctaaattgttgggattacaggtgggagcccgcacctggctaatgtttaatcttgttaggcatttagaatcgggcctattactctagaaggtggctacttttattatgcccattttacagatgaggagactgagtcttggtaggttaagtaacttgcacatggtcatacagttagttagtggcagagctgggattttttattttttatattttgaaacggggtctcactctattacccaggctggagtgcagtggtaagatcattcattgctcactacagccttgacctccagggctcaagccatcctcccaccttagcttccccactagctgggactatgggcatgtgccaccatgcccagttaatttttctttttctttttcttttttttttttgtatagacagtctcactatgttgcccaggttgctcttgaactcctgggctcaagtgatcctctcacctttacctcccatagtgttggaattataggcattagccagcatgttcagcccagagctgggatttgaatccaagcagactagcttcagcatccgtgctcttaatcaagcgagagcaggtccttatcttctccacctctgtaatcaggcaccgtgaatgtaacatggcatttagcaggctctcaataaaaactgtgaagtgaaagaatgtaatcacaagagaaaaccaaattataaacaaaaacctaggaactattagccttgatttcactttctcctacttgcaaatctgtgagcaagttctgaatctgaactacttctcaccacaaaacacatctccagtatgtcccctttctgcatccccactgctaccacccttgtccagctcctgagtggcttgctcctgtgttctgctaccaccacaactcccaacagtttcccaaatcgctggcggaggggaactcctctcactgattggaaatctgctttccttattaggctaaagcaaagaatcaagtgtgttattagggctgtaatgtctatcctgagagaaaattttttggctgtcttataccctaacagcatgtccatttatccctattactggtttcagtggggtccgattcatgtgtcattgcctctcataaaggtgcttcaactgaagtttactttgttgttacatcacaagaccttttaagcaacagccaagtggaatgtgtgtagactgaacttggttgtccactacctcaactgtggtgcagtgtgggaatttctctcatatctcaattccaaaatgtaaaaaatacttgttatttttgttctttttttttttttttttaaagagacaaggtctcactctgttgctcaggttggagtacagtggtgcaataatagctcatgtaaccttgacctcctggtctcaagtgatcctcctgcttcaccctcccgagtagctgggactgcaggcctgcaccaccaggctgggctaattaaaaaaaaawtttttttggctgggtgcagtggcttatgcctgtaatcccagcactttgtgaggctgaggcaggcggatcacctgaggtcaggaattccagaccaggctggccaacatggcgaaaccctctctctaccaaaaatacaaaaaattagccggacatggcatgtgctgataatcctagctactcgggaggctgaggcaggaaaatcgcttgaacctgggaggcagaggttgcagtgagccgagatcgagccactgcactccagcctgggtgacaagggcgaaacttcatctcaaaaaataaagaaataaaataaataataaaagaaaaaaaatttgttgtagagatggggtctcgctgtgttgctcaggcttgtcttgaacttctgagctcaagtgatcctcccacctcggcctcccaaagtgctgggattacaggcatgagccactgtgcccggccaatagctgattccgcccccacacccatcttttggatacaatcatataactgattgttttgaacgctttccttccgtggctaagaagctaaaagtcaaatctgtgaccctgtccttgcaggtgtactggatctgatggcatgtattttgaatactaacttaatccctgtttcagcttaatttttaaaatatagaagtgtaaattgtatttaatatttttgcaacatattttaccattatgatttctataatcataacttagttctatatgctctagaacttcatataaatagaatcatgcagcatgtactcttttgagttctccttcacacagcataatgtctttcagatttagttatgtcgatgcacatattataatcattcatttttgctgctgtgcagtattccattgtaccaatttgtttatccattcatctgttgatggacatttgagctgtttccagttttagctacggggaataatcctgctgtaaacatcctttttgtggacaaatatttttattttcttgaataaataccagaagtagaattgctgggacatagggaaaatgaatgagtaactatataagaaatggccagcagggcgcggtggctcatgcctgtaatcccagcactttgggaggctgaggtgggcagatcacctgaggtcaggagtttgggactaacctggccaacatggcaaaaccccatctctactaaaaatataaaaattagcccagcatggtggcaggcacctataatcccagctacttggggggctgagrcaggagaatcgcttgaacccgggaggcggaggttgcagtgagccgagatcgcgccattgcactccagcttgggcaacaagagcgagactccatctttttttcttttttcttttttttttttttttttgcctttgaagaaatcgtttttatggaaaacattattatgccaaaaggcaccatctctgaaaacacaaactacaatcatcctcctgaggcagattccactgggactgcattcaacttagagcaaactgttaaacaaactgagacaaaatgggaatacaacagcatgggcactgacctgtcccccaagcccaaaagcttcaattacccattgctctcgtccccaggtgatcagtttgaaattcagctaacccagcagctatggtccctcatccccaatgaggatgtgagaaggttcatgtctcatgttatctggaccttgaaaatggaatgttcagaaacacatgtgcaagggacctgtgccaagctcatgtcacgaacaggcctcctgatgaagcttctcmgcgagcagcaggaagcaaaggcatccaaggcagaatggtctgtagaccaatggaaaactgatgagactccatcttaaaaaaaaaagaaaaaaaaaatggccagcaggatgcagtggctcatacctataatcccagcactttgggaggctgaggcaggtggatcacctgaggtcaggagttcgagcccagtctggccaacatggtgaaacctcatctctactaaaaatacaaaaattagccaggcatggtggcttgtgcctatagtaccagctactggggaggctgaggcaggagaattgcttgaacctgggaggcacaggttgcagtgagccgagatcacaccactgcatacttcagcctgggcgacagagcaagactccatctcaaaaaaaaaaaaaaaaaaaaaaaaaaggctgggtgccatggctcacgcctgtaatcccagcaatttgggaggccgaggcgggcagatcacctgaggtcaggagttcgagactagcctgaccaacatggagaaaccccatctctactaaaaatacaaaattagccaggcatggtgatgcatacctgtaatcccagctactcgggaggctgaagcaggaaaatcgcttgaatctgggaggtggaggttgcagtgagctgaaatcacgccattgcactccagcctgggcaacaaaagcaaaactttgccttaaaaaaaaaaaaaagaaatggccaaacttttttccaaaatagtttcactatttttacattctaccagaattagatgagagtttccattgctttatatcattactaacatttggtattgtccaacattttgttttagccttttttgtgagtatgactggtgtctcattgtggcattcaaatttattgagatataatttatatacaataaatccatcttttttaaatcaatgagttttgacagacgtacacagttgtgaaagcaccaccatcacttccatcaccccaaaaagctcctttgtgcctcttgccctttcccaactacttccccctcgaaaccactgctttcctttattgtcttttctcgaaatccatatgggatttactcttttgcatctggcttttttttttcttttttttttttttttttggctagttatgattactcattttattttattttatttttgtagagacaagtgtcactatgttgcccaggctggagtcaaactcctggtctcaagcgatcctcctggctcggcctcccacagtgctgggattacaggtgtgaggcactgcacccagcaaatctggctcttttcatttagcataacgctttcagattcattcatgttgtttatttgctctttgttccttttgattgctgggtgataatgcattgtttgaatgtatcacgattgtttacgctgttagtagctgttaggtattccagtggttcctatcgtttggytatttttaataatgctatcaaatgctatcaacagtcacatgagggtctttgtgtggacatatgtttttatttctcttgggtaaatatctagacatgagattgctaagtggtatgttaaatgtattttatttttgatacatatctatatttattttaattttttgagagggaatctcactctgtcatccaggctggagtgcactgctgcgatctcggctcactgcaacctccctctcccgggttcaagcgattyttgtgcctcagcctcccgagtagctgggactacaggcgagtgccaccatgttgggstaattttgtatttatagtgcagacggggtttygccatgttggccaggctggtyttgaactcctgacctcaaatgatccgtccgcctcagactcccaaagtgctgggattacaggggtgagccaccgcacctggcctgaattgcttatacttttgatgaacatttgtgtatgtgtttttgtgtgaacatatgttttcagttctcttgggtgtatactcaggagaattgctgggtcctatggtaactctgttgaactttttttttttctttttttttttgagacggagtcttgctctgttgccaggctggagtggagtggcacaatctcagctcactgcaacctccgcctcccgggttcaagcaattctctgcctaagtctcccgagtagctgggactataggcgtgtgccaccgcacccagctaaaatttttgtatttttagtagagatggggtttcaccatgttggtcgggatggtctcgatctcttgacctcgcgatctgcctgcctcggcctcccaaagtgctgggattacaggcgtgagccaccgcgcccggccaactctgttgaactttttagaggaactgctagactgttttccattttccatgatcactagcagtgtatgagggttctagtttctccctattctagccaatacttggtattgtcctttggactactgccatctgagtgggtgtgaagcagtatctcattttggtttgacctgcatttccctaatgactaacggttttgagcatcttttggtgtgcttattggccatttgtatatgttctttggagaaatatctactaaaatcctttgcccatttaaaaaactatattactccttttttaattgttgagagtaagtttgtttttctttttytttttttttttttttttttttgagggggagtcttgctctgtcccccaggctggagtgcagtggcgagatctctgctcatgcaagctccacctcccgggttcacaccattttcctgcctcagcctcctgagtagctgggactacaggcgcctgccaccacgcctggctaattttttgtatttttaatacagacgggttttcaccatgttagccaggatggtctcgatctcctgasctcgtgatcccaaagtgctgggattacaggcgtgagccaccgtgcctggccttttttttttttttttttttgatactgagtcatgctcttgtcacccaggctggagtacaatggcgcgatattggctcactgcaacctttgcctcccgggtttaagcaattctgctgcctcagtttcctgagtagctgggattacaggcacctgccactgtgcctggctaattttttttttttttttagttgagacaggggtttcaccatgttagccaggctggtctcaaactcctgacctcaggtgatctgcccgcctcagcttcccaaaatgctgggattacaggcatgagccactgtgcccggccgaaatttttaagtatagtctagatacagaaatatgtgatctgcaaatatatgctcccattctgtatatctttttacttctttggtcatgtcctctgatgcatgaaagttttgaggtctaatttgttttttctttggttgcttgtgctttttaggtgttatatctaagaaaccattgcctattccaagatcatgaaaatttataactatattttctttttttttctttctttcttagatggagtttcactcttgtcacccaggctggagtgcaatagagcgatcatggctcactgcaacctctgccccccgggttcaagcgattctcctgcctcagcctctcaagtagctgggattacaagtgcccaccaccacgcccagctaatttttgtatttttagtaaagatggggtttcaccacattggccaggctggtctctaactcctgacctcacgtgattcatccatctcagcctcccaaagtgctgggattacaggcatgagccactgtgcctggcctatacttatattttcttctgtgattttaatattttagtgtttatgttttggtctatgatccattttgagtaaatttttatatttggtataaggtaggggtccaactttatttatttttgagatggaggcttactctattgcccaggcaggcatgcaatggtgcgatccagctcactgcaacctctgtgtcccaggctcaagtgattctcccacctcagccatctgagtagctcggattacaggccccatcactatggtaatttttaaatttttagtagagacggggtttcaccatgttggccaggctggtctcgaactcatgacctcaagtgatctgcccgcctctgccctacaaagtgctgggattacaggcgtgagccaccgtgcctggcctccagctttattctttttttttttttttttttgagacagagtcttgttctgtcacccaggctggagtgctggagtgcagtggcgcgatctcggctcactgcaagctccgcctcctgggttcacgccattctcctgcctcagcctcccgagtagctgggactacaggcgcctgccaccacgcctggctaattttttgtatttttagtasagatggggtttctccatgttagccaggatggtctcgatctcctgacctcgtggtctgcctgcctcggcctcccaaaagtgctgggattacaggcgtgagcgaccatgcccggccaactttattcttttagatgtggatgtctagttgttccagaagtatctgttaaaaatgttactctttctccattggattattttggcaaccttataaacaatcaattgaccataaatgtatggatttatttctggattgtcagatctattccagtgatctaaatgtctgtccttatgccagtaccatagagtcttgattactatagcttcatggtaagttttcaaatcaagaagtgtgagtgctccaaatttgtttttatttttcaagattattttggctgttctggcttctttggattttcatatgtattttagggtcagcctttcagctgggcatggtggctcacgcttgtaatcccagcactttgggaggagttcaagattagcatgacaaaatcccatctctacaaaacaaaaaacaaaacaaaagaaacattagccaggcttggtggcatgtgcctgtggtcccagctactcaggaagctgagtagcttcccgaggcaggaagatcacttgagaccaggaggtggaggtttcagtgagctgagatcgtgccactgtactccagcctgggtaatggagacagaccctgtctgaaaacaaaaaaattttttaaataggcttttgttttttattttatttaatttttgacacagggtccactctgtagctcaggctggagtgcagtcgtgtgatctcagctccctgcatcctccgccttttgggttcaagcagtcctcccgtctcagcctcccgagtagctgggacttacaggcgtgtgtcaccacacccagctaatttttgtatttttagtagaggtgaccatattggccaggctggtcttgaactgacttcaggtgatcttcctgcctcagcctcccaaacccaaagtgctgggattacaggtgtgagccactgtgctcagcctgttaattttttttttttttttttttttgagacggagtctcactctgtcacctaggttggaatgcagtggtgccatcttggcctcactgcaacctccacctcccaggtccaagggattctcctgcctcagcctcccaagtagctggggttacaggcacgtgccaccatgcctggctaatcttttgtatttttagtagagatggggtttcaccgtgttagccaggacgatctcgatctcctgacctcatgatctgcctgcctcggcctcccaaagtgctggaattacaggcatgagccactgaccctggcccaggagtattgctttaacaatataaggttttctgatttataaacaagaatgtctttccatttatttaggtccttaatttcttccaacagtcttttctagttttcaatgtacaagttttttgcgcttctgttacatttattcctggccgggcacggtggctccgcctgtaatcccaacactttgggaggccaaggcaggcggatcacctgaggtcaggagtttgaaaccagactgaacaacatgcagaaaccccatctctactaaaaatgcaaaattagctgggcgtggtggtgcatgcctgtaattccagctacttgggaggctgaggcaagagaattgcttgaacccgggtggcagaggttgaggtgagctgagatcacgccattgcactccagcgtgggtaacgagtgaaacgtctcaaaaaaaaaattattcctaacattttattcttcctttttttttttttgagacagagtctcgctctgtcaccaggctggagtgcagtggcaagatctcggttcaagccattctcctgcctcagcctcttgtgtagctgcgactacaggtgcataccaccatgcccagctaatttttgtatttttagtagagacagggtttcatcatgttggccaggatggtctcgatgtcttgacctcgtgatctgcctgccttggcctcccaaagtgctgggattacaggcatgagccactgtgcccggccaatttttttctttttgatgccagcctttgtcctctgtctttaagtaggatgacctcatcatgaacataatactgtctggagatgtttccttggttgtaaaatgagaagcctagggagattatttttatgcttccttagttgtccccttcccctccacttttcagtgtttagtctgtattttgagtctgcttgagtgtccctatgacacatctgctggttaatttgcagccaccagtggggcttctctgctgtaaaggagataaaggacatggaaaggaatggctttggagtccaacaggccattgtcctggtaagccttttactggctatgtgatcttgaggaccttatttcacctgagcttgtttttcatttgttgagtggggctgttattgaggagtcagtaagcgaagtgaatgacagcacctggggcactgctagcacactggacccatttcatagattgatgtgctgtaacagcccaggagggtctcactcggccaccctagcagaaatgcagtgccacaatcatggcttatagcagcctcgacctcctgggctcaagcaattctcccccctcagcctcccaagtacctgagactacaggtgtgtgccaccatgttttttttttttttttttttaattattttttgtagagatgagggtctcactctgttacccaggctggtctccccactcctggcctcaagtaatccttcctccctcagtctcccacagtgctgggattacaggtggaaacctgcacctggcctcttcctaacttttcattgtgaacatccaaaaaactacaaacgttgaaatcatcttattatattgctgactctggattaatccgtatcttctacctccataacactatttctgatctgggaaagggcagcttttccccccgcccttctttttttttttttttttttttttgagacggagttttgcttgtctcccaggctggagtgcaagggcgtgatctcggctcactgtaatctccgcctcctgggttcaagctattctcctgcctcagcctcccgagtagctgggattaccagtgcccgccaccacgcccagctgttttttttagtagagatggggtttctccatgttagccaagctggtatcgaactcctgaactcaggtcatctacccgcctcagcctcccaaagtgctaggattacaggtgtgggccaccgtgcccggggcctagttttgtatttttagcagagacggggtttcaccatgttggccaggctcgtcttgatccacccatcttggcttcccaaagtgttgcgattacaggygttagtcaccgtgcccagcctccttcctatttaatgacttctgcccctacttcctgctttcatcattgcagtaagaatgcactggtctaacacttcaaccyggctgtctttagccagaggcagagctttgaaacctgggaatttactgcttggaaatgggatggaattctaaacatttcccttttgagggtttattcacatgaatcctgggcccctagtcttagggagctggaaggccgtatttctggaacaggtgttcactacttccgtttatcgggtctcagccaagtagacctggagctgctccctagcagaatgtggtgcactcttctgggcgccgcctcctctcctcctcttcctatctctcctccaacatccagcttccatgctaccctttccagaaacatttccaattcccatcagctaggttttctttcatggattccctcttgcattccttgcatagatcacttggtgctttgtactttgtcatgctgtcttctagaccttaagctggttaggttgagggcagggctgcatgctgttcatgtgtgctctgcctggcctggcacagatgtagctgctccatggatatctgcggggtcactgagctgaagcaggtggatgctggatgcttgatactagatacattttctggggctggctctgattaatgctgagtgagttcacctcacattaagatgctggtaaggtggctcatgcctgtaatcccagcaatttgggaggccaaggtggaggatcacttgagtccaggagttcgagaccagactgggtaacatagcaagaccctgtctctataaaaattttaaaaagtcagccaggcatgatggtacacacctttgagtcccagctactagggaggctgaggtaagaggactgcttcagcccatgagtttgaggctacagtgaactacaattgtgccactgcattccagcctgggtgacgagactgtcttaaaaaaaaaagatgctggttgttttcagactaaaatagtagcaacaggtcaacgtatctgaaatcctttagcagtcatatatggttagtgtaaatctctgtgataaaagaaagatctggaattgataccaaagcagctcagtactttttagtgtactaacacatttgttttaacaacttgttcacagctactgcaatgttcagatggaggatcaataatctctccattctttgagcatctagcatattactggactcatgtgtaatctctctcagccttctaggttttatttccacacattttccttcccttcaacccgattccaactgacttctttgtattcagttagcaaacaggagtgttcccctagcttcatcttctctgtttttaaaagacggagtctttggagtgcagtggtgagatcctggctaactgcaacctccaccaggatctgattctcctgcctcagcctcccaagtagctgggacggcaggtgcccaccaccacgccctgctgatttttagtagagatgggggtttcaccatattggccaggctggtcttgaactcctgacctcgtgatctgcctgccttggcctcccaaaatgttgggattataggcgtgagccaccatgcctggcaagtcttgttttttccaagaagttacttgggacttaggcagatatgatccgtcttcttaggtcctccttctcatccctgtaagatgaaggtgattggaagaccatgaggtcatccttaaggggtcctgtatcaaggtgttaagtaggttatcacttccaccttgactgttagctggtacctgcagtactttttcccagaactttggataaattcaccaagatctacttgtgaatacattatacgtagtagattaaagaggctataagctaatgctttcactttttcctctgaatcctaagcattaggcacttaaaacgggtgtactccaagacaaagatgtgttatcaagtgaaacaaagtcagggtgtctgtctcacacagtttatttaacaataggtaataagaaatcaaatttaacagtctatacagtgatccaaagttcatatttataagtaatcamctttaattgcatgatttacaacagttgagggtttttgctattttcaagttttatagaaagtgtgtgtgtgtgtgtgtgtgtgtgtgtgtgagtggggggtagggtaaggaggaagaaagcaagcaaagaagaaacccccagggacattttgcatgttaaaatcatcccaccggaatcgtttcttaccctctttttaatttttttactttgttagatgtaaaaataacgaaaaaaattctttcaagaaacagaaaccacaatatataatacatcaatttggcagctgcccctgtatatttttgaaaaagtcatttttctctctacatgtacaaattattttaatacttgaagttttacgctcagacttacagaatagaaaattttctggagcacaaaagttgacttgaggrgaagaaaggcagtttttttttttttttaaacattttttaaaagaatgaacatctttgcacccagagaaaaaaaactggtattttaatatatatttatatatatttatatatatatagaatgtaattttaaagtaacattaaccccttttgtcctctggtttagaaatgttttaactcttccataaagtgaggaaaatagggaaaaatgtcaaccatctgcaccagtaaataataactattaatattacatatgttcattaatttawaaaaaataataaaacctattggaggtgcaaggcaggagcatattgtttggcttcacaggcctcagcctcctcccagtgcacacttgaaccacacacacaaaggggaagaaaggctggtggtaaccagccataacaaaaatatattctttgtattctatcatccctcaggttcatcttgcatgtttgctttaaaccacaaacggctactgcacagttcttatgtgttccaaggaaaattgtcttttaggctacgaaagattcaaaaaaattgttttcagtacaaaaagtcttgttaagagaaaataatttttttgctcccaaaatahaaggtgtctctagtgtatgtctagtgtactctgtgagaggtttgaattcaagtctgagttatcggtgctgagtcccaggtccgtggcgcttgcaccatggaggtttgccatgcctggattgctagcaagctgagaaagcattgaattctggtccgggctggcaaaatgcccttgttccatggggttggcctgggcagctaccagtccaggatgtggggaacttgtctgtggggaaacgtggtgtggagaaggctgaggctgcatccttggggaaggactggagtgggggggctgggactgtggccgtggagaagggacaggctggggagagcgcacttgattggagagagaattagggatctgctggccttgtaggtgtggggactgggcctgatttgggagcatatgctgctgggggctcatggggttgggctgaacaggggaccccatctgttgctgaaggagtcgctgctgataggcctgtagactggcacctgcctctgctcccaaggcctggggaagctggcctatctgtcccatatttccttgttgcatctgttgcatgtgatgctgcatccgctgctgckgctgtggtgggtagccaactccttggggttgctggaactggttatggttggccattccagggcctattcctggccctgctccctgttgctgctgctgttgcatcatttgctgtcgtctcaagatgtctcggaattgtgaaggcatggtgttgtggttcatgttcatctgctgagcctgggggctcatccctcccatgggtggctggagttgctgctgtggttgctgctggggcaggccagccctctgaacgcccgcctgcattggattcatgttctgcatggctggattggagtgraccccctgctgacctggcatggtaggtggctgtagccctggctgcccctggggcatgccaggctgcccagggatgggttgtggattagagttggcatacttggcagcccgctgcttgatgaatgcagccaacagctgggggttggcgtgaaggatactaagyacctgttgctgctgcaggggagagctgggagacctgagagtccgcaaaaggttttgtaaggcttgttgagacacagtgcctggtttgagtgggctgatacctacctggcccaatcctggttgtggagccatgttcaaaggttgaccatgctgggccactgacatcatggctggccttggcatcccagactgtagttgctggggctgaggcaatcctccttggctccagggtggctgttgctgcatccctgtcggtcccatccctggctccaaatgcccactgggacctctggtcatgggaggtgggttcatacccatgggggccatgggagtcatcgggggcatctggtgttggattggcctttgaaaaatttgcacgtgggccatctggcgctgcgtctccgctgctctctgaatctgcattgccatttccactgctgcaggtgggggccctggaaggggtggctgagcagtctgaggaggggttggaggggtcacctggcctgctgccttaccctgggacacagggccagcagcttgagtcctgggcaagtagggtggcatgctattgggaggggtaggctgaggctgagaagtgggctggggcgtctgcggggtggttggctgttggccagttggtgtcgttggagtggcaggagtgggggaagggaggccctgttgctgcccaaccacaccagtccgctgcatgctggccatcctcctgcgaagcatttgggcctgctgtagtcggtgctgcagctgttgctgccggagcttctgcttgatgtttaggcagaacggcaccgggcatttgttctcctggcagtgcttggcatggtagcagcagagggcaatgagctgcttgcagatggggcacccgccattggttttccgtttgcaacccttggtatgctgcacaacccgcttcatcttctggcaggatggcagtgagcaattggcattccgacactggcaagcatggaccagagactggatgcagcgctggatactcaggcggcgagaatcgcctgggctctgggtggctgcagcctgctggttgttgctctcatcatctaagccaaggcctagtttctccattttgtggtcatggtttttagtgttatagcaggtgatacacaagtcataatcctagggaaaaaacaggaggtgcacgtaaactctccaagatttaagtcattcaaaagtattttagatattgtttgggctagaaaagcccctttcgtagaacaaaaactagcctcttcagctctgcccctcaaacacgaggccaagcccctagcatcccacaggcctctataaaatacgtggctgcatggcccctcagaacaaccctgcggagctcacctcctccttcccacaacccggtgcctacctcacagacagtacagtgccagcgtgtctccacatggtgcttgcattcattgcaggtgtagacaaagcggtcctggctctgcgtgtgcagctccaccagcatgcacatggtggaccactgggctcttcggagtgaagagaactccaggtgcttgtcccttgccagcgtgagaaacgcatcccgaccatccatcagatcgcaggggatgagaggatcaggatcaacaatgggaggcagggagttggcagcagggccagcaatgaggcggatcacaaagaagacctgaaaaacagacagtctcttttttttgagacagggcctcgctctgtcatccaggctggaatgcagtggcgtgatcttggctcactacaacctctgcctcctgggctcaagcaattatcccaccatggcctcctgaatagctgagaccacaggcccacaccaccacacctggctaatttctgcattttttgtagagacgaggcttcgccatgttgcccaggctggtctcaaactcctaagctcaagtgatctgcctgcctcagcctcccagagtgctgggattacaggtgtgagcaggtacagcaggctgagcaccaatgagactggcgaatgctgagttagtttcaccaccatacgcctcctgttccttttcctgctttacctctttggtctcttgagactgactataaatagaactgaaatgcacatcctgtgatttttttctccttcattcagtaactccttcagagtaacaatggtctgggtgaggtatagcaccatgcacagtggacattttgcctcaaggcagtctactttaagatgcaatccatggtttaacctcaatctaattacaacaaaccagacaaatccaaatatggagacagtatgaaaaacaactggcctggactcatgaaggtcccctatgcaactttcctgtgtaacttttcctacaggtttggaagggaatggaatggataaaaaatcttagtctttgttgacaaagcaataaaattcttgttcattgaagtttgaaaaaacttgtaacaaccatcaattctcataaccattagtgtaaaaggtataaaaagctggtattacatatgtatttgacattaattagtatataactataaacacctattaaagtaataaaatgtaaaacatccccttaagaaattaggaacttgtgagaaactgctgtactgataacagattattcaacatctgtgcacactggcagccacactcacagtgtctctggccagcaatgttcgctgcttctgtcaccctacaaccaggccaatacttggatttacaacctaaatttaaacagccatggaatgtgtccacaatttaagtcaaacctattacaatatattctaagggcttttcccaactgcctaggattctgtggcattacttactgcttgaaatagctagtaactattaattgttaataatcattacctaacgtattagaactcaggaatccttccatttcactagcatggctgagataatggttattaccattattacatcgtagcccattattctaggctaacaaaaaaggggtggtgatggggggagcagtgggggaaaagatactttgaacacctatgtatataggtgttcaccatgataacatcattataacaaattcctctctaaaaaagattttgttaactatttctctcccaaagagactgtttaaccaatttttaggtacggaattacaacctgaaatcaagccttcatttccctctcaacttaattaccacttcctataagaacttgattatatgtctgagaaccgagatagtaaaatgaggagtctgactgaacaatcgagattactaccattggacaaaccctgagaggaattactcttcaattctcctggctttcgttatcaattatatgatattaaagagagaaaaaaaaaaccttacccagttattttcccaaatgactgcaagaacaactaaacaatgtaaatgatgaaataactcaaaaagttttgagaagggggttgtaagtccatatgtggaagtttaacttttctccaattctatttactaattcactttcagaaaggttaaatctttttattttttgaaacagagtctcgttctgtcacccaggctgtaagtgcactgcaacctctgcctcccaggttcaagtgatcctcccaccccagcatcccaaggattacaggtgtgtgccaccacgccaggctaatttttgtatttttagtagagacggggtttcggttcgccatgttggccaggctggtctccaactcctgacctcaagtgatccgcctgcctcaacctccaaagtgctgggattacaggcatgagccaccacgcccagcgaacagtcagtgtttttattcatttcttatttctttttctgaggtggagtttcgctcttgttgcccaggctggagtgcaatggagtgacctcggctcactgcaatctccgcttctcaggttcaagcaattctcctgcctcagcctcctgagtagctgggattacaggcatgtgccaccatgcccagctaattttgtatttttagtagagcaaggtttcaccgtgttggtcaggctggtcttgaactcctgacctcaggtgatccacccgccttggcctcccaaagtgctgggattacaggtgtgagccaccatgcctggccagaaatcttgccgtttttccccaactctgggtggctgcatcttacctctttatgcttctccatggtggcatatagtttctgtgagaggtcgttagatacattgggcatcccgggtttcttcttgttgcccctactcaggctgctcttatttttgctggttttcttattattcttctttttagcatttttgctgtctcccttggtcacctgcagagtagcacaaaggagacaagaaaataaggtttttgttaagtaatttgggaatagcacagaatatctcccttctttgaaactagatatcataatcttatgcctgtaacttattttactagctgttctcttcacttattctttctccttaaagttgttatttgacctaattttctcccagtgatctttaaggcaatggcagccctttagctttttgcctagaagaggccacagaatgtgcagaccctgtagattgattgaatgtatcccagattggggctagggaacaaggaaggggtggcactttggggtagtgaagagtgtatcaaagtggggagccagaagaccttggttttatttccttccactcatattctaaaatgttatgagcctacaaatactaaatgacaaggctgtaagagtttgttaacagactatttaagggtgccttttgttaagttaaattcaatggaggtaattcgagatatgctatggggaaataactggtgaggttactaagccaggcttagtaacttaaattctggctcaggcctattttgtatagctaagaatggttttttacatttaaaaagagtgtgtttttaaaagacagaaaatatgccagagatatgtgacccacaaggcctataatattcataacctagtccttcagataagtaatcttctatcagtttttcaggatttccttcagtttcttttatcatttcacattactcaaagtctgagatgccattttaaaaggggctctgatgctttaaaagtttaataccactgaaacagaaccctaataacctctctaagccaatatttcttgtccaacttaaagagctcttttacacctgaaagctttaaaacccaattgaaagtttaagtgcacttctggattaaatattagaatcatgatagaagtttcaaaggaaactcaatgcccttacatctgtgctttcattgctggtgttttcctctcgttttctctcttcttcctcctgttccagttccttaatgctttcttccagaacattgggccagaaatcaccctcgaaataaggcaattcctttgcacttgttaatctatcttcagtagcttgtttaaaaatatcctgtgaaaacatgcatgtacatataggaatttctatgttcttttaaagcattgattatacagaataatcatggctgacaagaaacatgaaagcttaaaatgtcttgaaagctggcagagactttatacctaagccgtaagccagggagtatttagaaaaataaatagtgaaaaggcctggcctaaagtcaatatttccggttttctatttcttctacccacaaaaacagggagcttatctgcctttatataaccaagtggcaattatcctgacaggatcaacgtcagggtggtagcaccatcatgcatgccatggcccctaccactccttatcacagaatatgtggtatgaagcatgccctcctcacacccatccttggaatttcagcagcttttactgacagctttgttcaaaatgaccaaaactacaaatactggaaatagtatctgctgcagaatgatttgctgggctgcttaggaaaacttctttatttagttgaactactaaattgaggaagacaagtctgtatcatgagacaacctatatttatgaataacataatactgttaattaagaatatatttttggccaggtgcagtgactcacacctgtaatcccagcactttgggaggccgaggcaggtggatcacctgaggtcaggagttcgagaccagcctgaccaatgtggagaaaccccgtctctactaaaaatagaaaaaattagcctggcttggtggtgcatgcctgtaatcccagctactcgggaggctgaggtaggacaatcacttgaacccaggagactgcaccattgcactccagcctgaaactccgtccaaaaaaaaaaaagggagaatatatttttggctgggtgatgtggctcatgcctataatcctagcactttgggaggctgaggtgggcagatcacttgagctcaggagtttgagaccagcctgggcaacatggtgaaatcctgtctctacaaaaaatatacaaaaatcagctagctctcgtagtgtgcacctagtcccagcaactcaggaagctgagatgggaggatggcttgagcctgggaggcacaggttgcaatgagcgggtatcatgccactgcaccctagcctgggtgacagagagtgaccctttctgaaaacaaaacacccacacccctaaaaccctaaccaacccaaaccaaaccaacaaaaaaccaaaacaaaaagatatattttaaggccgggcacagtggctcatgcctgtaatcccagcactttggaatgcttgaggccaagagttcaagtccagcctgggcagcatggcgataccccaactctatccccaccctccccccaaaaataaataaaataaaattttggttacatgtttaaaacagggatttcttgatctaccgctcttcaaaacctggtttttcttatattgaaaaattttgaatatacaaaataaaagcaatcaaattagcatttttaggaattacatgcaagaggtagaacaagcaagacttttgtttaaaaaaaaaaaaaaaaggctgggcacggtggctcatgcctgtaatcccagcactttgggaggccaaggcgggcggatcacaaggtcaggagatcgagaccatcctggctaacacagtgaaaccccgtctctactaaaaatacaaaaaaatttagccgggcgtgatggcaggagcctgtagtcccagctactcaggaggctgaggcaggagaatggcatgaacccaggaggcggagcttgaagtgagccaaaatcgtgtcactgcactccagcctgcgtgacagagcgagactccgtctcaaaaaaaaaaaaaaaaaaaaaaaaaagttaaatgacagaacaaagagcagcaacattagtgcatttccagatctattgtcagcacctggcccctatg

SEQ ID NO: 96301 - DNA, 13623 bp, Homo sapiens
ctgcactcacatgttcatcacaccactattcataatagcaaagatatgaaatcaacataggtgctcatcagtgaacaaatggataaagaaaatattgtatatatacacaatgggatattattcagccattaaagaggaatgaaatcatgtaatttgcagcaatgtagttggaactggagaccattatgttaaatgcaataagccaggcacagaatgacaaatactgcatgttcttactgaaatgtgggagctaaaaaactttatctcatggacattgagaatagaataatagataccagagactgggaaggggggtggtgggaagatgagagttaggttatgggtacaaacatgccgttaaataaaaaaaataagttctaatgtttgatagccgactagggtgactatacttagcaacaatattatgtatattttaaagtaactagaagagaggactttaaatgataccaacacataaaaatgataaacactgaaggtgatacataccccaattaccctgacttgatcattaaacattctttgcacgtaacaaacactcacatgcaactcataaatatgtaaattattatacatcaataaaaagggggaaaatattgtggggcttggggaagccaagaacataaggagatgttaggaattgtttggcttaggtcagtaattgtgatggattgttgaatgtcagaggagataaagttctggaaaaagccaacattgaaatttcccctggccgggcgtggtggctcacgcctgtaatcccagaactttggcaggccaaggcgggcagatcacctgagatcaggagttcgagaccagcctggccaacatggtggaaccccatctctactaaaaatacaaaaattagccaggcgtggtggtgcgtgcctgtaatcccagctactcgagaggctgaggcgaatcacttgaaccagggaggtggaggttgcagtaagccaggatctttccactgcactccagcctgaaaaaaagagtttcccctctgatcactttggttaacgattttagttaataattataatagaaactagcatttacttattactgccaggcattattctaaggacatttcacgtattctctcatttcatcctcccaacaccacaataaaccagtagttgtattattcccaatttacaaaaccgaagcagagacattcaataattttccccagagtttcatagcataaaggtggaagctgatttcaaatccagatagacagacatcactgcccatgcttctaatcatgtattcatttagtcaacaactacttttggaatgcttgccataccatgcaatgtgcaggttgttttgcagggactggagattcagcaatgattcagactaaaatcccctgccctgtcgaggctaaataactgctccttacagtggcctgtggatcatattggtataaggcagagcaaagatgggttaatatggtaatcacaaggcagggagctttgtaaatgtgtcctcctaggagttgtgctcccttgatgccatcagtacattccacaaagaggaagttcttctaactcactacgcagctgggcttggctcttactcaagagcattttggggtgaaaatatctaagtttaccagcccttgtgcaaatctgagatgaaggactacattaaaagtaaaattcaccttagcaggaagtggggtttgctattctgtgtatatctttaacagtatctgctgaaaagaacccttttgttaaataattgtattacaagtccccaacttaatcttttcgaatatgaaataagagagggacagtgcacaagagcaatgtccccagacccatctttaagtgaagcaccaggccgatgaaacatccctctctgctgccttctttctctgatcacaactcagctccggaggaaaaagagtcctctaaagtataataaaaagaaaaaaagaaaaagagtcctgccaatttcactttctagtttcactttcccttttgtaacgtcagctgaagggaaacaaacaaaaaggaaccagaggccacttgtatatataggtctcttcagcatttattggtggcagaagaggaagatttctgaagagtgcagctgcctgaaccgagccctgccgaacagctgagaattgcactgcaaccatgaggtaaatattttcccttcgtattcggtagtgctgttgagtcatcttgtccaatgcaaatcctgagaagctatgttcccaaagagggccagctccattttagtgtttgtttatagccttactatgcctctacctctgttggttgtaaatctgtcttaccaatggtggtttgttccctcctgaacaattttctgcttcacactggcaagcttcctaaattcatctccagaactgcacgcctggggagttgagttgcaatcagagaaagaaggcagcagagagggatgatgtttcatcggcctggtgcttcacttaaagatgggtctgggggcattgctcttgtgcactgaccctgtcttatttcatatttgaaaggattaagttggggacttgtaatacaattatttaacaaaagggttcttttcagcagatactgttaaagatatacacagaatagcaaaccccacttcctgcaaaggtgaattttacttttaatgtagttcttcatctcagatttgcacaagggctggtaaacttaaatattttcaccccaaaatgcctcctgagtatgaattagagatggagtgcttggagaaaatagttctgttctcacctctaacattcccttctatccccaaaacatgagactgccctggagaggaagtgttagctcattgaataggaagggaaatattttctccagtttgaaggtggggtggccggacctggttgcctaaccctcatcctgggagctctggaatcccgtgttaccaacccctgtgcttacttcctatgagacaccttgccttctgtctgtgaggttcctgatttctcttcttgaaacgatattatttcctgctagtctaaatgttctgcctgatttcaaaaaaaaaaaaaaaagatttgagatatttacagatttcttttttttgtagtcacccagaatctatagaacccttttcttatttcttagaattttagcatggtcttatcttagaatttttcccattacaatacagacccatctgtcctttctttccttaattctttatctattgtgactttcactgggcattgcccttgtgccctaagacagtggttctcaaaattgagcatgcataaaaattgcctggacagcttattaaggacagagtcctagggttgactccccagagattctcattaagtgggtctgggttagagtctgaggatgtgtgtttctaaaaggctcctcagtgattctgagactgcggtggtagcattagttctgagcctggttgataatgtcactgtggctttcatccagataagaggcaaaggaagaaattgttgttgttgtgtatacaactggaacttctataggaatcgggagaataggtcctcacaagccagagcccaggaagcaagtgtctggcatcagcttctctaacttaccagtggaaataaaaacccaaaatcaagcagtgaagttggatgccttttaaatggctgctcaaagggcttttacctaagtgtgtatattaaatatctctatcctgcaaatgcacaatagactttatgttttatatggtggagataacctcaattctatttactctctctgtttcttttgtaaaatgagaaaggagctaaggagtttatgtgttaagggaatgagctcccaaactcaactggaagttggaaatagaattgagagggagcaaggaagctatagtgagtcttcaggtgttaggatgcgtgctgcacatgcttggggtctgagagtggtcatattctgtaggactcaccatattctgtaatgaatgcagtagagagtgtgactgagatgcacatggagaaaacacagggtctgagccctccaagctccccagtgtcctgttctgatcctcctggggtcactacagtcctacccatggtcctgtgaagcactctagtaactttaaatcagttcctgctcacctctgtttcttggaacaaatggagacttaactatcccaggcagaataaacaaacaaacaaacaaaaataggatggaaaataggcaggagtttataggaaggacccgccttccattcaaagctccaaataggtcttagcaaagagccaggttgtctaagtcccttgatgtaactaaccccaggcgcgggagccccggagagtgcttggcttggtatcaggcatcctaatggcagatgcattcccgttgaaaagctcatgtccaaacagatctgtttttattcttagtgaggttacaggaagattcccaatcaaaatgggagtgggaagcagtggtataaaaagtgggagagagaggggcagttagaaagaggggtcacataatcttctatctagacatatgtttcataagtgatcctgccacattgcatgacattccagatatctattggttgtataagaagccatactatttagaaatacagctcctgatacaagggttgctgtatagataccacgaaaaaaaaatttaaataagaaaaggcaacattacagagactccaatacacagacagtgttgagaaataatttggggcatagaatactatttatctccaaagtaattcgaaatacaggcttttgctcatttgtctgttctctgggttttttcggggtttttttgttgttgttttgttttgttttttggtttggttgattttggtttatttatttattttgaggaccaacactaaagggaatggaaaatctttccaggagagtcataagggtaccctaaagaaaaaagagctctttctataagaaaaggagctagtggccttgtgagccttccctgtagctgcacttcttgccccttattataaaagcaaaacccagaagagaaaaataaaatttcaaaaaaaaaattaaaacaataaagtacaaaattattaatagagcaactcaatgagatgtgttaagaacagaaatcaccagtttaagaaatagaggtatgggggggaggggaggaaaaaaaattacattttattccaaaataaatgtttaagacattgctaacataaataatacttgaaattaaatgagagaataatacaaaagcagataaaatgagtaaaaattaagaatggttgaaaataagattcaaatggttaaaatggaaaaattcacagaaaaaaatgagaatgtagcatgttaaagtaataaaccaatacaaaataaaaccaatctgataaaagctcagaaagtttgaatagacaaaataaatgaaggatatattaaaagctgaaatagacagaaaatcgaaagtgataaagatttctttaaaggcaaatgaaggagaactaaggaattaagaatatcaaagataaaatgaagctgcatttcggagggatgagaaattaaaatcaccatggcaaaacattaaaagaataaaaaattataaagctgaaattttcaaagtacaaaagtaaagctagggaagaatgaagaacagaaacagcaatgaaaaagacttacttctttaaaactacataaataaaaccaagcctccacagagaccctcgaaagcagagagggcagagctgtttaacaaaaactgtcttattcatgaaaacctagccacagactcagagaacaacccactgccctcgccctaattcttctgctgcccacagtccctaaactcctgctaccacatgcaggaattaacaataaggaaaaacatattatagaaagaaaagaaggggagtttctttgatttgtgttaacagcctttaggaggaggagcattttatttgccatgctcccatttcttgacatataaatctgtgtctcaaagtccatctttgtgtttttccctacagtgagaacaataagaattccttggagagcagcctacggcaactaaaatgccatttcacctggaacttgatggagggagaaaactccttggatgattttgaagacaaagtattttaccggactgagtttcagaatcgtgaattcaaagccacaatgtgcaacctactggcctatctaaagcacctcaaagggcaaaacgaggcagccctggaatgcttacgtaaagctgaagmgttaatccagcaagagcatgctgaccaggcagaaatcagaagtctggtcacctggggaaactatgcctgggtctactatcacatgggccgactctcagacgttcagatttatgtagacaaggtgaracatgtctgtgagaagttttccagtccctatagaattgagagtccagagcttgactgtgaggaagggtggacacsgttaaagtgtggaggaaaccaaaatgaaagagcgaaggtgtgctttgagaaggctctggaaaagaagccaaagaacccagaattcacctctggactggcaatagcaagctaccgtctggacaactggccaccatctcakaacgccattgaccctctgaggcaagccattcggctgaatcctgacaaccagtaccttaaagtcctcctggctctgaagcttcataagatgcgtgaagaaggtgaagaggaaggtgaaggagagaagttagttgaagaagccttggagaaagccccaggtgtaacagatgtwcttcgcagtgcagccaagttttatcgaagaaaagatgagccagacaaagcgattgaactgcttaaaaaggctttagaatacataccaaacaatgcctacctgcattgccaaattgggtgctgctatagggcaaaagtcttccaagyaatgaatctaagagagaatggaatgtrtgggaaaagaaagttactggaactaataggacacgctgtggctcatctgaagaaagctgatgaggccaatgataatctcttccgtgtctgttccattcttgccagcctccatgctctagcagatcagtatgaagamgcagagtattacttccaaaaggaattcagtaaagagcttactcctgtagcgaaacaactgctccatctgcggtatggcaactttcagctgtaccaaatgaagtgtgaagacaaggccatccaccactttatagagggtgtaaaaataaaccagaaatcaagggagaaagaaaagatgaaagacaaactgcaaaaaattgccaaaatgcgactttctaaaaatggagcagattctgaggctttgcatgtcttggcattccttcaggagctgaatgaaaaaatgcaacaagcagatgaagactctgagaggggtttggagtctggaagcctcatcccttcagcatcaagctggaatggggaatgaagaatagagatgtggtgcccactaggctactgctgaaagggagctgaaattcctccaccaagttggtattcaaaatatgtaatgactggtatggcaaaagattggactaagacactggccataccactggacagggttatgttaacacctgaattgctgggtcttgagagagcccaaggagttctgggagagggaccagattggggggtaggtccacgggcttggtgatagaattatttctcgattgacttcttgagtgcaatttgaactgtaacatttgcttagtcacctttagtggagtaatccactgggcttgtttctatatttatataaagcagccaaatccttcatgtaatattgaagtccatttttgcaatgttgttccatacttggagtcattttgcatcccatagaggttagtcctgcatagccagtaatgtgctaagttcatccaaaagctgggggaccaaagtctaaatagggctcagtatcccccatcgcttatctctgcctccttcctcctccttcccagtctatcatcaaccttgagtattctacacaatgtgaattcaagtgcctgattaattgaggtggcaacatagtttgagacgagggcagagaacaggaagatacatagctagaagcgacgggtacaaaaagcaatgtgtacaagaagactttcagcaagtatacagagagttcacctctactctgccctcctcatagtcataatgtagcaagtaaagaatgagaatggattctgtacaatacactagaaaccaacataatgtatttctttaaaacctgtgtgaaaaaataaatgttccaccagtagggataggggaaaagtaaccaaaagagagaaagagaaaggaatgctggtttatctttgtagattgtaatcgaatggagaaatttgcagtattttagccactattaggaattttttttttttgtaaaatgaagactgaactctgttcaaatgctttcatgaacctggtttgagacggtaggaaagcaacaaaacgtgggaacctggtgactaagggcctggtgcaaggacttgggaaatgtcattgataatagatggtggggttttcccccctttagaaatgttggatattaagtgatataaacacttcttttaactccgaaaatcttctgagaaatcacaaaattcacggtatgcttggaacgattgagattttctaggtagatgctgaatagcctagacatcaaagttggtgtgaaccaaaatagagtcagctgacccagcatcagccacactctgggttggaaaatgtttgcctgttggaattaatttaagcttaagtatatatcaacattattttattgtgcaattaaaacaatacaaattcatggttttttaaagttaaaaattctaaccactgtaacaacagtttttgtgttattttctgtattaaacatcttgttgcacgcatttgaggtcatcagggtgcaaaatttgtattcctgaaaatgtcatatattttcattaataaataacctaaatatgataaaacataaagcagtgttctggttcatctggaattttgctgtactttaaatctttcagactcagctactgataaatgaaacgttacacaggtgtgaaccaaatccaaataacctcgactggtctactatcataatcacctgaacagaacaaaactttttcctcagctttaagagtccagggcttcggataacagctgccatctgccacctgctaccattgacctacgtgaacacagacattctgtctccaccttgatggtgggtgggctgctccccttttctttgttaaattttgtgctttcatcacattttctctattctgacctctgttatgagaaataaaagtcactgattccattttatgccccatcctggacgcaatccaaatgcatgttaaagagtcttccctattaagtaaagaataggaagagacaagaaggcccaaaatctctattatttttcaagaggcctctaatggaaaacacaaatcacaccaactgcaaaggtaaactcatttcattggatcaaaatggacaagtgtatgtttcaggggaagatctagctcaccttgatctgagtaaattaggactacatctggtgcctgggaaggaacaccacacgtattctgagtggaaggttaaaatggacaggtatgccgaccttgagagaggacccttggtacctgtgtgtgctaaagatggatgtatgtaatcttgtccttgcatgtcatgcctccagtcccttgctggaacaggacccttagtgggaaaacagcaagaagggtagaaaagggaaacataacatattacacttaatatgagggcttaaagttaacaaatgattggaaaacaatgaaaattatgtacatagctccagtttcctgaaatttcactatccaagaataacaaatgaagtcacattaattgggcttgacttgtaattcccagccttttagccacatttcccggggcaggacatttgactcccttcatatattcatccaacacggcaagcccctagtagatgtctcctatgtgctcatgaacccgtttatcagagttatcggaccacatctgctacttatgtagcttcaacacccatatccatcaatgaccattgcccctaaaactgccttcaatacatttcacattctctgtatttgattgccaccttgagagtactaatatctctgccaacaatgttttcaagtgtgttagtgccagtgaaagagtgagaagaattcctcttatctctgtgttggttccaagtagttcttatttatttctctgcctcagagtcctcagtgaaaaagattcatcacttctgcttgtctttctccatagagctcagacacagtccctggggacagctgaccttgagtcatgctgcactttcaccttccttcataccctatgtcaattgacatatccaatacaactggatccagtgcaactggaagactggaagcattagaattctgattataacacagataggccttgtgttaggatccctaccatacgtgcaatcaaccttggatgccaatctgagggttgcagtttgcaacctacatttgccctattgccctttttggaaaagggactaacttagactaatatgtaagaaattttccccatgattaatagtgcagctacctcattgctgattatctacaccttctagggaggctgcaaagagggaaacccactaaaatccttagatgtacctaggtgcatgcacttgtaagagaggcattctcagctctacatggggcctcccttcagctgctttacatacaggacttaagactagagaagagaccagaggcaggatttgttggaagcctgtggaaacaaatcccaaacagttctgcttctcctctggttctctgtaggctgctgttgaaaaggaggctaccaaacaggtaaacgatacaaatagaccccagagccttggtttatgtctcacttgttttggaaacataatgagtcatagtttgtgttatttctgagtaaaatgtaaaaatatatagtaaattctgccctgaacctagaaattcctgaaacccttctagagatctggaaattggccccagtgtgtttatacagatataatctaattaaaatatttgaaaagtctttctttacctttccagaatcctggatatcccaagtaaatgagcctatttatgttctgcttttgattcacagatattacagagcaaaggcactgtgatataaaaccactgagcacacattttcctttctcatttttaaattaaacttactaatttgtcatcaagcactacatttaaaaactcaaacctggctgggcgtggtggctcaagcctaaaatcccagcactttgggaggccaaggagggtagatcacctgaggtcaggagttccagaccagcctgatcaatatggtgaaaccccatctctaccaaaaaaaatacaaaaaaaaattaaccaggcatggcggtgtgtgcctgtaatcccagctactcaggaggttgaggcaggagaatctcatgaacctgggaggtggtagttgcagtgagatggtaccactgcactccagcctgggtgacagaggtagaccctgtctcaaaaaaaaaaaaaaaaaaaaaaaccctcaaacctacttgtacgttttttgcatttagtgaaacacctacataagttggagctttaaaacatatgtataaaactttgtaatatatcttctaattgttgattaaggaaaactagagttcactagaatatttaaatagaaacattttaaataatgattaaggcttttaggttatggaaaagagttgatttgtctaggtgttaaaaaggaaattattatttccactagcaatgtatgagaaatactgttttcagcatcttcaccaatactgaatgttaccagtctttaatttttgtcaatctgatgagtgcatgcatatatttccaaaaaaggcactggcgtatagatcacagaaaaataaaatgttcaagtgtggaatctgtatgacggaaatcctctccacacccagaatgctagttttctctcctctctctctgtctgtccccaccatctctctcttcctttttctctccttctttctcacttttatcttccctttacgtcttcttccttcaagtttctctttctagagatgactttgcgtctctgtgcatgaagtggaaaacatgcctaccaggttatttatctcttctcctaataattcaacaaaggccaggtgcagtggctcacacctgtaatcgccacactttgggaggctgaggtgagcggattgtttgagcccaggagttcgagaccagcctggacagcatggtgaaaccctatctctacaaaaaatacaaaacttagctgggcttggtggcatgcacctgtagtcccatctacttgggatgctgaggtaggaggaacacttgagcccaggaggtgggggcttcagtgagctgagatcgtgccactgcactacagcctgggcaacacagtgagatgagaccctgtctcaaaaaataaataataataataattcaataaagactttctagaatcactttcttctgatcaaaattccaaagaaatatctgtttgtctcatttcaagtcaatatccattaccaatagaatccagttgactgaggcgggcggatcacgaggtcaggagatcgagaccctcctggctaacacggtgaaaccccatctctactaaaaaatacaaaaaattagacaggcgtggtggcgggcacctgtagtcccagctactcgggaggctgaggcaggagaatggcgtgaacctgggaggcagagcttgcagtgagccgagattgcaccactgctctccaggctgggtgacacagcaagactccctctcaaaaaaaaaaaataataataataataatccagttgaccaagagaatgagatcatattccagagaaagcaggggcttagagtgcatgctttctgcaggaatgagagcaaattatccaagaaggagacatgggaggagggagaaaatgactggcagaggacatggcttgcatacctagaatacactctagctttcaatcacacgagcacacacttttgtgtgtagtccagcactgtcttacatgttattacctgtagaatatctagagttctaactagaccagtatttctcagactttaatgtgcagtgcctactttcatgtgcacaatcacctgaggatcttgttaaaatgtagactatgattcagtagatctgggtggagcctgagactctgtatttctcacaagctctcaggtcaaaacaaggcctgtagtctgtaaactacaccttgaatagcagaggtatagactgaactgcaaccaattcaatctggttccatttttcagtttatcctttagtcagaaatgaagatcataccagcacattttccttcctacagccttctctctctttcagtaactcatctcttgagatctcagataagaaaatctgtattacctcaaaaataagtatgtttaatgtaaaatggtgcagccactttggaaaatagttggacagttcttcaaatggttaaacatagttaccatatgacccagcaattccattcctagatacatatgtaagaaaaaggaaaacatgaaaacataggttca

SEQ ID NO: 96302 - DNA, 12297 bp, Homo sapiens
tttactcaggatgccactttgatttcagtttttatccctagggcatcctaagggcctttggaatcactgtgaaatttggaaagaaacattgggtgtttcacacctggtattcatctgttcattcttaagtgacaggcaggcactatagtaagatgttggatggggagaagccaatttccaccccaaagcactccatacactccagtggtggatgacagacatgtaaacagacaaataggacaggaggtggggagtctaaggatgggtatctgaaagcaatatcgggggttgtccctgcttctggagtatgacaattactacaagggtggctttccccgggcaatgctgttgctgtctgttttgaagctaatcacaccttttgatagtttaaggtcctggatgaaccaatagagttcataaagataatgagacctagttttgaacatcctcaaaaataagtgattgtaattaatccaatgtagaagttacaacaaaaaagctaaaataagaaaaacacagaaactgactcagaatggtttctaaagattaactcatataataagaagtccaaagattgacaggctcaacaatatcacccatcacccccagttttcctgcctctctttgctattgtccgtaggcttcatctgaatgctggttccctttgtcttcctatcatgacccatagcaattttggctgcataattccttgtctgtatccactaggtgagagagcaagtaaacatcctggtaaaccaatttagttcacatgcatgcccctggatccgtaactctcaccgaagggaataccatgtgctgttttgttcaaatctagatgactgaacactcgcaaaagaggggagaaggaattactgaaattagtttaggccaatcagagctcatgccttgagtgggaatcggggatacagccttcttcccctgaatctcctgggctgctgaagatgcatgcaggactgctggatgcattaatgaagctgaggttctattaggaaggagggaaaggagaaccataaagagctgcaaaccctgatctacaataatgaggaagggcttgcagtaaacgttagtgagggctggtgaaggccccaggatggaacctgcagcctgagtctcacacacattctcccacatggtgcaccataagggggcactcaacactccccggttagaaccgatgggcacaggatgcttaggctggctgcaggaatttccaggggacactgaggagtggtagggggaagtgagattaaatgaagaagcacacaatcttgctctagttgtaggaaacagtctgtcagggaagcaaagtaggaaaaaattccctgtgacttgtgaacagtctcacagttgttgattgctgctgactagggaacagaaagggcatcacacatataccacacacacccacacmctcatgttacaaggaaccaaaaagaatttttgccagtggagaacaccagtttagtccctccttcactgaaacctcctacccgttgctcttctgggaatacccatctcatgtctggttctgcccttactagttgtatgttcttggaaagctgtttaacctctatttcagtctgctcttatgtaaaaacgggataataatagtacctacactcatacggttgttgtgagggttaaataagttaataaatgttaacagttagaaagttacctaggacgtagtaagcataaagtgatgataatggtgattggctgggcatggtgactcacacttgtaatctcagctctttgcgaggcagaggtgggaggatcacttgagcccaggagttggagaccagcctgggaaacataatcagatcccatctctccaaaagaaaaaaaaaaaaaaaagaagaagaaggaaaaggatgatactggttaaaagagtaatacaaaaggaactctgtgtgtgtgtgtgtgtgtgtgtgtgtgtgtaaaaagagaggagcaagaaaaaacgaatggacaaaatagagtaataccgcaactgggctatggacattttgaacaaacctaaatctgtgtgataccatggaccagtgactcctgtgtacctcccattttcttcctttttgaataggaatgcctctagctgctatccttctcctgtcccaccattgtacattgtgtgtgtgaggcagacaacttgtttcattttttttttccatttcatagttttgcaagtccgcagatgaaggggaattgtgctccaggagctggacttaatgagttacacctgaggagcctcatctgtacacctgggcctgatttagataatgagattttggccttcaaagtgactctgtaatggaatgagacttttggaggacttgagatggggtagatgtattttgcacatgggaaggacatggatcactgggggccagagtgtggattatggcagacaggctacatggctcccagtgagccccactgatatggttaggctcggtgtccccacccaaatctcatctcgaattgtaatccccaggtgttgagggaaggactgggtggaaggtgattggatcatgggggtggtttcccccatgctgttctcgtgatagtgagtgagttctcatgagatctgatggttttataaggggctttccccccttctctctctcctgccaccttgtgaagaaggtgcttgcttgccttttgccttccatcacgattgtaagtttcctgaggcctcctcagccatatggaactgtgagccaattaaacctctttcctttataaattacccagtctcagggaagttctttacagcagtgtgagaatagactgatatacccctctcctagcattctcaccttgtataatctcctctccttgaggagcttgctgtggcttgcttctaccaatagaatatggtataggagatggaatgtcacttctgtgattactttaggtaagaccgtaacttccatcttgccagtagactcaattgattttgcccctgctggctttgatgaagtaaactgccaatgtggagaggcccatgtggcaagaaacttaaggtgccctctgagagaaggctaggaaggagctgagctcctccacctgacaagcaacaatgaactgaatcctgccaacaaccatgtgaacttgaaggcaagtccttctccagttgagccttcagtgaaaccccaggcttggctgacactgtcattgcagttttgtgaaagaccctaaaacagaggatcctgctcacctgtgcctgaattcctggcccaataaatggtgttgaatctaccagagagccagctggaaaaagatatcagtggagccctacttatctcatcactacaataaattctggctggatcacagatataaatgctgagcacaaaataataaatctttgagttgaatatatcgcgaaaatttttcataatttcaagggaaatactatctaaatgataaactttctagaggccaaaaatgaaaaggtaagttcaaaaacataaaactagaattctgtataaaacaaacagtagaagtatggagggaagaagaaacaaactggggaaaaaccgtcctacatgtacattgacaaaacgtgatttcccctgatatgtagagttcaacaagtcaaaacaaacagcaatgtgatagaaaacaggcagagaacatggttcacagaacagaacatgcaagtggctctcaaacataggcaaagatgcttgacattggataaagatgaaaccaaattaaaatgataaggtattattttttaacctatcaattgggattggtaaaaaagttggaatattctgtgctaagggatggggaaacaggccctctctttttcttttttttgagacacagtctcactctctcacctaggttggagtgcagtggtgtgatctcggctcactgcaacctccacctcccaggttcaagtgattctcctgcctcagcctccagagtagctggcactacaggtgcatgccaccacacccggctaatttttttttttttgtattagtagagacaagttttcaccatagccagattggtttcgaacctgacttcaggcgatctgcctgcctcagcctcccaaagtgctgggatgacaggcgtgagccgccacactggaccggaaacaggtactctcatacctgtgcgtataaattggtacaatctccatgaagggcaatttgacgaaatatctatcaaagtatccaaatttgacatagaaatctcacctctagaaattttacccacacatgatatattttaaaagattgtcactgaagcacagtttgtaatagggaaagatggaaaataaccaacatgtatataaacagggtactgtttatctagtgaaaatgaacaaataaggcagttctgtttgtactgacatgaagcagttttcaaggttgtttagaaaaacaaagagaatattgtgtaatgtatgccatttgtacaaaaacaattacatataccagacgtgcttatatatgcaaagaatatttctgggaaaatacacaagaaacttgcttccaggaagaactaggtggctggggaaaacagaagttagacacttcttattttatagttttttgaatattttgggtgaatattatgaatatattctctattcactattgttaatacaaaaatgaaaaggaagcaatgttttgacacccaaaggctctctccaggacttaaaagggaggcgtgttttttaggcaagaaagagccagtgaatgcccctctgtgggagcaaaagaagagaacgcccactgcatttttaaagtacagcttaaaatagtgtgttgcaaagctcagtgggctcagccctttatgattgttggttagaagactgtcagggatcattttccaaatgccaacttacactcctctgtcatccagaaagttcttattcctgtgagaatttttagaatttagagaatggctggtagggctgacagccccatgtaaagcaggtggggaaacttcagaggagtggtccccatgcatctatttctcattgttttctttccttgttccagccagtgctgctgctcctctttcctgggtccagcctttgacgtaaactctgcagctgagaaccctgacctctctccccgcttccctgtcttacttaagcctggaacagctcttaagcctggcacctctgcagctgtgactcattgcaaatgctttgcattcygggatgttcttcagggttttgggtctcccttgtggctcaaagaaccatgcaagttgaaagggaggagaaaaagaggccctgcagctgccaaaacattgcagacatgaggcgggaaattgttaggaaaactgaaaaggttttgtgctggaagaaccccagccagccactccctcgcttgggcctgcttgtaactggagcagagctaggggacgcctccgtggaagctgagtcaactgtgggttgtcccagcccccatgaggttccattcacagacccagaggcaccacaccccatctggagaccatctccatgtgtccatgaaggactgggttaaagccactctggaaagcagaaatgggggtgtcatctagaagtattgttcgtctcaagtgttagtttacctttacgtcactggaatgattttgtcagcttgttctgcctcctcaccaccttcagctgtacacaatttatgtttatattcaggtcaattgacatctactcttatgacagctgtgttcttccctgacccttaaagctatgagaccctatgttgaaggtctttaggtaaaagaaattagtgtcttgctgtccattgttaattcaatggagatgggggagggtaagctgtgccttctcaccttcacttctttcctgatcctctataaagactccaattgggcataattttaaaaaccttttaaataaactttatcgatgtaaacttacatataagaaaacacacccgggttggctccggttgcagagttgagtgtcctgagaggtcagaatgccgtcagacatggctcatgaacatggacgtagtaaaatggaacttccagattataaacaatggaagatagaagggacaccattagaaactgtcaagaagaagttggctgcgcaagggctaagggatccatggggtcaaggtgaagcttggagatacatgggtggctttgcaaatagtggttcctttattggtgcattattaaaaggattcaagtggggatttgctgcatttgtgggagctgtaggagctgaatattatctggagtccctgaataaagataagaagcatcactgaggataatacctggaagtaccatagtggtttcttaactcttcagaataagatttcttcactgtagcctacttgtctggcttgtcccttaaagaatattagtaagatttaataaagtaaaataatgtatatgcaaaaaaaccccactcatttttggtgtataattttatgagttttggcaaacctacatacccctgtaaagcataatttgaagccaatggcttaatagataggaaaacaatgaaataaatgcagaagggggggtcaacagcatttcatattcacctacatttctctaaccccatgggtgcaacatcgtcacatgttaaggctcctttgccatcagacaatattcaatatagttttacttggatttcataggagaaaacaacttggattgaacagaaaacaaaatatgaagtgaagtggaaagagaaaaaaattgctacatttctttttttaaatttttatttgagtttggggatacatgtgcagaacgtgcaggtttgttacataggctagatttcaaatatctttttttctgtataacaaatattagctcttaaaagttctttgtaaaattaagaaatttcggaagtaatgatgcttttttttgtgaaccacacatttcaattttatacattgattgacttccacaaaaaaagaggattatcctacttcctctcctcacattcccctctcctcaactttcatatttatttatttatttatttatttttgagacggagttttgctcttgtcgcccaggcaagagtgcaacggcgcaatcttggctcactgcaacctccgcctcctgggttcaagcgattctcctgcctcagcctcccgagttgctgggattacaggcacccgccaccacacccagctaattttgtatttttagtagagatggggtttctccatgttggtcaggctggtctcgaactcctgacctcaggtgatccacccgccttgacctcccaaagtgctgggattacagacatgagccaccacacccggccttcatatttttattttgacaaatttataacattaacattgtcttcagtgatagtccaacagttttgtattgatctatatttaaattaatttggtgttcaccaaaaccttttttctttttgagacagtctcactctgtcgtgatcttggctcactgcaacctctgccacctgggttcaagtgattctcctgcctcagcctcccgagtagctgggattacaggcacctgccactgtgctcggctaatttttgtagttttagtagagacagggtttcaccatcttggccaggctggtcttgaactcctgacctcgtgatccacccaccttggcctcccaaagtgctgagattacaggcatgagccaccgcacccggcccaccaaaaccttttacatggcttctgctcctttatttctttatcgaagtcttctcttaattgccaggatatcatcaagtagtttctctgagagaggctcatagacgctgtgtttcctgatttttttcttgtttgggaaagtcctctttgcccatgtgcgggaacttatttgcataagatccttgggttacactccattagccattggtccactgtcttctgccattaagttctgaggtcagcctgtcccctgcatataacgtgttattatttgtctgaatgcctgaagaattcgttatttttgaatttcaataggtaggtcaagatatgtctcaatattgaatgttctgtgttgaagttgtttgaaacacaacatgttcttcaattcagcagattcacttttctttgtttcagggatgttctcttgaatatttttctgttcaatttgttgggctttctacttcagacacaatttgtcattatattacatcatcttcatctagttctcacttctttctattgtagaggaggaaaaataatgttctctacctttcatagttcttagtgagattcttgtaatcaaagacagattaacaagagaaaaacagaagttgattaacatgtatacctcaggtatacatgggagatacacagagaaatgagtcaatctcaaagaagtggctttgaattcagccttatatactatagttcactgaaacaaacaggagtggggaaggccagttatggagaggtagccagggaaagcatgggtaaactagggtaaggtttgttttgtggatttaagttggtgccttctgcattgacaagtcttttgtgattcagagtcatcctctcctcctggtacagagagaagtcatccttacaaatggaaatttcctttatattttccttacaagatggtaatttgttttcagagctagtcctttgctattgttcaaaataatccttgcgccaaaaaggcatattttggggtggcatattctggtctcctacagtcatatttcagatgttatattctggtctcctacactactttatttatttatttgggacagggtttcactctgccacccaggctggagtgcagtggtgcaatctcggctcactgcagccttgacctcccaggctccagcaatcctcccacctcagcctcctaagtagctgggactacaggtgcatgccaccacacctggctaatttttttattttttggtagagatggggtcttgctgtattttccaggctagtctcaaacttctgggctcaagtgatcctcctgcttcagcctccaagtagctgggaccacgcctaccacacccagctaatttttaaaattttttgtagagacagggtcttgctgtgttgctcaggcttgtctggaactcctggtcttaagtgatcctctctccttggcctcccaaagtgctgggattacaggtgtgagccacctcacctggcctagtttttttttttttttttttttttttttgagacaggatctcactgtcacccaggctggaatgcagtgttgcaattatggctcgctgcagcctctacctcccaccctcaagtgatcctcccacctcagcctcccaagtacctgggaccacaggtgagagcccccatgcccagctaattatttttttttgtagagatggggtcttcctgtgttgttcaggccggtcttgaattcctggactcaaagcaatcctcccacctcagcctcccaaactgttgggattacagtcatgagccaccatgcccagccaatatgcagccttggttagactatttgggctctgctttcctgaaattttgttaaatatcttgtaccagttttgttttgcccagctggaggttgtatcctattcttaggttggaatggctgagtggggagaaggcatactctcaagtttaggattatttagtgaagaagttaaggacatgtcaccccaaaaacatatgctgcttcggcatgttgtttattctgagctgaaggcacttgaaaaacagcagaggcaggaagagctctctgatctacccttttctatataagaacaggccataaaattccccataagaaaggcgccctccctgtacaaggaagagaaaaacatccttaacaccagagactgggaatcagcaccgaaatggatctgtataaacttactaaagcaacccttatcatccagtagttttatctccctccccgtatatttcctggtcacttccccacaatttactgcccctaacccaaacccctttgtctggtcatcacttcaaaaacttagcattgctttgactagaaggtataaaagctttctactctgttcaacttctttgggtcttgggactcttgtgaagggctccatgtgcatctaaaaatttaataaaacttgtatacttttatcctattaatctgccttgtcggtttaaatctttttttttgtttgtttttgttttttttttttttgagaaggagtctcgctctgtcgcccaggcgcggtctcggctcactgcaagctccacctcctgggttcacgccattctcctgcctcagcctctcgagtagctgggactacaggcgcccgccgccacgcccggctaattttttctattttgttttagtagagacggggtttcaccatgttagccaggatggtcgcgatctcctgacctcgtgatccgcccgcctcggcctcccaaagtgctgggattacaggcgtgagccaccgcgcccggccgtcagtttaattcttaggcctattggagatcctagagggtagaggagaattttttttctccccagcagttctggtgatgaggagggaatttcactgcctgccttggctactgcagctgagagattttgggacctttgacaaaaaccagcagagggtagaaattcttaccacttcagtgtcctagatctctgcctgcagggtctgcttgaagcaagactgatgagtctcttgtctttttttctttctacacttacgttagcaggagaaaatatttgtgtgaagtcattctttgggtatggcaactttggcattttctgtttcaagtattcttgttttctatttgatcccattcttcccagagatggtcattgttttcctttgtctttatcttttgtgtcatatgctacaagggggaacccagctctagggcctatagtcctgtgttcgagctggcctcatggactggtgagtgcacacttctcaccagactggtgtctgtttagacaacctttgttgtgagtccctgaagcaaaaacaagatgagattcttcttttacttgttttatgtactgaaagcttggctttgtgaccagtgagaatattctctctgggccccactagctcaggggagtaagtgttggcttgccttgtgtcaggtggctggcctacaggctggaagcctgagacatgtgatgacaggtagcattctgtttgtttgaacatgccagcttccaggggaggttccagtccataaggggcctttgctgtctcaatcttctttgtcttattagtactgggaatatcccatcctagggttgcccacctggtgctacagattagtgggtatgtggctggaggtgtcccacatcttgtgagagaccagagacagcacttccacaaacacagttctcactgctggtgacggcaaaggtctttgctttcctaggccacctctggtgtgaactttttaggatcatgtgcgtgcatcttctacactcactctagggatgcctcttgcatccatggtaaagatttattctaagcctggaaagttatttcacagtctttccatgaaaaggtttattggtttgagttgctattggaataaacacattcttggagatcctatttgtcaatggccagacgatggatcctttgaattggaaaaacttccctatttgaaaaaaattttgtcatcgaaaacaactgtcctattggcactatgggaacatcacattgtaaagaggatgtagaggagggtaacagctagctttagggaagaacagatttagaacaaaagttaaagtccacacacactacaaatcctccttctccatccacctatacttccctttacccccaactgcctgtccctgaccctccagaagatcttctggatctctgggcccctggcttgaatgcccctcctcaaaatatggccccatctcttcagcaaaatcctttaacttgtaaaacttttccaactttttagaaaatcccttaaacattcagctgcctgctttaacttccctttcctgggaagattacagaacacactctggcctgatctccaggcctggggtatacagtttgcctgtgtaaatgctgatagccaggaagtaaatctggcccaggctccaggaagtctcctcctacttcccagggttctgcaaactccgtcaactccagaccttactgtgccgtgcatgttatactggatccccaccacaaagaatttgtctccagacagcagtagaccctttattttatttttaaaagtatatatattttttgagacggagtttcgctcttgttgcccaggctggagtgcagtggtgcaatc

SEQ ID NO: 96303 - DNA, 28426 bp, Homo sapiens
ggaaggatgaggctataggaatttgtagaaggctaatgccaggacttcaaaggcacaggcaaaaaaagaaaaactagacaaactggacttcatgaaaattttaaaattttgtgtctgaaaggacgctatcagcagagtaaaaaggcaacccacagaatgggagaaaatatatgtaaatcatatatctgataagggattgatttcagaacacacagaaaactcaacaacaacaacaacaaaccaaacaatccaatttaaaaataggctgggcatggtggctcattcctgtaatcccagcactttgggaggctgaggtggggaatttcttgagcccaggagtttgaaactagcctggtcaacatagcaagatctcatctctacaaaaaacttaaaaaattagccgggtgtggtggtgtgcacccgtcatcccagctactcaggaggctgaggcgagaggatcacctgagtctaggaggttgaggctacagtgagctatgattgcgccactgcacttcagcctgggtgacagagcaagatcctgtcaaaaataaataaacaaataaataaaataggcaaatagcctggcagagtggcatgtacctgtagtcccagctacttgagaggctgaagcaggattgcttgagtccaggcgttcaagttcagcatgggcaacattagggagacctcatactcaagttaaaaaataataatataataaataataagcaaaggatttgaacagacatttctctaaagaagatatatacacaaatggtcaagaagcacacaaaaagatgctcaacaaaactaattagagaaatgcaaatcaaaactacaatgatatcatcacatacccatcagaatagctacaatcaaaaaaccagaaaataacaagtgtcagtgacaatatggaggaagtggaatctttgtacactgttggtaaacaaaggaatgtaaaatggtattgttgctatggaaaatagcatgagggttcctcaaaaaattaaaaacagaattaccatattgtggaatcctagtaagatacataagcaacaaggaaggggccccaggtggaggaaagcaattctgctgagacacggctaatcacaggcaacccacaggcacaacatcctgttcccaaatacctcgttcaacacatagccccagtagagtgaccttatctgcacatcttctctgctcatagccccttcagtatgaccctataaaacttccctccagtccctgactctgcagatagccccttctctgctgtgctgcccattgttctcttgcaactctatcttcgtattttctctaataaatctgtcctctgtatctatgactgtcttggtaaattctttcaccacccacaatgccagtcccagccagtaacacccatgacacacatgacccagcaattacacttctgcagatatacccataagaattgaaagcagggtctcagaagaggtatttgtatatccatgttcacagaaacattattcacaacacaagtcatactcaatgtcactgatgagttcttggaaactgtgactttaagtgaaaccacatacagcaggtccttaaacaacatcacttccttctttattataggttctgacggtcgcagtttcaagagccaatgatgttaagtgaagctttacagtaattaaaatctgcaagtgcttcggtgtagtggctcacagctgtaatcccaacactttaagaggccaagacaggtggatcacttgaggacaggagttcgaaagaattcttaacagaacccatttaggattaaacaagtttttgtgggtctgaagaaactccccaggcctccacaaacaagttgactggaggtctgaaggaacttcccaaacctccgtgatttagcaggagataagataagggtaatcaccccagcacctggatccatttaaattaagtaaatttactaaggctccagaggaaggtcctcaggactcagaccttaattatagattttaaaaagttagtcacttttgtctttagataagtgcacacttacatgtagacatatagcttaaaaggtctacaagctctggaaaactgtaattttaagttggtctggcgataatttccaggacttctccctgtaaccagttacaggaataaaaactctcttctggcagggcgcggtggctcatgtctataatcccagcactttgggaggccaaggcgggcggatcacctgaggccgggagttcaagaccagcctggccaacatggtgaaaacccatctctactaaaaatacaaaaaattagccgggcatggaggtgtgcacctgtaatcccagctactcaggaggctgaggcaggagaatcgcctgaacccaggaggcagagatggctgtgtgagccaagatcgcgccactgcactccagcctgggcaacagagtgagactctgtttcaaaaaaaaacaaaacaaaacaaaaaaaaaactctcttcctccccagttcatctgcatctcattattggatggcaagaaatagcagcctgaccttcagtttgatatgagaacacgggaagccaggggttgcagtgagtcaagatggtgccactgcactctagcctggaagacagagcaagactctgtctcaaaaacaaaacaaacaaacaaacaaacaaaacctagatgcaacccaattgacagatgatggataagcaaaatggggtaaatacatacaatggacaacggacaattcagctttaaaaaggaaggaaattctgacatatgctacgacataaatatgccttggggatattatgctaagtgacagacaaatattatatgattctacttacatgagaaatagagtagtcaaaatcataaagacagcagaatggtggttaccaggggctacgtggaaggggaatggagagttattgtttaacggatacagagttttagttttaccatatgaaaaaagttctggagttggatgatggtgatggttgcatagcattaggaatgtatttaataccactgaacggtgcacttaaaaatggttaaaatagtaaatgttatgtgtactttaccacaatttttttaaaggctactgctgccaggcactgttgattttttccactcactcttcacaactaccttttgaggcaggttaaaattctcatcttttttaaagaggaggaaatgcaggttatgagcaattaggtgtcttccactttagcttccaagatgtgatgatcacagacatggcttctgaattctagagccagaatttgaagataggcagtctatctccagaaaaaacaaaacaagacaggctctctactacattagagcttacattcttgtagggacagatataaacaaccatgtaagagattaaaagctttcatatcacagtgacagatgcaaaatacctttgaaagcaggtacacagctgaaaacacagtaacctttagtaaacatagctattagaaccttccctgctctgattggaaagggcgcagaacacggtaatgatcctttgagaaccccaagaaagggcaataatgtggaaagagaaactgggggtgaaattttgctgcagtttatctccagctggatttgattgaatactaccagagcgagtatttgaaggatttgtatttggctatatgagaatatctgtaatcagaaatggcttataaagggattttcatcaaggaatgtagttttgtaacaagttcaaattcctgctggaaatttgttaaataccactggttctttgcatcatgtttccagcaaatccctatgtatattgcctcatcctgtggagtggcataattcaaattaaactgggagaataggggtaaaaagagaacaagatattttgaggctggagacaactttctgactttaagtgtttcacttcctctttacctgcttctattgcacagggcaaatagcttacagtatatatctaatgaagaggattaaataaattaatactttaaacccttaaaatgatgcttgaggtcaggtggggtggctcacgcctgtgatctcagcactctgggaggccaaggcaggtggatcacgaggtcaggagttcgagaccagcctagccaacatgatgaaaccccatctctactaaaaacacataaaattagccgggcatggaggcgtgcaactgtaatcccagctactcaagaggctgaggcaggagaatcgcctgaacgcaggaggcagaggttgcagtgacccaagatcacgccattgcactccagcctgggcaacagagcaagactccgtcttgaaaaaaataaaaataaaaaaggatgcttgacacgtaacaggtgctcagtaaatgttggctattatttagtgacacattatttaataattgagtcagtttcctcatctgtaaaatgaaaataacattgtaatttctttgcagagtctctgagataataaagtacactgaatatcaagcatttgatctttgctatgattattcacaccgccatgatgcaactcactgtctccaaggaggtccaaatagccctattaagactgtattggtcaggtgcagtggcttacgcctataatcccagcactttgggaggctgaggtgggcggatcatttgaggtgaggagttcgagaccagcctggccaacatggtgaaaccccatctctactaaatatacaaaaattagccaggcgtggtggtgtgcacctgtagcctcagctactggggaggctgaggcgggagaatcgcttgaacccggggggtggagattgcagtgagccaagatggtgccactgcactccagcctgggtgacagagtgagactgtctcaaaagaaaaaaaaaaaaagactgtattatgactttcctgagacctaggcacttttgccttcaagggccccttcgtctaagttattaaaaataatattttatgactgcattggtataaaacgaacataatacaggctggattcgttatcatattcataaacattatggtttttttaaaaaagaaatttaaattaaaagactttcgtagacccctaaaactatcatgggttcaggcaggagaatcgcttgaacccaggaggcggaggttgcagtgagccaagatcgcgccactgcactccagcctgggcaacagagtgagactctgtctcaaaaaacaaacaaacaaaacaaaacaaaacaaaaacctctcttcctccccagttcatctgcatctcattattgggcggcacggtacttactgtgcctaaagaataagttggccctgagcctctttacctgtctacatattacctgtcttcatattccttagcataggtgggcttctcggcaagatgactttgcatctgtgggactagaacctagcctttgggcaggtggaacgcaacaataagcttgtgccctagagatacagatctcagctctatacctttctagactcagcttcatccgcaaattagcattaattgggatggtgaataacaacgttttagaaatgctaataatgtaaacacgatctatctggctacttcaggaaaacccctcatatagctcgtgctccgtctctcctgtcaagccccaagcccacaacttgtcccggctccctccggatcccaccaaggtcaccctggaagcgtcctcccttttctcgccccgcacccgcttcacgcccgttctccctaggccagcacccaccagcagccttcggaaagccacgagtgaggaagcccccaaatccgaggcgagtgccaaggggccggccagacagagctgccaccgcagtaaccgaaacccgccgcaacaaactcatggccgccatggctactacgggcaggaggaagaagggaggcgggtcacggaagctgagagagccaatttaccaatgaggacaaaggcaggatgtggccatcttaagtgagggcaagttttctattctcctcaccgccggcttgagacgccggaagtgacgctatcgttggcggaaacgcgttttgccagttatgsgaaaacatggctgcggccggtttggcccttcttkgtaggagagtttcatccgccctgaaatcttcccgatcgttaataactcctcaggtccctgcctgcacagggtaagtgatgtataaagtaggtttgcccacctctccaactttggatcttgtttggttgccgagatgccgagatgccgagaacaactcaagaatggaacggccgcctggatggcagagccggagcccactttggtgaggagtgagtgaccttggagaagtcgctcacctccgacatttctattccttcctcattttgttgctgcctgctgtggacaagacagtatatggggtttgtagatgtccagcatttgttgaagtaaatacatctataagtacagaagcatcctcttgggctgggtgaggtgcgaaaaactttaccgaagatgtttttgttgtgatactcaagtctgtgtcaagtttggatggattaaaaaagaagagatatttgtatttacaggatgtgttacaatgaaagtaactggtaacttagtaacttcttttatttatttatttttcttggtcctggatccagtgaagtatccatttattacattggttgccatgactctttagtctctatccggaacaatttcttttttttttttttcttaatgttgttgacattttgatgagattagctttttaagaatcttattcatttggatttgtctgattgtttcctcattataagatttaggctaaatatttttggtagggatacaacacttgtgataaacttcattatttagtttcaaatcatctcaggtcgttaactattttttaaaaacaggatttttgaattactgcataataatttatcatccagatgcacagtaatttttaaaccattcttagctgcgtatttacataattaaaaacttgacatcctatatagtgctttaataaacatcttaatttataaattcccatctataataattttttcagttgaaacttctagatgcagaattactgaattaaaggaggaagtatttgaggctcctgatacatgttgcaaaattgtgaggtttttttgtttttgttttttgagacagggactgactctgtcgcccaggctggagtgcaatggtgtgatctcagctcactgaaacctctgcctcccaggctcaaagcgtcctcccacctcagcctcccgagtagttgggactataaggcacgtgctactatgcctggctaatttttgtatttttgttaaagatgaggttttgccatcttgcccaggctggtcttgagctcctgggctcaaagtgatcctcccacctcggccttccaaatttctgggataacaggtgtgagccaccgtgcccagcccacatgttgcaaaattgactgctctttttacctgcgcttgcacccattagcaatgtaagaaggacccaaaaatgttaccttaaaatataattgtgtaactatgttacctctgaaattataaggtagcagcttctataatgcagtattaacaatactttctaaagcattttcaaaatttattgtggccaagcatggtggctcatccctgtaattccagcactttgggaggccaaggtgggaggatcacttgagcccaggagttcgagaccagcctggacaacatagtgagacccagtctctaaataagaaaaaaaaattaattcttgtgcagaaaccctgagtagctttttaaaatgttatcgatgacaaaatgattatgtttattatgataatgtttattgcttataaaatccagatattataaaacttttacttgtttatgtgtgttcaattgcaggttttttcttagtttgttgcctaagagtacaccaaatgtgacatcctttcaccaatatagattacttcataccacattgtcaaggaaaggactagaagaattttttgatgacccaaaaaactgggggcaagaaaaagtaaaatctggtgagatacttggatttgtcaacattagatatatttatggaacccccccccccgccccgcccaaccatcgttctaggattatatatccagtttaggaattatttagatgtttcctttttcagttttcttkgagactgtctactagagaaaattaaagggacaatataatagtagagttaattgttccttggcagattggcaagatggttagataaggaataggctgaaattattaactaaagtaaggtttagggcttattttagattttattttttaatgataatttaaagtttgtttatttatttagagatggagttttgctcttgttgcccagactggggtgcagtggcacaatctcagctcaccgcagcctctgcctctcggattccagtgattctcctgcctcagcctcctgagtagctgggattacaggcacgtgccaccacgcccggctaattttgtattttaagtagagacaggatttcgccatcttggttaggctggtcttgaactcccaaactcaggtgatgcccgccgtcttggcctcccaaagcgttgggaatacaggtgtgaaccaccgccccagttaatttataatgacaaagtattttgtcattagggtgtgaaaatacgttctgtactaatgctaacattttttgaatgctattgccagtcatgttaatagtattttcgtatgttacctaatttatctctaattacacattgttatatactataaaaaagctgttatatattttacagataaagaaacaggtttagacaggtttagagagcttaaataatttgccaaagggcacatggctagaaatgttatttcatgttatgtattattttaataggagcagcatggacctgtcagcaactaaggaacaaaagtaatgaagatttacacaaactttggtaagtatactaagtacattaacatctagacgtttgaagccgttatagtgtaacaatgaggtgaaaacaatctatctgatataagaaattgagtaaagcgatttcttttgtagtactatggatgataaatctgatgtttaagatcatgaaagattttatatgacagaggttagattatgacaaatgtcacaattctcaagtagttgggaattcagaaattttactgtaatttacattggtcctactaacatgtttatactagcaatttcagttaattaataaaatgaaacagagaatagttggtggcttttgtttttttctttgagacaaggtctcgytctgttgcccaggctggagtgcagtggtacagtaacggcttactgcagccttgacctcctgggctcaagtgatcccccacctcagcctcctgagtatctgggaccacaggtatgcaccaccacacccagctaatttttttgcgttttatggagagggagtctccctatgttacccaggctgctctcactggggctcargtgatcctcctacctcagcctcccaacatcctgggattacaggcatgagccactgtgcccagccattggttatatttaraattctctcctttttattacattttcatgatctgtaatctttagtgtatttgctttggaaaggtgtgttggaggatgcatttaattgagaatttaggtagatttttctggcaggctctgatgaattagggttgagaggatttaagacagggttgcatttttaatgtactatatgtagcccaaagatatgttttgtttggactgtaattgttttttaaattgggaagtttcacacagaaaatattatttttgtcggctcttgaataatgagacctgtgatttggcaacaccggccctgcattcctacatggcaacaacttggctggtstgtggagcaactgccccttctagatggagcagggacacaccacttctcggccaccctgtggttctttcactatgtctacttccttcataattgttatctgcctagggactctagtagacatttgcttttttttattttatctttttgagacacagtctcactctgtcacccaggctgcaattcagtggcgtgatcttggctcactgcaacctccacctcccaggttcaagcaattctcatgcctcagcctctcaagtagctgggattataggctcatgctgccatgcccagctaaatttttgtatttttagtagagatggggtttcaccacrttggccaggctagtcttgaattcctgacctcaagtgatccgcctgccttggcctcgcaaagtgctgggattataggcatgagccaccgtgcccagccaacatttatgtttgttgatgtaaagcattgtttatctttcatgacaaattaaagaattgtgaagtgtttatgaaaaccactgatactatgtttattcattatagaaaaataagttgtattaaagcactattagttactgtgggttatcagtgaaaggatagttaaggctatttcaacattcatcatggctgcaaccaactaaagttatgccatttctcttttttgtttttttttttttgagacaaagtctcgctttgtcgcccaggccggagtgcaatggcacgatctcagcccactgcaacctccgccttccattccaggttctcctgcctcagcctcctgagtagctgggattacaggcacgcaccaccmtgcccagctaatttttgtattttagtagagacggggtttcaccatgttggccaggctggtctcgaactcctgacctcaagtgatccacctgcctcggcctctgaaagtgctgggattacaggtgtgagccactgcacttggccccaactcgtattcccaaatagatgtattcagaaaatctgccttcactttagctctgctgcttcagtacctttgattatgtttgctctgctctcccttctatcataaattccatctctatgactctttccctggtcatcttagctagaagagatgtttctcatctcccccacttaattcttctggtacttattgcctgtcccacttattatcccacatcacattacagtttcagaagcagcgtggtggagttaaaatagaatggattttatacacagagatcagggatttgaatcttgaattacctgtatgacccagaataccttacttctctcagccttagcttcttcgttaagtaagtggaaataataccaacctcagaaggtggttgtgaaaactagatgaaataagtgtatataaaatgtttaacacattgtctggcatataataggtactcagtaaatgttatttatcttccatctgccttctctactctccactcagaatgtaaggactatgttttatgcctctttgtagctctcttagcacttaatacatgtggcaaatggaaggtttattgaacacatggataagcaaagatagtttatgtataatggattattctttgtaatcatattctatatattgagatttctaatatgtcttttttttttttttgaagcaagatctcactttatccccaggctggagtatagtagtgtgatcttagcccactatagcctcaaattcctaggctcaagcaatcctcctgccttagtctcccaaacagccggggctacaggtgtgtgctgccatgcccggctaattatattttttattttttgtagtgatgtttattttttctagctgtgttgcccaggctggtattgaactcccaaggtcaagcgatcctcctacctcagcctcccaaagtgctgggattacaggtgtgagccacagcacctcgcctctaagtgactttcaagtacagataattaattttgatgtcagaaatcacaactttattaacataaccacagaatagcatcacaaggtttgtgttcttttgtataggtatgtcttactgaaagaaagaaacatgcttctaaccctagagcaggaggccaagcggcagagattgccaatgccaagtccagagcggttagataaggtaaggattgggagaggctggagactggtatacatgattacagctaaaaggagtgagtatgtggttcctgtatttcttgtcaaatagatttttttttcttattcgtttgatttttagtaaatttgagtagtgcaaccatcatagctcctttggaaacatttccatcgcccctaaaagaaatctcatactcacctgcagtcattcctcatttctacctgcaacgtgttttttgtttttttttttttgtttgtgtgtgtgtgtgtgtgtgtgtgtgtgtcagtgtgtcaggtgggtctcactctgtcgcccccaggctggagtgcagtggtgtgatatcttggctcactgcaacctccacctcccaggatcaagcaattctcctgcctcagcctcccaagttgctgggattacaggcacataccaccatgccaagttaatttttgtatctttggtataaatgtggtttcaccatgttggccatgctggtctcaaactcttaacctcaagtgacctactcaccttggcttcccaaacctacctgcaacttctaacatacatgtggacaaatgtttttgagtagatacctaggagtgaaattgctggcttatatgataaatctatatttagcattttaagaaaccgccaaactgtattctaaagtagctataccactttacatttgtagttctggtttamccatttccttagtaactagatcagttttttactgctttttaaaataactgtggtaaaaatcacataacataaaatttactgtcttgaccatttttaagtgtaatagtcagtagtgtttagtatatttacaatattgtgagaagttggttacttttttattttatttttttgagacggagttttgctcttgttgtccaggctggagtgcaatagcacagtctcggcttgctgcaacctccacctcccgggttcaaacgattctcctgcctcagcctcccaagtagctgagaccacaggcacacaccaccactactggctaattttttgtatttttaatagagacggggttttaccatgttggccaggctggtcttgaactcctgacctcgtgatctgcccgcctcagcctcccaaagtgctgggattacaggtgtgagtcatcgtgcctggccgaagacttaggtttttatttagatgtatgtttttactcgatgctttcaagatcaaccctttattgatttttttctgtggcatagtaagtagtgagaacagaactcagtttttataatagcattagtcctgctacctaaccttagctactttagtttcctttcctcacaccagtcgcagccatttttaccacactgcctttaagatggaaggacataacgatccctggagaaaatcaaagaaggtataaaatgaaacctcattgatttaccctaattatggagaaggttattctgatgtagtgaaagttgagttatataacatttttttcttttatctttattttgacataatattagactcacagaaaaattacaagaatagtagaaggaattctcatataccctccagattgctctgttttactgcatttaccttatccttctatgcatctatcagtcctccatacacagtattttttctcaaatgtttgagagtaagttgtacacatgacatccctttatctataaaaacttcagaaaaaccaggatattcccttatataaccactatgtaaatttcaaaatcaggaaattaacattgatacagttctgttagctgtaatctacagatcttattcagagtttgtcagttatcccaagtgtcctttatggcaaaagaaaattctgcatcatgaattttcatgtgtctcttcagtctcctttaatctggagactcagtctttgtgtttcctgacattgaacttttttaaaagtatagggcctgggaggttgaggctgcagtgagccacgattgcaccaccaaactctaggctgggtgaccgagcaagaccctgtctcaataaataaaaaataaaaagtgcattgacaagtaaggatgctttataaagaacacgttatttgatgaaaaagcttttgctataatggtgctgttacagaacttttgaacttcaaccgtggattatctgctttaaatatgtatttcagaggtgaacttcagcccagtaggtyatatgtactgcactttctcaatcagtagaacccaaaataataaaagtttactccagagaagctgaaagtgaccataattttttcaaacttcatatacatctggtgtttccagtgttttgtgacatactactaaggaaactttattaagcaaaaatgtaaaaaaaattctcaatataagatagaaaccgaagatttggaactgtttaaggaagagtaaaagagaaaagaattataattgggatataattcttatcactgatgtgagttgatatccagttgaagcatattacagacaaattttacttagagaataatataaaaattaagggagaaattatataattctggcacaatagttagctatgattgtaactaaagtattaactatccatttgagataaatgaccctcactatatgtgcttctcttcagagtattagtatctatttatcacacaaataaatgacatgttagtccccttgtgtttgaaatacagaaacaaggcaaatgttgaaagattgattataattttgcaagtgtatctttttgtctcttttaaaaacatgtgtttcaagggctactctgtaatgttaattcttggctgtaaagagaagtgtatactcttaccctggaacacagtcctattttatattctctcaactgacgctcctggcactgagaaacttatagaaaagaaggctctttgaggttgacttgttttcaatraggtatatctaaataatacttttgattttccttcacatttcttggcatgaacttctgaatgttaattctgtggacttggtagccatttactttctatctttgtgagctaacactggatttcagctggaagcctcaagtcttacccttgcttaggcaaactctttaatgcagttagtgaacaaccagctttactaaaaatttctaaagattagagagttttatataaagcccttatcaatgtggtccctttactctcctaagtttgcttgtcttcaaaatagaatttgtcttagtcatcatttctttttcagggattttgtagaaaataaaatagttaagaggaaggcatgtgaattcagctactgtaaggcatttagtgaagttgaggatagcagaagtgctgagtgtgaactgagcaggttatgggccaggtgcaatggctcacgtctgtaatcccagcactttgggaggccaaggcaaatagatcacttgagcccaaggagtttgagaccagcctgggctacatggcaaaaccctgtctctaccaaaaaaatacaaaaattagtcgggtgtggtggtgcatgcctgtagtcccagctacttgggaggctgaggtgggaggattgcttgagcctgggaggcagaggttgcagtgagccaagatcgtgccactgcactccagcctggctgacagagctagaccctgtctcaaaaaacaaaaacaaaactgattatgaagtaatttatctaaatttgtggctttcatatctttttcagatctcatagctacctgggggattataatctgtgctttttttgaggattcttatgagaaacaaatgtgcttatgcagtatttgatatctgttgtgatgcttaagggacatacacataaaatggctctcagtatgtatttaggactatgaaaaagtttggcccatctcacattacaatccccaacatatgaatatttatatgtaaacaaatagaaggccgggtgcggttgctcatgcctgtaatcccagcactttgggaggccaaggtgggcagatcacctggggccaggagtttgagaccagcctggccaacatggtgaaaccccatctctaataaaaatacaaaaaattagccgggtgtggtggcaggtgcctgtaatcccagctgctcaggaggctgaggcaggagaattgcttgaacctggaaggtggaggttgcaatgagccaagatcacgccactgcgctctagcctgagtgacagagcaagactctgtctaaaaaatatatatatgtataaaaccctgccaatatatacattataaaacaatagaaatcttaaagaggtaaaaataaatagaagtttaatagtatcatcttgcatcttgataaatctttggagattcatatctggatggactgctattcctttccctgtagtagcaacagctaccaagcaggccacaatatctgtgtctgcatgtcaaggacacagtgattagttgagaccagaacatgtcttttttaatataatgaaaatagcaaattattatcacttcttattagctcattgagttttgaaataacwtgaatcaaattgggtctccaaaaggaatctatgtaagtgtatctcactccaaacaaaactaatggaaatatatttgtagttaaaactgtaagctttttaaaaaatacagaaagtggtaatctagacacccatgtagacatacttgtgccaaaaagatttttaggaaatacttaacagagtggttctttggcataaatattcataagttttctgtagcagaagtgtttatacattctcttttttgggaattttgtagtagatgattgttgaaattgtatctttctattctyttttcaggtagtagattccatggatgcattagataaagttgtccaggaaagagaagatgccctaaggcttcttcagactggtcaagaaagagctagacctggtgcttggagaagagacatctttggaagaatcatctggtatgtagttaacactgtggctcttctaagatgagagtggaaatccatgcctcattcccctgcccaatatcttttaaaaaaaaatttgtaccatatgagataatattagagatatgtctaataaaagaagaggccccacacccctttggactttaatgaaggaggatatgaatgaaggtagctttatctggtaaaaccagcccagacatcccattcctatgattcagttacctataagtctttattgtagtggttcttagtcttatatgaatcacaaggccttttgagaatttgatgaaagttagggatcgtttcctcagaaaaatgtacatgtacacatatcacttcagaaggtataaaatccatgaagctaacttcaggacacacacctgccctctttgcacattgagaacctggaactattttttttaaagtctcagggaatgtcacatgaaccagtttcagtttgctcccactgccatcaggataagccctagggcaaattatgaagtagtttattttttatacctccttgtttctcctacattcaaatcccagagtcttgtcagcctttgggaaaggatctggtaatcagccttcatgctgaggtgtaaataactgagaagacmtggtgtaaataaacctccttcggtggggaggctgttcaacccaaaggtaaataaacctcccctcagaaagaggtttatttacctttgggctgaacaaccaagatgaaatatcattagacttttaaacgtaggcagaatggggaaggcattttggttagagaccttccctgtactcttgacattataccacttaactcataactcattcggtaggttcttttaatggggtttaagtccaacacagaaaagagaaattgccaaagcatctcactaaaaatgtttatgttttattttctactaatttttatttggactaacccttttgaggtaaattaggaaagtgaaaatgtattaaatgttttctttaaggcaaataactttttgctttattggcaggcacaagttcaagcagtgggttataccttggcacctaaataaaagatacaataggaaacgattctttgccttgccttatgtggaccattttctcaggtgagcacaagcacctttaataaaacatattatctttataccagatgacatatggtcatatatcataccagatgacataaagaaagcttaagctgtctttaaattttaatttctgttattacataagtattataaaaaataggaaagtcaggctgggtgcggtggctcacacctgtaatcccagcactttgggaggccgaggtgggtggatcacgaggtcaggcgatcgagaccatcccggctaacatggtgaaaccccgtctctactaaatatacaaaaaattagacggacatggtggtgggcacctgtagtcccagctacttgggaggctgaggcaggagaatggcgtgaacccgggaggcagagcttgcagtgagcagagatcgcgccactgcactctagcctgggtgacagagtgagactccgtctcaaaaacaaacaaacaaacaaaataggtaaaaaagaaaattgaagtcatatataagctcaccttcagaaatagccacagtcagccaagcgtgttggctcatkcctgtaatcccagcactttgggaggccaaggcaggcagattacttgaggtcaggrgtttgagaacagcccggccaaagtgacaaaaccccatctctactaaaaatacaaaaattagccggccatggtagcatgtgcctgtaatctcaactacttaggaggctgaggtacgagaattgatggaacctgggaggtggaggttgcagtgagctgagattgcaccactgcactccagcctgggcgacagagtgagacttcatctcaaaaaacagaaaaaaaaaagaaatagccactgttaacattgtagtatgtatcctttcaaaagttttattgcctttctattcttgtatctatatgtaaatggaaaaatttctactgttatgttaaaatgaaggtccaaataattcagttgcatacaatgtgagttcatgttattgcaaggctgttgaaaagaaatggcgctaggaagagaagtctgttatattatatctaaactcatgttgtcctgcagaatgttgatctccaaatatttcctttagcacatttttcctgcattaggtttatcattgaacagggagaacatagggcttctgttatgatagaggagtgcagtgttcccatgaaccactcactggtaactatacaaacttaagatttttttttaaagagctattttaaaacacttgggccatatccaaaaggagacaaagccagaggatatagtttaatccccaaaactgcaattagaagggaaaagtattgctagtttatggtttcctgggccaagggtgctatccaactcccattgctgtggctccagagagagacagggcagaggaaccgaagggctcctggctaaaggtgctagaaatcagaattcaaggctgggaaggcagctggaaaattaaaggggaaatcatagcagcacgatagcagcacaagaaccacagcttttaacaactcttgaataatacgttctacttttagcaagttcctcagaaaccgattttcccgccccgattttcataccaaaacaaatttttaaaaacaatttaaataggaatggaatgtatctttaaccttggctttaaagtgtttagtgtactttagaatcacatttaaaattactcatctccctactgaaccagctacctctcattttatctgtagtacatccagtctacattagccctaaaccgtcagtcatctttttcatcaccattgctatatatttaatcagtccttgatttaattcttgctgcagaatgtctccaggatctgtcttttcttctcccattgtctttgccctagtgcagtctgtgtcttcatcaaattgaattaccgaacttcttgactccagtccaatcaagtattgcttcctggctaattttcctcaagactttttttttttttttttaatcacatcaggccttttcagaaacatacaacagcttcttgtytacaggacaaaatcttaaactcttttcctcccagtattcctgcaagtcttagctacctacctttcatcgaagtcagaactcttgccttgtttcctaagtgttccttgcttattttccactgttgcttcttctrttgctacagcttttaaatctttgctattcacatttaagacctagttgagatgctaagcaactgaagaaatctgaccactttttctctgagattgctccaagcccagggttgtgctgtttgatccttttgtcccttagtcatacagggtgaagttataaatcactttttttcttttttttttttgagatggagtcttgctctgttgccaggctagagtgcagtggtgcgatctcggctcactgcaacctccacctcccgggttctagcgattctcctgcctcagcctcctgagtagctgggactacaggcatgtgccaccacgcctggctaatttttgtattcttagcagagacagggtttcaccatgttggccaggatggtcttgatctcttgacctcgtgatcctctcacctyggcctccctaagttgggattacaggcgtgagccactgcacctgtccatgacataacttttaaaataatgtatgagaatgtatcaatccagyatcacttttacaggttttatacatattctaatgattttgtttttgaaactacctttttaagcctcaccttcagaatgtagcatcatcatcttaatattaagaatagcaaacctttattctttcagatgggtctttgtttttgtaaatggtcaaaatttagttggagcaaagactgatgaatagaatgggtaatctcattttgactttgttcagcctttatactttttttcctatatatgtgcatattttttacttcatccagctgtaatacgtgttatctcaattttctatgacctctcccatagcactggcatattgtattgtcttttttccccccaaaacctcatttgtaataacttcagcagtacatctttattgctgtattttatataaacttatttctattgaccaatatcctgtaagatatcaattcaaatagagcttggtatgcaaggatttttttcattttcaatttttacaactcccaagttgaccctacaggtcaagtaatttatgttgtaatttatgcagcaaatgtgtcataccctgggatactgatgtgtgggaacaaactcatttaaagaatagtaagtctagccagagcctaagaatttatttttggcatcatgagagatatcctgagacttatgggaattccctactttcaaatagtactcactctagcttatcatttcccctatacacagaataacactctgctaagagatgatgcttagtcatatgaggattgaacttaaggcccaatttgttacaggttcataatatctggacattctttctagtcaggaaatagggatagttggtatagggtttcagatgctcttgacttgtgtaggtttacagtgattactatkcaagtttaataatatatataacacaccaaatacagggactggcatgtttgaagctttgatgtaattgatttatgcatattttgatagtattgaataacaaggaaatatttttgtataaattgctgttacgctttttttattctagactggaacrtgagaaacgagcccgcatcaaagcacggaaggaaaatttagagagaaagaaagcaaaaattcttttaaaaaagtttccacatcttgctgaagcccaaaagtcaagtctygtytaagatgtctgaacyattaaatttaccattttgtttttcttgaatagtctgtgtacaggagtaaatatgttaagtggtttataaaraaattctgtttttagtcaagtgactttactaatcagttgttctaagtgtgaatatggcatgctaattagctaatttggtagaagctaatttgcttctaaaaatcaggtataaagttcagatgagattcccactttataaattctgacatttaagcaggctttaaatgtcacctgctaccttagagtgtgaaggtgatggtaactgccacagcaaaggcaataccgtagtttttgaatttgaataatagttttacctctgttgttaataggctatgaagaggatgtgggtattgctgttaataaacggaggactttgattcaaaataatgagaaatacatttagtccttaaagtagtaatcacagtgcacaacagtccaaaatatatttctggaatggctaatttttatttaattctgtaagcctaaggtaaaaagcataggcagtaacttttactagtcaataaaaagcagttctaccaatccactggtaattaatacactaaacagagttggaaagcattttactgaaagcaaaatatttagagaaaatagacatttatacaaaattataaaatgcttgtaataagaataagtgcatttcaaggaaagcacaaacttaatttatagagccagttaaagctttaaaaaatttaagtggaaattgaaatatgcaaaaatgtataaacattctacaaaagatggtcattcttttcctgagtatactaaagctatgaaacgtaaggtgacaaaaggaaggtagaagcttgggaactctttctcaagggcattttctttctacacactgcttccctccttcttcatattcttgcttggaaatccacatctgttgaaaggtaccctgtaaaatggaaagaaatttatataattatgccttacttcttactagaaatggcttaaaaaattttttttttttgagagaaggtcttgctctgtcagccaggctggagtgcaatggcgtgattgtagcttacaacctcgaacttcttggttcaagggatgctcccacctcagcctgggactccaggggcatgccaccttgcctaattttaattgttgtagagatggggtctcacactatgttgcccaggctggtctcatactcctgggcacctgtgatcctcctgcctcagcctcccaaagtgctggaattataggtgtgagccactgcaccagcgttttttttaatatcttattttcgtaactcctaaactttgaataattcatttaagagtcccgtcccccaaaatagtactcgattatttctgccctcctccagaaccatccaaacacactatttagccttgcctttatggttaaaaagaatactaagtccttctgtatctgttacattgtcaggatttagaaaatatctggcaaggaagactgagggtttaggtgtgatggcttgatgccaacctaaggcaataacagaaactgtcagaaggcttgaatgagtacttaatgacatttacttttgttgctctgaggtaaagggcatcctccccctttatatacagtatacatatatatgtatataaactgtatatatacagtatatatgtatatacataagtaactatatatacagtatagatataagtatataaactgtatataaggggagaaatgctctaagtccaggatgcagaaaagtacaaggactttttgtccttattcaaggcagatggtagtccaagcaacatcttacaccccgcaccatgacttcaccatttgctccaagaccaattcctgacttcctagacctcactgtagatctcactgcagactggggaatgaccagaacttgagaagcaatgttttcattttaaatgcactccagacaagccctgaccagtgccaatgggggtattattagaaaaggcatgcatacattaacatatttccacctctgtttgagaggggacattgaaattaggctgacaaatgtccactaattaggcagaggcattttgttacatcagaacacataaaactggttattccattaggtcttccactcatttgacagttataaaatgcacagacaaatgaagcactggaattattttttgtatttttactaaatttagtataattcagtaagaatatttttgcaaagtagctcatctactaaccaaagaggctagaatggagccgccaatccatgagctaaacctccgttccactgttgtattatttgcaatcaatttcaaccgcatactctgaaatagaagaatatgcattagtacaatcaaatcttgtgactcaacttagaaaattctttttttttttttttttttcaaatagagacagggtcttcctcgccatattgtccaggctggtcttcacatttgcactcaagcaatcggcccatctcagcctcccaaagtgctgggattacatgcatgagccacttgcacccagccaggaaattcaattttgacagacttcataatggctccctgtggttcaaacactgattaaaatacggtaattttgaaatagccaagataacaagcataggttagactaatgtacagacttttaaaagtactttgattatggcttttaacatgcgattatatgatgagaaaacatacaaactttaaaaagctgcatactgaagtatagcattcacaatttctatcctaaaatagcaaatccacacctaacactataaatctggtgctgtgctaagtctttattatttcatttcatccaacaccaacctaattatcatcccaatctgtctccctttctgtagtcctccccaaccttctaactgcttcctttctaggctttcatgctatcctaatccctccttagttcaccccaacccttctaaataaaaacacaaccatcagatatcaggttagttttttattcatactatttccttccaaattagtgcttctgttctgactctcattttctcttgataacacaattttattgcacagtactatcccctatatctcacttcctatatgaagaggtttttttctttctcttaccaaggaatctgcctctggggacagttctcaagttgttgacatcttcctattattctataaatgaacatatttttggggcttttcaaagtgaaataagtatgtgtgcagcaagggtgggtagagtatgggatatgggtgggtagaaggtactggggatagggtaaacatgggtttttgtaggtaagaaagattggtaactattaaatagaatttttttcctgttctttcagagattgttatcacctcctaaaggacaaggatagtttctaactggccttgaccacagcttgggccatgcttatctgtattcattattcagggactttctatgaaatctaatcattagtattatagaccggtgcagtggctcacgcctataatcccagcactttgggaggccgaggcgggtggatcacctgaggtcgggagtttgagatcagcctgaccagcacggagaaactgcatctctactaaaaataaaaaattagccgggtgtggtggaacatgcctgtaatcccagctacttgggaagctgaggtaggagaatcacttgaacccaggaggcggaggttacagtgagctgatatcgtgccactgcactccagcctaggggacaagagcaagactccatctcaagtaaataaataaataaataaatctccaatcaatcaatcaatctaatgattagtattataattcaggtatgctctagatctccaagaatttagaaaatacaaggcagatgtcaactgtgtgcctatatatttagatatcacttttaataatagaaatgtggcacacgtaaaacattattttatatgggaagctaaaagactattaaatatacagatttatagatattgttagggcatatgtaaccactaataaggttttttaaatgtaatcttcagtgcagaacaccttacaaaaaaagcacttgaagttttgttgttgttgtttttttttcctgagccagagtcttgctttgtcacccagactggaatgcagtggcatgatctcggcttactgcaacctccgcctcctgggttcaagcgattctgctgtctcagcctcccaagtagctgggattacaggcacgtgccaccgtgtccggctaatttttgttatttttttttttttttgagatggagtcttgctctgttggaatgcagtggtgtgatctcagttcactgcaacctccacctcccgggttcaagcaattctcctgcctcagcctcccgagtagctggaattaagaggctcccgccaccaggcccagctaatttttgtattcttagtagagatggggtttcaccatgttggccaggctggtctccctgacctcataatccatctgcctcggcctcccaaagtgctgggattataggcgtgagccaccacgcccagctgatagaaattttaaagttaaaagattataactgtcattctgttaccgaagtactatataaattaccttctcaaaccgagtttttctattcttttaaaagttattataatatacccactgatctttttaaaacaaacatgagctcatcagtccactgctagattttatcctgtgaagaaggaggtattttcccctagagattcagcatagctccactgacaccttgaggcttctagcctcaagaactataagacaacaaatttctgttgtttgaagccactaacatgtactttgttacggcagctctaggaaactaatccatctttctagccatattgctttccccacttacgtaaagactagaagccaactactttgaattactggaacatacctgtcttctcttagtatttttgtaaatggttttattccctccatctagatatcctttcataaattagcaatgagttgaactattcattcaaactatagcttcttcaggaggctatcctctgatactcctagagagttaagtagtggcttcttggtgttcccaacagcacctcgttcatgacatactgaattgttgagcatgttacagtcatcattttctgcatgtctaaccatcctagtagactgagcccttggtgtgcagggactagtgcctagcagactatacatatttaaatattaataaatgagattcaaataatttaagagaaactaatagatgtcaactaggaaaacgattaaaggatattaactttagtgatactataccaggcacacacaaaatatcatgtatctattgaaaaatggacgcttatctacaaaattacaccatcagtgaggaaatatatgactgaagaataccattaaagaacaaacagaacttactggaggagttttctgagacagctctctattcaacctgtcagtaaaactctgtattagtgtgtttcctcctgccactattacactgccatagagaccctaggataaaaatacaagaaaaatcaattagttccatatgtttccaaaagttttaaatacaactacaaatataaccatgtgctctactacaatttccctttcgttttttggaaatgttttactattatatagaactaatagcttaatccatcaattctccatcctggctgtacattcaactcatctaaggagcttttaaaacacaaattcctaggggcaattaaataaaaatgtctggggatgggatccaggcaaggttacttttagagacggggtctcgttatattgcctacattggaatgcagtggctattcacgggcacaggcatagcgtaccacagcctcaaactcctgggttcaaacaatcctgcctcaggctcccaagtagctgggactacatgccactgtacctggcaggcatggtttttaactcccaagattattttaatgtgtacaaagttttaagaaccactaacttaaaggaatcattctaaaaatcataatttttttttggcagatagctgccaatatttaattagaagtacattttataatgactttatcttagaatgctcatctggaaatattaatagcaaccaccagccaaaaattaaaattacaaatattttgaaaaagaatgcttatctgtaagttaggatattcaaagaatgctcatctggaaatattaattgcaaccaccagccaaaaattaaaattacaaatattttgaaaaagaatgcttatctgtaagttaggatattcaaaattagacaattattttatgattatgacagacaatgataaactctgaacatattcctcgccaaaattattgctacttttctcttttgcagaggtaagcatcagaagcacatgggagcttttccaaaacacatatgctaagcccttcccaaataaaaataaattactacttataagcagtgtatttactttgaatttgcatgtatgcatcagaaagttaaatgtcaaactgttttagtgggtaagttcctatttttaaaacatacttcaaatgtctaaatcatctaaattttgaagtagaaaatggaatgcaaaagtatctcattagttaaaaggagaaacttcactaaaaacagttatca

SEQ ID NO: 96304 - DNA, 24445 bp, Homo sapiens
  misc_feature (1)...(24445): n = A,T,C or G
caagagaactgcttgaacctgggaggcggagattgcagtgagctgagatggccccactgcactccagcctgggcgacagagcaagactccgtctcaaaaaaaaaaaaaaaagactgcttagtgttatggctccagcacttaacactacctggcacagagtaggccctccatacacatctttgaatgaataagcaaatgaactctggatattgagacttgtgtaaatatcagaggaggatagatggatgagaaattacagctataagggacagttaaaaaaagcagaggctgggcatggtggctcacacctgtactcccagcactttgggaggccaaggagggtggatcacctgagctcaggagttcgagaccagtctgggcaacatggcgaaaccccgtctctaccaaaaatacaaaaaattagccaggcatggtggtgctgtggtcccagttactcggggggatgaggtgggaggaaggcttgagcccgggagaaagaggttgcagtgagctgagatggcgccactgcactccaacctgagtgacagagtgagactccaactcaaaaaaaaaaaaaaaagaagagcagagaggtggattgcctgagcccagagtttgagaccagcctgagcaatatgacaaaaacctgtctctaccaaaaaaaaaaaaaaaacaaaacgaaaatttatcaggtgtggtggtggcatgcacctgtagtcccagctactcaggaggctaagacagaaggatggcttgagcttgggaggcagaggctgcagtaagctgagattgcgccactgcactccaccctgggtgacagagcaaaactccgtctcaaaagaaaaaggacaggaaaagagtagaaaaaaagtcagtttgttccaaagggagacaggaaggaagctaaaaggaacccaggaggtgggcaaacatttaacttgaaagccccctggggcgtggtggcgcatgcctggctgaggcaggtggattgcttgagcccaagagttctgggctgtagcgcgttatgccgatcgggtgtcttcaccaagttcagcatcaatatggtgacctcccaggagcgggggaccaccaggttgcctaagaaggggtgaaccggcccaggtcagaaacagagcaggtcaaaactcctgtgctgatcagaaagccctctggctcccagattaaggctacactctactgctgaatgaacagagcctaaattcctgcacctatttacagttcaatcgaccacaaggcctttggccatacgcatccttcctaagcttccttagggatctggctgtcatgctgtgtatgtaattatccctgttcctgctccctacccacaggcatgttacaagctcagtgctttagaggtgtgaagtctcaccttcttctcaaagtcatccaccaagccagccttggccacattggccttgtagtaagcccagtcgatagctggtggattctcaggtaaagcagccaacctgcccacaaggaaaggcaaaagttaggattgttcataagcagtagaaaattcacatggtaattttcctatcccttcttcctatggcctggagggtcaccacactttcctctcctaagatcatcatgaaaatgcaaggatttctttatatgttgtcataagggcatcaagaattcatatgtaattccttaatactgttttgtttctagattcagtggcaagtatggggttccctctcagaaacatactgacctggaggtgagggtctcattccaggatttcagggaactagcaatggccttttggttctggggtatgatctctgcaaaagctacccagtcaatggtttttagagcaagttttcgcccagccatcttgggatcctgaaaaataagtcaaataaaaacaaggcttttttatgaggtgaattttcagttgggaaaaatgataaataacaaaataagagctcttagagagaatcctttaaatcttagaaacatgcaagtcttcacaagaatcacttgaacccaggaggtggaggttgcagtgagtcgagactgcatcactgcactccagcctgggagacacagcaagactccaactcaaaaaaaaagaaaaaaagacagtgtagcttttcaaattcaaggtaattcaaggtgtgcggccaggcgcagtgggctcacgcctgtaatcccagcactttgggaggccaagacggttggatcacctgaggtcaggagttcgagaccagcatggccaacatggcaaaaccccatctctattaaaaatacaataattagccagccgtggtggcccgcgccataatcccagctactccagaggctgaggcataagaatcacttgaacccaggaggcagaggttgtaatgagctgagatggcatcagtgcaccctagcctgggcaacacagcaagagtccgtctcaaaaagaaaaggaaaggacagtgtagcttttcaaattcaaagtgtgcaatgtggcatacaaatacattctctcccaactcctatttagccttaaaagcccagctctcttggccgggcgcagtggctcatttctgtaatcccagcactttgggaggctgaggtgggtggatcacttgaggtcaggagttcaagaccagcctgagcaatagggtgaaaccctgcctctactaaaaaatacaaaaattagccgggcgtgatggcatgcacctgtagtcccaggtactcaagaggcttagacaggacaatcacttgaacctgggcggcggaggttgcagtgagctgagatagcgccattgcactccagcctggacacagagtgagactctgtctcaaaaaaaaaaaaaaaaacaaaccccagctctctttatcccctccatgtgcctctggaaaaattactaaaaataacactcttattgcataaaagttaataaagacatttccacccagattgtgttttattcactgattctccagtagacagaaactgacacacacctaagtttcaacaagccttaaatagagcactctctaggctaaaatttacttatgtgtacaatgggcattatcagtcctgcttgccccagagggctgctaaaagtgtcacatgaaattgtgcacagcaacttgctccagagttttacaaacttaaaagggctatccccttccaactagattggtaatacacctgcaccttcttattcacatcggattataccctagcagcaccagcacacgttgtgcactttttttttttttttttttgagatggagtttcactctgtcccccgggctggagtgcagtggcatcatcttggctcactgcaacctccacctcccaggctcaagcgattctcctgcctcagcctccggagtagctgggattacaggcacccaccaccacacccagctaatttttgtatttttagtagagacagggtttctccacgttggccaggatgggctgaaactccagacctcaggtgatccacccgcctcagccttgcaaagtgctggaattacaggcatgagccaccgcgcccggcctgcattttaagaggtattcaacacatgtgaaaatgtgagaaaaatacagaaaacgactacagccacttaaaaaaaaagtcagaatataggaaaatagtcctctttaagtaagatcagggtcagatattaaaagactgcaaagtcaaaaatctctataagcttggagtggaatgcaagggaggcggaagcagtctttctcaggatcttcaagaaagttgtcaaacacctgtcctgtccttcctttctttctcaggacagcctgtttcctgttgtggaggggaggtgttaaggcaattggcatgtgattttaaagttaccagggaaccaagcacccttacagactttcccaaacatcagtgtatcggggaacttgccccgatagtcacataggttcttttctattttcctaagcgtcgactggcttgacagagtacaaaagagagaaattttaaagctgggcgtccgggggagacatcacacgttggtaggatccgtgatgccccacaagccacaaaaaccagcaagtttttattagggagtttcaaaaggggagggagtatacgaataggtgtgggtgacagacatcaagtacttaacagggtaatagaatatcacaaggcaagtggaggcagggtgagatcacaagaccacaggaccagagcgaaattaaaattgctaatgaagttttgggcaccattgtcattgataacatcttatcaggagacagggttttcagatcaaccggtctgaccaaaatttattaggtgggaatttccttttcctaataagcctgggatcgctatgggagactggagtttatttcacccctgcagtctcaaccataagagacaggtacgccccaggggggccagttcagagacctacccctaggtgcgcattctctttctcagggatatcccatgctgagaaaaagaattcagcgatatttctcccatttgcttttgaaggaagagaaatatggctctgttctgcccggctcaccggcggtcagagtttaaggttctctcttgttccctgaacaattgctgttatcctgttcttttttcagggtgcccacatttcatattgctcaaacacacatgctgtacaatttttgtagttaacacaattattacagggtcctggaacgatatacatcctcaactgacaggattaagagattaaagacaagacaggcataggaaatcagaagagtattgactggggaagtgataagtgtccatgaaatctctacaatttatgtttagagattgcagtaaagacaggcataagaaattacaaaagtattaatttggggaactaataaatgtccataaaatcttcacaatccacgttcttctgccatggtttcagccggtctctctgtttggggtccctgatttcccgcaacatcagtggaaaatggaagtcacaaataactttgtgtgtgtgtgtgagtgagacggagtctcgcactgtcgcctgggctggagtgtagtggcgtggtctcggctcactgcaacctccgcctcccgggttcaagcgattctcctgcctcagcctcccgagcagctgggattataggggccttccaccacgcccagctaattttttgtatttttagtagaggcggggtttcactacgttggccaggctggtctcgaactcctgacctcgcgattcgcccgccttggcctcctaaaattctgggattacaggcgtgagccaccgcgcccggcgaaattttttttaattcttaaaaatctattgcttaatccccagcgcctagaacagatcatgcgcataggaggtgctcaatgaatctttcttgaatgagtaaccgaactctgcacccgaggagccctgaacgctctatacgttcgaatcctggaagctgccgaaggggaagggcgcagccccgcagccagctgagcgtccctcggcaggttaacactgtctgcgtaatgtttccccagtccccccaccaaactattgaagtctgccgcgctgggagcggactgcacgagacacggcttgtggcagcgcctacatcagcggcgcctgggacacagccgggcccccctgaccccgcgcgccaaggagggctgaggaagggatcgcggggcgaggagcggcagctacacaagggacactctgccagcggggcaagccgagggcccagcgtccttgacgggggcgtgacaagggtcggcgtgaggtttggagagggcagagcagaggagccctccagggatcggatccaatgccccaagccccactcaccttcaccgaccctggctgcccacggtcctccgcagcaagtaacggaagtgggtcacgggaagatctttcctcagccaaccccaaagccaagggggtgggccttgcttcgcagatcagccaatagagatgagggctggttccggaagtatcttcccgggggcgggcacagcgcctcccccgcgcgggtccccgggcgctggttgggggcgctcccgtccctctcccctctgccccacccccgccgatgggccggcccggctctccctgccgagaaatgggccggcccggctgcgcgcgggcagcagcggtggcggcggcggtccaagatggcggaactgcagctggacccggcgatggcggggctgggagggggcggcgggagtggggtgggcgacgggggtggcccagtccgcgggccccccagcccacgcccggctggccccacgccccgcgggcacggccgcccggctgccgccgtcgcgcagccgctggagccgggtcccggaccacccgagcgggcagggggcggcggcgcggcccgctgggtcaggctgaacgtgggaggcacctacttcgtgaccaccagacagaccttaggccgggagcccaagtcatttctctgccgcctctgctgccaggaggacccggagctggactcagacaaggtgtgccccgccctcgggcgcgcccccgggccttcgaaccccctggtttctcgtagatcggtccccagagtcctgagacacgctcctcacaggcagccccctcaggccgggaccccatcctccccctccctcccacactactcgcaggggcctcagagggacctcccactccccttcttccatgctgaggcatactctggctttctccccgaccccgcccttcgttctctgagactccttcccacactgcgcccacctgcacccacgagaacgcactccacaccccttctccatattctctgcccctgacatcccactgagatctgcatgagttttccctggctcctcttcagtccccccactgccggtgccagatgcatccagaactgggtcagggttagctcaggcatccttgtagctttctcagactccctctcggacccctctgccaagttgggcttccacagctgcaggaagcgctccttgtgatatcacactgctttcctatagtcctggtcgcagaacttttatctgttaacagtcactggtttaggtccatatttagatcaaatgcgttttttggaaagaggttactgtttgccgctgcaaatctaggctaagacagaaggaaaatgaaaattttcccgggaaaattttgggcaggatgcatggctgctaaccaaagggttgagaggtgacaagacacttaaaccatttccagtttgaactgtgtcaatttctttttaactttacgtattcacctttaagttctcaacttaaaggcactgaccataactcacaccatcttatatcccatatagcactcagctggtgacctcaaaacagagctggagttgcgtaaacatttgttgttttcgtttattcctcttctctaagaaatctcagattgatggaaacctatcctgccctaactttaaagagatttcaaaacccttgcttataaaggaattatttttatctactctrtatcctccttgtggtaatagaagccagtttcttcttgttccttttactgtaaagatgagtaggattaaagctgctcagagccaagtcctggcagtaccgagcttcctctgggcacagagctggggtgtgtgagattacagctggcagtgcaaactcccactgatgttggccttgagctcaggagcattgccaactacacagaggttttcttggaattaggaatgcagttcagaggcagtggaaaagtcagaatgtccatctcaagcaaagatttcagttacacagctacggcattttctccctttcttaataacaaacacgctacagaagaatgtttgtcactgtaattattgtccaggcaaagattgcaaattccagccagtaagtaaacgcctaaatgagtatgactgtctgtaacaccctacctaagatgatcttaatgtacaagatacawaaagctatagctttcttaccaatagtttgtgacaaatgtgtaacaaaatttgccatcactaaagtcttttttagctgatggaatgaattgttgtcttggggcgctgacamagayggtgaaatcctgccctgcctttgtttaaaatactcctcaaaggtccacaatgatacccttgtgtttggttggcaggatgagacaggagcctatctgattgacagggaccccacctactttggtcctatcctcaactacctccgccacgggaaactcatcatcactaaggagttggcagaagaaggtaagcgcactgtttgcattggggattttcaaaatgcaagtagaatctttaaagttgttttacagatttcaattttgtttgacattttcatcaggcgcatgtgcaggtatagtttcaggtttatgaaacagagcagaaactaccagtcttgtctgagggagtcatgattaaggaagcctccttaggctttgttcagcttcctgggtgagaaggaagataggtagctccgctttgcagataacytcaggagttctttccgaatctccagaattgtcacgatcctttttttacatttgtttgtgtgctagcagtgagtgtctgtagtctgaagaagcaagacatctctgacattcaattatttatagttttaattttggtttgaactcacagttgtacaaaaataataaaggcttggcctcatttcttttaagactctggcctcatgcttccctgtaaatgtttgcagctgacctaattcattctctagttcattgtcaggtgtatcattacttgcctcatctttgtggtttgtagggcattgggactataagtgggtctagtccactttctacaaggcttggcatggtcccactgaaggcattcagttgtaaaggggactgtccctaaatccagggcaccctgatctgggagctttggctctgagtaagaaagcttgtaatggctgtactagttaatgaagtgactgtgaaacaactctgtttcagctagtagaaagaggaattgctctctctctctttttttaaatgtccctttttaaacaatatttcaaacgcatacagaagtaatgggaatagtacatacagtgaattccttgcatccactatccagcttcaacaattaccaactcatgggtgatcttaatcttatttatttttcttttttaatttttgtaagtacctagtaggtgtatatatttatggggtacatgagatttttcttttttttttcttcgctcaggctggagtgcactggcacaatcttgrctcactgcaacctcagcctcctgggttcaagcgattctcctgcctcagcctcccaagtagctgggattacaggcgtgcaccaccatgcttgactaattttttgtatttttagtagagacagggtttcaccatgttgaccaggctggtcttgaactcctaacctcaagtgatccacctgcctcagcctcccagagtgctgggattacaggcctgagcctccgcgcccgacctgagatgtttggatataggcatgcagtgtgaaataagcacatcatggagaatggggtatccatcccctcaagcatttatcctttgtgatacaaaaattcaattaccctcttttagttaagtatcttttctaatgcctttaattaaaaaaactttattttgaagtaatttaaaacttcaaaataagcaagaaaagagcaagaataacacagagaactccctatatcccagattaaccaattttcaatgttatttttgtcatatttggggtatggggagatctttttgttgtttttttaagagtcagagtctatcttatcttgcccaggctggtctcaaatgtctggcctcacatgctcctcctgcctcagcctcctgagtagctgcgattataggcatgagccatcatgcccagcttttttttttttttttgagacggagtcttgctctgttgcccaggctggagtgcagtggcgcaatctcggctcactgcaagctccacctcccaggttcacgtcattctcctgcctcagcctcccgagtagctgggactataggcgcccaccaccacacccagttaattttttgtatttttagtagagacagggtttcaccatattagccaggatggtctcatctcgatctcctgaccttgtgatctgcctgcctcagcctcccaaagtactgggattacagacatgagccaccgcgcccgacctttttttttttttttttttttttggcgacagagtctccctctgttgcccaggctggagtgcaatggcrctatcacagctcactgcgacatccacctcccgggttcaagcgattttcctgcctcagcctcctgagtacctgggattacaggtgcatgccaccacgcctggctaatttttttatttttggtagagacgggggtttcaccatgttggtcaggctggtcttgaactcctgacctcgtgatccacccgccttggcctcccgaaatgctgcgattacaggcgtgagccaccatgcccgaccttttttttttttaaatcatatttgcattgtccttcattctctatttccccctccctacccccatcctcttgcctctcccaccacagttatttctgaactatttgagaatagattgcagatttcaccccttaatatttgtatatatttcccaagaacaaggatactgttttatgtaaccacagacagtacagttatcaaactcaggaaatttaatactgatgcttttatctacagcttatattgcagttttgtcagttgtcctaataatggcctttatagcaaatttattcctataggatcacacgtctcatagttgccctaaggcctttgagttcatttagcatgcaagtctttaaatggttgccttttatattgttcaaatgattagcatcctattaagtttggcccacataaatttgtacacacacctccacccccacccccagtccttttgagggcagattggacaaaaatatcaagttcaggaggtgtccaacatgactagttccaggaactaagtgacatatgggaaaagtgtcctgcagctaatgggcaggtgccaggtagggaaaggagggttgaaatggagtgagcagaacataccctggcgtttgactaatttatgttggagaaaaggtcatgggtttaccgaaaatagcaaagagatatttcctagcagaaggagagagattggatttgcatttaaataatgcagtttttaggccaggagctgtggctcatgcctgtaatcccaacacttggaaggccaaggtgggcggatcacttgaggttaggagtttgagaccagcctggccaacatggcaaaaccccgtctctgcgaaaaatacaaaaattggctgggtgcggtggctttacgcctgtaatcccagaactttgggaggccaaggcagatggatcacctgaggtcaggagttcaagaccagcctgaccaacatgatgaaaccctgtctctactaaaaatacaaaaaattagccaggcgtggtggcaagcgcctgtaatcccagctacttgggaggctgaggcagcagaatctcttgaacccagcaggcggagtttgcagtgagccaagatcatgccattgcactccaacctgggcaacaagaatgaaactctgtttcgggcggggggaaaaaatagaaacagccgggtgtggtggtatgtgcctgtagtcccagctacttgggagactgaggcaagagaatcatttgaacgcaggaggcggaggttgccgtgagccaagatcgcaccactgaactccagcctgggcgacagagtaagactccgtctcaaaaaataagtaaataaataaataagcagtttttagcaagcatgtaaccttcatcctctccttggtgtttttctggcaaaccctcgcacctatctgactgcagttttgtccttgttccaggtgtgctggaggaagcggagttttacaacatcgcgtcccttgtgcggctggttaaggaaaggatacgggacaatgagaacagaacttcacaagtaatgtatttggaactgttaagraggrttgtttcaagtgggcttctgtcggtcggtctgtgatttgaaaaggatgcctttacccttagagctggaggtgtgtgtggaacaccgtttgcagtgcagggaatgcacactcagccaaactgcacaggagaaaagaagaaaccacaaagaaaacagaataggcctatgtcccaatagaatgagaagattgtcgctgcttaccagatggcaggaggaggcgcccagggcactttaggtctaaaacctgttctctgcccgagtatgtctccctcctaaagaccatagaggtcttggttgcacccgttggccgctctttttttttttatgagatggagtctcgccctgtcgcccaggccggagtgcagtggtgcaatctcggctcactgcaacctctgcctcccaggttcaagtaattctcctgcctcagcctcccgtgtagctgggactacaggtgtgtgccaccacgcctgactaatttttgtatttttttagtagagatggggtttcaccatgttggtcaggctggtctcgaactcccgacctcaggtgatctgcccgcctcagcctcccaaagtgctgggattacaggcgtgaggcactgcgcccagcttggccactctttatggagatgagcctttagcatgtgatcgagtcacatgcagctcctgtgagccacttgaaaccagtctcatggggtacgcttcagcagctgcttgtgaaccatgcttttttttttttttttttttttttttgagacagagtctcactctctcccccaggctggcctcccaaagtgctaggattacaggagtgagccaccacacccagcctgaaccatgcttctaagaacataatatcaagctgctctttatgatggtgtcttgattttggcggggagagggaggacaaggtctcactcccgttgcccaggttggagtgcagtggcgtgatcacagctcactgcagccttggcttcccaggctcaggtgattttcctacctcagcctaccragtagctgggactacagctgcaagctaccacacctggctaattttttgtattttgggtagaaacgagccttgttggccaggctggtctcaaactcctgaactcaagcaacccgcccacctcatcctcccaaagttctggaattacaggtgtgagctaccgcacctggccttgattttgatattaactcagatacagtaacaagagcgaaagggaatttgcccacctagttagaggaaagaaagatgttacggcacatctatttcacatcctgccattcgtcatatgtttgtcgtgtgtttgaatggccataatagcttctatttggcccttgggattctgtaagtaattgaaagtccttgccctcaagaagcttgaagtcggccgggcgcggtggctcacgcctgtaatcccagcactttgggaggccgagacgggcagatcatgaggtcaggagatcgagaccatcctggctaacacggtgaaaccccgtctctactaaaaatacaaaaaaaattagccaggcatggtgatgggtgcctgtagtcccagctgctcgggaggctgaagcaggagaatggtgtgaacccaggaggcggagcttgtagtgagccaagatcgcaccactgcaccactccagcctgggcgacagagggagactccatctcaaaaaaaaaaaaaagaagcttgaagtatagccaggaaaatagaccctctctttcatgcgattagactgttttaagaaactgcaactacagagttaacagtaagaaggcagagtcgtgctccaccatgactacctgtgttgtagcataattgcctcttttcccatcagatactggtagtagatgctttaggtataatctattgcagcacagaattttcctgccattaagaaggcaggaaaattattcttttttcttctttttttgaggcagagttttcctctgtcacccaggcaggagtgcagtnnnnnnnnnnnnnnnnnnnnnnnnnnnnnnnnnnnnnnnnnnnnnnnnnnnnnnnnnnnnnnnnnnnnnnnnnnnnnnnnnnnnnnnnnnnnnnnnnnnnnnnnnnnnnnnnnnnnnnnnnnnnnnnnnnnnnnnnnnnnnnnnnnnnnnnnnnnnnnnnnnnnnnnnnnnnnnnnnnnnnnnnnnnnnnnnnnnnnnnnnnnnnnnnnnnnnnnnnnnnnnnnnnnnnnnnnnnnnnnnnnnnnnnnnnnnnnnnnnnnnnnnnnnnnnnnnnnnnnnnnnnnnnnnnnnnnnnnnnnnnnnnnnnnnnnnnnnnnnnnnnnnnnnnnnnnnnnnnnnnnnnnnnnnnnnnnnnnnnnnnnnnnnnnnnnnnnnnnnnnnnnnnnnnnnnnnnnnnnnnnnnnnnttcaagaccagcctggccaacatggtgaaaccctgtctactggccgggcgtggtggctcatgcctgtaatcccagcactttgggaggccgaggcaggtggatcacctgaggtcaggagttcaagaccagcctgactaacatggagaaaccctgtctctactaaaaatacaaaagtagctggggtggtggcacatgcctgtaatcccagctacttgggaggctgaggcaggagaatggcttgaacccgggaggaggaggttgtggtgagccgagatcacgccattgcactccagcctgggcaacaagagcgaaactcccatctaaaaaaaaaaaaagaaagaaagaaaccctgtctactaaaaatacgaaaattgtctgagtgtggtagcgggcgcctataatcccagctacttgggaggctgaggcaggagaatcgcttgaactgagatagcagaggttgcagtgagctgagatggcaccactgcaccccagcctgggcaacagagtgagactccatctcaaaaaaaaaaagttttctggctctaactggaatatttggatgaataactgacactaatgatgaaaaattaactcttttatccactttatctccagcagtttgcaaaagtgaagagaagggcttattcatttagttttcttccatctagctgacagctcaaaggctcctttttgatgttcaaaggtggctttgtagttggtttgcagattaccacttggaatgtgatccagtgtcaccagtctctttgctatcttacctttacgtggtatctttcactattgtagatatttaatagtttagacattttggtaatctagccttatcctcagtttcccacattctaaaaaaatgattgcttactatagattttaaagtaccatgaattatgtaatttgaaatgattcaagtcatggtacctgaacattctcccttcttcgtcattagctaattcctggagagcattataagatttctgtttgatgaccgcaattaaattaattagtcttctagattctgaaggcttatggatttatacccctttggaagcttttttgttctaggaatgtcaagacctttttgatgttaactatctttccatctgtcctttttatgtagtgaaactgaaaaatggatttgatgttattcaaagacaccctcttttatacttgttgtatgtggctctaagatgaagttggctgtgtgtggattttcgttttgtttcattttgtatttttctttatttttttgtgtgtggattttcaaacatgttacctccttgaacttacctgtagcccctcacacatgcaggattcaagccaagcccaagatgtgggcctcaaccctaccttcggtttcatgacctcttagctcttagtggctgccacctaactactttcctctgtttctttttttttcttttttctttttttttttttttttttggagacagagtctcgctgtgttgaccaggctggagtgcagtgatgcgatctcagctcactgcaacctctgcctcctgggttccagcgattcacctgcctcagcttcccgagtagctagattacaggtgtgcaccaccacgcccggctaatttttgtatttttagtagagacagggtatccccatgttggccacactggcctcaaactcttgatcttaggcgagccaccaacctcagcctcccaaagtgctgggattacaggcgtgagcaaccatacccagactcctatttcttagaatagtattttttgtaggtgattgatcctggtgcatttgagagcacaagtggtttactttggaagggagaaaaaagaggcagtataatggcatcttaaatacytgggactttgacagctgtggccaacatcacagatcttttgtgatactctgaattttgtacttatacaattggtttccaaaataagtggttacaaccaattaaaatcttcagaggatttgtactatatgtaatatggaaggaaatctttgaaatccttagtactttggttaatgatagctatacctcttttttttttttttttttcctcgaggcagagtcttactctgtcgcccaggctggagtgcaatggcgcgatctcagnnnnnnnnnnnnnnnnnnnnnnnnnnnnnnnnnnnnnnnnnnnnnnnnnnnnnnnnnnnnnnnnnnnnnnnnnnnnnnnnnnnnnnnnnnnnnnnnnnnnnnnnnnnnnnnnnnnnnnnnnnnnnnnnnnnnnnnnnnnnnnnnnnnnnnnnnnnnnnnnnnnnnnnnnnnnnnnnnnnnnnnnnnnnnnnnnnnnnnnnnnnnnnnnnnnnnnnnnnnnnnnnnnnnnnnnnnnnnnnnnnnnnnnnnnnnnnnnnnnnnnnnnnnnnnnnnnnnnnnnnnnnnnnnnnnnnnnnnnnnnnnnnngcgaaatcccgtctccactaaaaatccaaaaaaattggctgggcacagtggctcatgcctgtaatcccagcactttgggggcccaaggcgggcggatcacctgaggtcaggagtttgagaccagcctggccaacatggtgagacttcgtctctactaaaaatacaaaacttagccaagcgtggtggtgggcggctgtaatcccagctattcaagaggctgctgaagcaggagaatcgcttgaactcgggaggcggagattgcagtgagctgagatggtgccattgcactccagcctgggcgacagagcgagactctctcaaaaaaaaaaaaggaaaaaaaaataaaaaattagctgggcgtagtggcacatgcctgtaatcccagctactcgggaggctgaggcaggagaatygcttgaaccagggaggtggaggttgcagtgagccaagatcaccccactgcactccagactgggcaacagagcgagactccatctcaaaaataataataaggctgggtgcggtggctcatgcctgtaatcccagcactttgggagaccagggcaggtggatcatgaggtcaggagttcaagaccaagcctggccaacatggtgaatccccttctctactaaaaatacaaaaattagccaggcttagtggcaggcgcctgtaatcccagctattcgggaggctgaggcgggagaatcgcttgaaccggggaggcggagttgcagtgagctgagatcgcgccactgtactccagcctgggcgacagagtgagactgtgtcttaaaaaataataataaataggccgggcgcggtggctcatgcctgtaatcccagcactttgggaggccgaggcgggtggatcacgaggtcaggagatcgagaccatcctggctaacacagtgaaaccccgtctctactaaaaaatacaaaaaattagccgggcgtggtggcgggtgcctgtwgtcccagctacttgggaggctgaggcaggagaatggcgtgaacctgggaggcagagcctgcagtgagccaagattgcaccattgcactccagcctgggcgacagagcgagactccgtctcaaaaataaataaataaaatwataataataataaataataataattttaccttatttttgacttggggaaatggattaaatctaagtttgttggcatagttgctcaagcattcatccctctgaagttcagaattattttaccttttttattctttcactctttggatatgtttttattgaaaagccacagtatgctggcttgtggtcacttaaaaagaaaaacattttttaaagagaagggaaaaaaagaaacgccacagtactatttgtaaaaggggatagtgggtggctgccaagaaaagatttccaagcaaactccttttcagtgtttattcatttgaagagcctccttggggcagctgcaaactgtggtgtccttggtgctgttctcagtctgcgcctggtcattgcagggccccgtgaagcacgtgtacagagtcctgcagtgtcaggaagaagagctcacgcagatggtgtccacgatgtccgacggctggaaattcgaacaggtacatctcttaacagagcagcaatcccaggccccgttcaaggggtctgcagctcttcaaacaatcagtgtggatggccaattaataaccacgggagacggctacggccaggtgggatcctattccaaaacatgggcaaagagccatttggtgggcactgctggcctagtggtgcgtgaggagttggggaaacagaggagcatcatgtcttagcttcacacgcagactttccaggggagccaacgagcagtttaggcttgaagtgcctcaaagcctttggtttttgttccctcacagggatcgtagaatgagtccctaaaggagactgggattcgacaacaatccttccatttcttttcccagggtcagaactttttggttctgaatgtcttatgtaatccaccgtgaagagcttggtgaacagctgtgctaggaaggatcaggcgccatgggaagtgtggtgcagccgtttcccctacttctctccgcctcgtgcttacgactgagctatcaaaacaaagctatgacagttggagcttcactgttctcctccattagatggcagacttgttaaattctgttgccttcaaaacataggaaggccagagcgaatagagtaaatacaattttttttttttttggaaagtcaaatccctttcttcattccatcccttttagacatggcatttaaaacagacattgctacatcactaacttcccacaagctgtggtgtccactggaaaaatgtagtccttgatatttctatttcacattcaagtgatcctctgccacttattaactggttcacttcaatttcaaaaagccaaaaaagtcctctaacataagccttccaaggtgatactttcagaaaccagggttggaactaaccagacaacagcgcgacagccaagaccagctgctcttgatgcccttttcacttctgtgttgtcctggttgaagttggcaaagagcagctggccggcgccggcctccccgctctggctcgccaggttcatggctgggcgcgtggcgagtgggcccggccagggagggcgcgcgtgcgagggcgggtcaggctgcactcagggtctcggtcgccgccactcgccaccctgggatcaaccgcctgagtaaatatgattttatacggattatgcctacttatgtgtagagttttaacaggtcaacagctgtctcaccagatgcttaccttctaaaagaaaactcacactttgcattaatgctgttatctcacagatcaagtgcaaagctgtctctgccttcagagccagcggtgattatttctcacacttagcttccaccacggaatccactctgcctgtgtctgtcatcctggttcttactgggcatgggttgtaaaacgtcgccaagagtttaatgccctccactccagaagtatttttcctaatatgagctcttaagcaaaggatttttttaatgtattctttgtgaaactaaaatgaataatttcttgttaatttctcatcttattactgtcccgtgggaagacggagggtgttcctattgcctcccttctggatgaggaagtttgtttcagacaggcggaggcgcccccagccccatcctaccacagtcagccatgccgcccatgtgaggcctcgcctgctcactgggatgccctcaccctctgcctgagctgctcccctgcgtgtgtatttcctctttagaattaaattctgaattctattatccaaaaaggttaaaagtaccagcatgctgggcacggtggttcacacctgtaatctcggcactttgggaggccacggtgggaggattgcttgagtcctggagttcggagaccagcctgggcaacatagcgagaccccccttctctatcaaaaataaaagaattagccaggcatggtggctgtagtccctgtagtcccagctactcaggaggctgacgtgggaggatcacttgagaccaggaggtggaggctacagtgagctgtgattgcaccactgcactccagcttgggtgacagagctagaccctgtctggaaataaaaagtaccagcagcatatgacttccagtagctgatcagtgattggctcggtgctttccagagcctcctgtccccagtctagggcttctgctgatagannnnnnnnnnnnnnnnnnnnnnnnnnnnnnnnnnnnnnnnnnnnnnnnnnnnnnnnnnnnnnnnnnnnnnnnnnnnnnnnnnnnnnnnnnnnnnnnnnnnnnnnnnnnnnnnnnnnnnnnnnnnnnnnnnnnnnnnnnnnnnnnnnnnnnnnnnnnnnnnnnnnnnnnnnnnnnnnnnnnnnnnnnnnnnnnnnnnnnnnnnnnnnnnnnnnnnnnnnnnnnnnnnnnnnnnnnnnnnnnnnnnnnnnnnnnnnnnnnnnnnnnnnnnnnnnnnnnnnnnnnnnnnnnnnnnnnnnnnnnnnnnnnnnnnnnnnnnnnnnnnnnnnnnnnnnnnnnnnnnnnnnnnnnnnnnnnnnnnnnnnnnnnnnnnnnnnnnnnnnnnnnnnnnnnnnnnnnnnnnnnnnnnnnnnnnnnnnnnnnnnnnnnnnnnnnnnnnnnnnnnnnnnnnnnnnnnnnnnnnnnnnnnnnnnnnnnnnnnnnnnnnnnnnnnnnnnnnnnnnnnnnnnnnnnnnnnnnnnnnnnnnnnnnnnnnnnnnnnnnnnnnnnnnnnnnnnnnnnnnnnnnnnnnnnnnnnnnnnnnnnnnnnnnnnnnnnnnnnnnnnnnnnnnnnnnnnnnnnnnnnnnnnnnnnnnnnnnnnnnnnnnnnnnnnnnnnnnnnnnnnnnnnnnnnnnnnnnnnnnnnnnnnnnnnnnnnnnnnnnnnnnnnnnnnnnnnnnnnnnnnnnnnnnnnnnnnnnnnnnnnnnnnnnnnnnnnnnnnnnnnnnnnnnnnnnnnnnnnnnnnnnnnnnnnnnnnnnnnnnnnnnnnnnnnnnnnnnnnnnnnnnnnnnnnnnnnnnnnnnnnnnnnnnnnnnnnnnnnnnnnnnnnnnnnnnnnnnnnnnnnnnnnnnnnnnnnnnnnnnnnnnnnnnnnnnnnnnnnnnnnnnnnnnnnnnnnnnnnnnnnnnnnnnnnnnnnnnnnnnnnnnnnnnnnnnnnnnnnnnnnnnnnnnnnnnnnnnnnnnnnnnnnnnnnnnnnnnnnnnnnnnnnnnnnnnnnnnnnnnnnnnnnnnnnnnnnnnnnnnnnnnnnnnnnnnnnnnnnnnnnnnnnnnnnnnnnnnnnnnnnnnnnnnnnnnnnnnnnnnnnnnnnnnnnnnnnnnnnnnnnnnnnnnnnnnnnnnnnnnnnnnnnnnnnnnnnnnnnnnnnnnnnnnnnnnnnnnnnnnnnnnnnnnnnnnnnnnnnnnnnnnnnnnnnnnnnnnnnnnnnnnnnnnnnnnnnnnnnnnnnnnnnnnnnnnnnnnnnnnnnnnnnnnnnnnnnnnnnnnnnnnnnnnnnnnnnnnnnnnnnnnnnnnnnnnnnnnnnnnnnnnnnnnnnnnnnnnnnnnnnnnnnnnnnnnnnnnnnnnnnnnnnnnnnnnnnnnnnnnnnnnnnnnnnnnnnnnnnnnnnnnnnnnnnnnnnnnnnnnnnnnnnnnnnnnnnnnnnnnnnnnnnnnnnnnnnnnnnnnnnnnnnnnnnnnnnnnnnnnnnnnnnnnnnnnnnnnnnnnnnnnnnnnnnnnnnnnnnnnnnnnnnnnnnnnnnnnnnnnnnnnnnnnnnnnnnnnnnnnnnnnnnnnnnnnnnnnnnnnnnnnnnnnnnnnnnnnnnnnnnnnnnnnnnnnnnnnnnnnnnnnnnnnnnnnnnnnnnnnnnnnnnnnnnnnnnnnnnnnnnnnnnnnnnnnnnnnnnnnnnnnnnnnnnnnnnnnnnnnnnnnnnnnnnnnnnnnnnnnnnnnnnnnnnnnnnnnnnnnnnnnnnnnnnnnnnnnnnnnnnnnnnnnnnnnnnnnnnnnnnnnnnnnnnnnnnnnnnnnnnnnnnnnnnnnnnnnnnnnnnnnnnnnnnnnnnnnnnnnnnnnnnnnnnnnnnnnnnnnnnnnnnnnnnnnnnnnnnnnnnnnnnnnnnnnnnnnnnnnnnnnnnnnnnnnnnnnnnnnnnnnnnnnnnnnnnnnnnnnnnnnnnnnnnnnnnnnnnnnnnnnnnnnnnnnnnnnnnnnnnnnnnnnnnnnnnnnnnnnnnnnnnnnnnnnnnnnnnnnnnnnnnnnnnnnnnnnnnnnnnnnnnnnnnnnnnnnnnnnnnnnnnnnnnnnnnnnnnnnnnnnnnnnnnnnnnnnnnnnnnnnnnnnnnnnnnnnnnnnnnnnnnnnnnnnnnnnnnnnnnnnnnnnnnnnnnnnnnnnnnnnnnnnnnnnnnnnnnnnnnnnnnnnnnnnnnnnnnnnnnnnnnnnnnnnnnnnnnnnnnnnnnnnnnnnnnnnnnnnnnnnnnnnnnnnnnnnnnnnnnnnnnnnnnnnnnnnnnnnnnnnnnnnnnnnnnnnnnnnnnnnnnnnnnnnnnnnnnnnnnnnnnnnnnnnnnnnnnnnnnnnnnnnnnnnnnnnnnnnnnnnnnnnnnnnnnnnnnnnnnnnnnnnnnnnnnnnnnnnnnnnnnnnnnnnnnnnnnnnnnnnnnnnnnnnnnnnnnnnnnnnnnnnnnnnnnnnnnnnnnnnnnnnnnnnnnnnnnnnnnnnnnnnnnnnnnnnnnnnnnnnnnnnnnnnnnnnnnnnnnnnnnnnnnnnnnnnnnnnnnnnnnnnnnnnnnnnnnnnnnnnnnnnnnnnnnnnnnnnnnnnnnnnnnnnnnnnnnnnnnnnnnnnnnnnnnnnnnnnnnnnnnnnnnnnnnnnnnnnnnnnnnnnnnnnnnnnnnnnnnnnnnnnnnnnnnnnnnnnnnnnnnnnnnnnnnnnnnnnnnnnnnnnnnnnnnnnnnnnnnnnnnnnnnnnnnnnnnnnnnnnnnnnnnnnnnnnnnnnnnnnnnnnnnnnnnnnnnnnnnnnnnnnnnnnnnnnnnnnnnnnnnnnnnnnnnnnnnnnnnnnnnnnnnnnnnnnnnnnnnnnnnnnnnnnnnnnnnnnnnnnnnnnnnnnnnnnnnnnnnnnnnnnnnnnnnnnnnnnnnnnnnnnnnnnnnnnnnnnnnnnnnnnnnnnnnnnnnnnnnnnnnnnnnnnnnnnnnnnnnnnnnnnnnnnnnnnnnnnnnnnnnnnnnnnnnnnnnnnnnnnnnnnnnnnnnnnnnnnnnnnnnnnnnnnnnnnnnnnnnnnnnnnnnnnnnnnnnnnnnnnnnnnnnnnnnnnnnnnnnnnnnnnnnnnnnnnnnnnnnnnnnnnnnnnnnnnnnnnnnnnnnnnnnnnnnnnnnnnnnnnnnnnnnnnnnnnnnnnnnnnnnnnnnnnnnnnnnnnnnnnnnnnnnnnnnnnnnnnnnnnnnnnnnnnnnnnnnnnnnnnnnnnnnnnnnnnnnnnnnnnnnnnnnnnnnnnnnnnnnnnnnnnnnnnnnnnnnnnnnnnnnnnnnnnnnnnnnnnnnnnnnnnnnnnnnnnnnnnnnnnnnnnnnnnnnnnnnnnnnnnnnnnnnnnnnnnnnnnnnnnnnnnnnnnnnnnnnnnnnnnnnnnnnnnnnnnnnnnnnnnnnnnnnnnnnnnnnnnnnnnnnnnnnnnnnnnnnnnnnnnnnnnnnnnnnnnnnnnnnnnnnnnnnnnnnnnnnnnnnnnnnnnnnnnnnnnnnnnnnnnnnnnnnnnnnnnnnnnnnnnnnnnnnnnnnnnnnnnnnnnnnnnnnnnnnnnnnnnnnnnnnnnnnnnnnnnnnnnnnnnnnnnnnnnnnnnnnnnnnnnnnnnnnnnnnnnnnnnnnnnnnnnnnnnnnnnnnnnnnnnnnnnnnnnnnnnnnnnnnnnnnnnnnnnnnnnnnnnnnnnnnnnnnnnnnnnnnnnnnnnnnnnnnnnnnnnnnnnnnnnnnnnnnnnnnnnnnnnnnnnnnnnnnnnnnnnnnnnnnnnnnnnnnnnnnnnnnnnnnnnnnnnnnnnnnnnnnnnnnnnnnnnnnnnnnnnnnnnnnnnnnnnnnnnnnnnnnnn

SEQ ID NO: 96305 - DNA, 32795 bp, Homo sapiens
agtgatttgtaagctgagttttagaaggaagagagcagggtctaggggcgcaattgtcaatggctggaacacccagtgtaaagcatacagggttggcccagggagggaggctagacctgcctctggccctgttcaaattttaatcccgaagtacatgaaaataatttaggctaatagagagatataaggttgctggtgtcactaacgagcaaatttgacaagctttgtcaaatcataaagctaagtccttttaaactgaattctcatgctgatgaattcattggtatgtctatacctgtacaaacaaaagtgatctgaatgtgtcagttgcaattacatattcaatatgatggctcttgcaactatatatttgataatatttttaataattgcataacctttctatatttgttttcaaaagtaaagcaaagcaagaaaaatgaatgaaaaaaaattgttttacttgctagcacaacccctgcagcaacagtgatagtctttgggcctatcaatagggggcagcaaagttcaggactttgggctgcagcagttgaaactagaggatctctggaggagagagtggatcctctctgagtgtgtgttgtgagtgtgtgtgtagatggcaggcaggcaggagctgtggaagagtgtggtgacagttctgcctgaacaacacaggcagtcttctttacctttccttgccttcctctatgtgaggaatgtgcgtcgcttgggtacatgtggacacttgaaagatatttgatagaattctgggaaaacggaagcagtcagttcctcctaaaaaaaaaataaataaaattaaaaaaaaaaaaaagtatacctaccagaagatgatgtgcgcaaatccagagaggggtcttggctcagtgaggaaccaggcaaattatccccttagggctgcgatctcccaaattgggaatgtgcccacccccatttggagtctaaatacttagtgtagatagtgaaatgagacacgtcttgtaagctgtttagcccaattcctggaaaatagtaaatactcagtgaacattgggtgcaattattgttattggtacacgtgtgttccttcattctcagttaaactttatcgtacagctcgcggtgaagggtcatgtaaggcatggtctgtaagaaggaacatggctaacttgctggtcaggacttctaggggtgccactgtgagcctttgacaactgcctttgttaattatcatcaaggacatagtgctaagaaactttgttctctaaagcctttgttgtttgaaatcagagcaataaaatggaacatctaactgttgtctatatgagctgagccacatgggccaatctgaccaatggagaagtagcttcaatatccccctcaattgcagagctctagacgtgggaattttgcatacaacgttccacatttcttttccctttgagggacctgaatcggcttcttaggtcagggttactgttaactctttggcacactaacttgctgtgcttgagtctctccagctcagcttcattaaattttacctaaattcacccctccccaaatcctacaacagccctgtctagtcctatgtttgactcgatgtctctaggctcctgtggtgtgcagtctcccctgctgcacgagtcaggaaacctgccttcatgttgatgttctccccctgttgggctccatcaaaagaaattttgccttcatccagtacttgtaatcccatcccagaaaaagcaaacatctccctcccactcccacagtctccgatacagagtgctcacagtgtgtgggtggagttgatattttgggttctaatgtttacaagaaacaatcttaataaccctactgtttttgcttgtattacaggaaattttgaacacacataagaattgaaagaaaagtataagaattgaaagaaaagctggctcagtggctcatgttgtattcccagtgctttgggaggccacggcaggaggattacttgaggccaggagctatgatcacgccactgctctccagcctgagtggcagagcaaaaccccatctctaaaaaaaaaagtataagtttgcaagttcctctattcagcatgaaaattaccataattttccaatcatgtttcatctattctttaactttttctttttttttttttccactggaatgtttctagagaaatccaagctatcatattattttatcctaaatacttcagtattcatctataattgataagctttttttctttttttatctaatcattcagccattgttacaaataacaaaattagttattattccctgtcatcatttaatgtgtagtctatattctaaatttcctgtactatctcaaaaatattttttaactgttgatgtttttgaatcaggatccaaagtccacgtatgacttttagagattctaccactgaagtctcttatgtctctaactgctactctttctcacgtagttttcatgtcattaagttattggagaaattagatcaattgccctgtagaatgtcccacactgttgatttggtgttgtctaacttgtttctatatctatctgctgcatttcctattaaaccaaagggcagatccagagacttgcttcaatttggcttgaatgccttgggaatgatgccagaatataaaagcaggcagaagaaggtgaaagactagactggcttagcctcccagcctacctctttctcccgtgctagatgcttcctgcccttgaacatcaaactccaagttcttcagctctgggactcagactggcctccttgctcctcagcttgcaggtggccgattgtaggactgatatggtttggctctacgtcccgacccaaatctccataattctcatgtgttgtgggagagacccggagggagatagcttgaatcatgggggtggttcccccatattctcgtggtagggaataagtctcatgagatctgatagttttatcaggggtttccacttttgcatcttcctcattttctcttgccgccaccatgtaaggagtgcctttcatctcctgccatgattctgaggcctccctagccatgtggaactctaagtccaattaaacctcttttcatcccagtcttgggtatgtctttatcagcagagtgaaaacgaactaatacagggaacttgtgatcacgtgagttaatactccttaataaactcccatataaaaaaatatatataatatatatctttacatagatatatatatacatcctattagttctgtcccttgagggaaccctcactaatacactatgtttaacccagccccagtgtgtgtccttactctattaatttgcctcctttgagaggagggtttttatgcttctttcatcctccccttctccggcacagaacttttgagtacgagtacagacatgaggagcctaaatgtatgactctgtgaccttgtattccactcatgtacctgggaatatataataagatcatataggaaaatacttttttaaaaagagtatttttaaaaaaggaactaaagcctcttaataatcaaaattgccaaagtctgccttgcccatggtttcatctgtctctggtaacctgccctgcatcctcagggcctcacatctcattccaccctcatctctggtggaccattccgtggggctatgactcacctcatgaaagaagcatctcacctccagtacatgcccctgtcttttgctgtcagccctagggctcctcggacaccaaggaggcaagacactccaggggagactgtgaggccctggggcagtggtcgtacaagttcaggagtcaacaactgaaggagcgagcctccaccgagcagacaggagcaagtgatgaaacatgcctccatgttgatcctctggggcaattcttcaaggcctctccaggcccctcagaaaggttcatgaccattcaccagttgccttcagcagtgacctgggtagtgcatccttggtgtctctcctgcttcttgctcctcttggtccctctctcctgttccctggaattacctcccaaataaactcaggcccttgtctcagactcaaatatttgacttcctactgtatgcctgtatgcctgacttgagccatctgtataagtttgttctcatgctgctataaagaaatacctgagactgggtaattcataaaggaaagagttttaattgtctcacagttcagtatggctggggtggcctcaggaaacttacaatcacggcagaaagcaaaggggaagcaaggcaccttcttcacaaggtggcaggaaggagaagcactgaacaaaaggggaggagccccttataaaaccatcagatcctgtgagaattcactatcacaagaacagcatgggggaaattgcccccaggattcaattatctccacttggtcactcctttgacatgtggggattatggggattacaattcaagatgagattaaggtggggacacaaagcctaaccatatctccatccaagaagaaaaagatgtaggtagccttgccctcaagagctcttggtctaggacatgacaaaatgtcaccgactgaactgaagttagcagattcacatctgtataactgtgtaaactttactaatttcttttactaagaaattatctcggtctcagttttagctgaattcccaagataattggtttcaagtactttcactttccaaagtatgatactgggtcaccaatgcaaagcttacaaaatcttgtgaccattagttgacctctcttgtgtatttggagacattgagagaagttgagagaggcagtagattataagggcttaaaaaaaaaaaacatatttggctgctgctttaatgaggccaaaaaagcaaaaaagtatgagtcatgcctttcatgacttcagcccatgggagaaaaataagagccccttttcctttgcttcacatgtaggagagatggtgctccatctccaagcaccagggatatgtcaccctctccaagtggctccaatgaggttgctaggtcccctggggcttagagacatggtgggcaggtgtctgacccttgactcatggctgacttgtgttctgcctggccatggagcaaaaagatgtgttagtgggacaaagaaggcacatgggtttctcaggaagctcatggggacccacgagagagacagatataaataaaaagagagagaaaaagcgtggtggcaccgggatgtcttaaatcctgcccagaaggatctctagaactctggagacctctacagagtggatcaccaggtgcctcagaatgagagaggcatcttaagccaccagcctgcatcacagaatggcagacaagagattcctacctagttgcagggatggggaagaaggcagggcactgctccttccatcatttgtaagatctctccatcaggcccccacctatctgttcaccttcacttcctaccagtttctggcttcatgaggccacaccaccccacttcctgctgccattcaaacacaagattgcctctgcctcagaggaccaagttggcttggaagggattgccagactcacagaactggcttctcattatcgctatgcttcatctcaaacaccaccttctcagcaaggctggccttcccaggcacgctggctaaagcatttcccaagccttggtcatcatggctttttttgtttgtttgtttttaacttttcttggctgtacacccaccaatcacgagtatacagcttaacacattttcaacaaacggaacgcaggtattgacccagcattcagatcaagggccaacgtaaacacactggcaaaggattgcaagagccctgtccacagcagctgagttctgccagattctgtaaattcatgcagccttacacctgcactggccaatactgtaactgctagccacacgtggccaccgagagcttgaaaggcagctagtgccatttgttgaaatgataacgttttggacttactgagtcaaataagaaacgacacacgtggctctcatcatgtttctattggacagcgctgccctggagcctcggcaagtcatttggcttcttcgcgtctttcatgtgtcttctccagactgtaagcttcctgtggacaaggcctgctccgttcaaggctcaatctccagctcctgacacaccatgcgctaggtgctcagtcactaatggtctcgcgaaggagtgatcagtgagtgaagcaggggctgctgcatgggaaaggtgagcgggctggaaatgggtagtccccgcggcgtctcccagtcgggctcctcccgaggaggaaggaaggagagaccccaggtgtagtcgaggggccgggagggaggaggggagggtcgctccaccctggagcgggaatgctgcagggcagctccgggtcgccaggcggcggtttccaggcaacgaccgaacacagacgcgggctagacgctggcgctgagcaacctgaggcctgcagactccgactgggcccctgggckggcgggacggaccgcggccaaggcgggggcgctggacggtggcggcatggaggacgacgaggaggagaccaccgcgtccacgctgcggggcaagcccaggccgccgcccgtctcggcgcagtccgccttcagctacatcccgccgcggcgcctggaccccaaagagcacagctactactaccgcccggcgcgggtgaggaccgcggactgggcgcggagaccggaaggctgggcggctgggcggckgggcggctgggcaggggcgggcggccgcggaggggcgggggagaagggatcaccccagcggaagggtcttggggcggggytctccctcggagggagggcgtaggggcggggttcaccttagggaaaggggcctgggggcggggctcaccttaggggcgggggcctaggggcggggctcaccttaggggagggggcctgggggcggggttaccttaggggaggcagcctgggggcggggttcaccttagggactggggccttggggcagggttcaccttaggggagggggcctgggggcaggkatgcgccgccggggactggagagaggagctcacaacgaggaggggccctgggaggggctgcaccgctagggatcggggacagagctcacagagtagaggggccctagaggaggagcgcaccttcgggcagggaccctgggggcagggcttcactaccaggggtgggttccgaggggcggggctggacagcctgtggagggggccgggtgggagcgtgcggagatgaagggggcgcggcagggtcasctggggagacagggagggtgagctcccgccaaggcgcctgggccccaaagagtacagctcaggcgactaccagtgtcagctgaacccctgggacgaggatgtgggagaagccgggtgcgcgaatgggtgtcttagctgcgatcaggggctgggagtcgcgggaatgctcagataggacccggtgctcttcggagaagggagcgggagccactaggtgtcaggatccctcaaaagcacagtggctctgtcgggacagcagggcgctctttctgcccagggtctggagggggtcgcggkaagccggggcsgcccagcgggctggscgcggctccctctggggtctgtctgcggcaggcccaggctagcaaggaaasaaggccttgctgccgggactacgcccggatggtccagggcgcgggaaaccctcttgccctcctgcaaaccgaagaccagaaggaatagctggcgagccgcctgcagggagggctggactgagagtggtccctctgttctgtcctggccacaccggcccgtgcatttcctgggatgggatctgcgagtctgcgaaggccactgggcaccctgcatctcccaccagcggccaaaggcaggaaaagtagtaaattcaaagccagttgagggtcatctactcctttcttctcaccattgttcctaaatgtccccggtttgtcttgctcaagatgcaggggcaggggagtcattactgaaaaggagcattcattgaggaccctcagcctgcaggcgtaactrggacaggtctttctaattctagctgtcctggtggcttgagtgggtagagagggatatagattagccaggtgtctagggggaaggagatcgttcccttatggtgtataaggtgttcccagaaaatgcatccttcctttccccacctcctgcccccaccatcctagaccctaaataaattccccttctgactgggttagcacacactggcctgcatgccacacataaagtgtaagcactcttggacagcctcaccaacagaagcaatcgtgtttctagtttagacaactgctgtcggttgaattgtgtccccttgaaatttatgttttggagtcttaatccccagtaccttagaatgtgaacttatttggaaatagaattttacagagataatcaaaataaaatgaggccactaggatgagccctattccagtatgactggtgtctttgagaaaaggggaaatttggatatatagagacagacatgcatgtattagtcctttctcacactgctaataaagacatacccaagactcggtaatttataaaggaaagaggtttaactgactcacagttcagcatggctgggaaggactcaggaaacttayaatcatggcagaaggagatgtaaatatgtccttcacgtggcagcatgaagaggaatgagtgcacagtgaagaggcaagacccttataaaaccatcaggtcctgtgagaactaactcactatcacgagaacaggatgggaggaactgcccccatgattcaattatctccagayggtccctcccaggacatgtgggaattatgggaactacaattcaagatgagatttgggtagggacacagccaaaccatatcagggaggatgatgtaaagggacacagggagaagacagctgcctacaagcctcagggaaaggcctggaacagggcattccttcacagccaactgcttgattccatacttctggtgccagtactgtgagacagtgaattctgttggttaagccacgtcatccatggtacttagtttgtgcagccccagctgacaaatacggcagccataaacctcagcctgctcccaggaggatctctggtatctgatagctcctctctgcttggctttgagcaatatgcaaggacagggggaaaagggacatttgcaatcagatctgtctctgcagccctgtttgcctgttctcccaggctcgattatcctctgaatattaagacaggagggaaacacgagggaatggtaagttcccaatctcattgccaccagggacttcatttttttcctcctgggagcaatatgttttgaaagaactgttacctatacataatctcatttattaaatgaattttacattttaagtatgcaatactcatgtgactgccaatcagcttatgattaatgcatagcagtaatgcaccgcatgagataaacagtggaaaaaataaggagtgtttttgtgttaacttgttctatgctgttatgttgaaaggaaataaaattcatctggctgttggacagaataaaaacattggtaataatgccatttgagggatcctgtaaataagatgggggcaccaggaaaaagagcagaatctgcatctcctgtgggccagctactgcctagggaaaggcggtgaaattgatcctggcaggcacagttcattcttgcatttaccagtctaattaacgtctccaccttcctgggaccaaactaaccaaagggcagagagatgcctgaagtgtgaagtgactgggactccatcacttggaaggaggtccgctgggagtgggctggaaatctgcccctttaatgctggggtcagtaaaccaaggctccttggccaaatctggccagttgcctattttaataaataaggttttcctagaacatagtctcacacctatgtgtttgcatgtctgtggttaccgcagagagctgtgtagatttggcagagaccatgtgacctgcaaagcccaaaacagttacywscwrrsccywwamarrwwaagtttcccaccccctgctctaatgtatcactaccttctggaaggtaggtatggaacttagaacaaattaatgcaaagtggatttttgaaaaaacaatttttttccatgcagtttgggtaactgaggtcacaaacaaattcaagttctgaggcctttagtaccacgcaaaagaaaacgatgctacagaaatgttaacatctaaattaaaacagcctcgaaacaacaagaataacaaaagcattttgaagcccatttgacaaatagctaccartggtaataatccactcctcaggatgatatgaactgggatttaatcagctgcaggaccaaagaaactgattctctgacctagagactatttggaataaagagggtaaattctgcatcacaggttttctagagaactcagttacacctaaatttactgtaaacaatttcaggctctattttaggagactgaggagggcagatcacttgagatcaggagttcaatcaagaccagcccagccaacgtggtgaaaccccatctatacttaaaatacaaaaattgccaggtgtggtggccatacctctagtctcagctactcgggaggctgaggcaggagaatcacttcagcccaggagattgaagttgcagtgagctgagattgcaccactgcactctgctctgggtgacagagtgagactgtctccaaaatataataataaaagtaagaagaagaataatttcaggccctaatcaagctgagtagtaaaaacagtacagaattagttcttaagccaatgctatggtctgaatatttgtgttctccccaaatacatatgttgaaatcacaacccccaacatgacagtattaggaggcgggcctttgggaagtgatgaggacatgaaggtggagccctcatgaatggtattatcacccttgttaaagagactccagagagctccctcgcccctcccagcatgtgaggacacaatgagaacgtgtcatgtagcaaccagaaratgctccctcaccagacaccaaatctgccagcgccttgatcttggactgcccaaccttgagaaccttgagaaataagcatctgttgtttataaatcacccagcgtatgggtattttgttatagcagcctgataggaccattctgtttagtttatttctatgtgacacacagtagtgtgtgtactgattagttggtagcacaggctgagtcatcctgggtaaaaatattggctccatgttgaccagccatgtggacctgccacattaacacacactgtttcactctacccacctttgaggcaaatggtgccaatttcatagagctmttatatgaatgactttaattaatcaatgcaaagtagcacatagtaagcccaatgcaagtatagctattattatgatttgcctttgttagtgattattagagcttcttttcactaagtgctggatcccagtcgcaaacctcatatccctgaccctcgtttgctgtcagaaattaacacaggtgaaggcaaaatgtgagtgtcaatctgtggcttctaatcctctgaagcagctcccttcagggagcccacagagtggacgcactgaaggctgcacacttatttaaagccccagtaatgcctctgaattgtaagacaaatttgtcatctaaagctgccagcaaaaatgtgatcggctcctgtacggctccctagagagttctagtagcgtgggctttgcccataaaatatggttcctgcggcagcaaagcagattccgttcaacggtgttcttcaattacttttttcttcttctgccttgtgcagcatttctgctgctgaaatgaaaaagcagtcaaaggacaatgccattttatgaaggttttgattaaattcctcaaagtctaagagctgcatttaaagcaattataactggttttagaatccgctttccctcatgctgagggggcttgtggatagctctgtcttgagtgaggctttgctgtaaaggccccaccttaggtttggtgggattagctggcttttcttctctgtgtatgttggggacagaagctgactgtttctttatgcatcaaggactctacctccctgagcactgaatttccctttgccaagtgcagccaagcacctatacagatgcatgttgatatggtttagcaataagtccccacccaaatctcatctccaattgtaacccccacatgttgatgcagggacctggtgggaggtgattggatcatgggggcagtttcccccttgctgttctcatgatagtaagtgagtcctcaggagatctgatggtttaaaagtggcacttccctctttgctctctctctstctctcctgccagcaggtgaagaaggtctttgcttcccctttgctttctgccatgattgtaagtttcctgaggcctccccagccatgtggaactgtgagtcaatcaaacctttttttctttataaattacccagtcctaggcagttctttatagcagtgcaaaaatggactaatacacatgctaactgtccagaggcacaaaggggaatctctgaaggacctgacagtatgcagacagtgstcaatatgagcctcccyaggtcctccctctatgggtcctgtctgcttaggaaccaagcacctttaccacacacactcagccactccaagggggctgtgtggggaaggtgaactcagttctgttgctgatctgcctgtcattatctaggcaactccccattatccagcagactcataagcttacatgcctttccaaaagaatttgtactggcccagtgaaattatgacctctctgcatggatacctctttccttctccctgcctatttttctccttttgcctattagtatctaacctgctaagtattttccttagttatcttgttgttttctcccactaaatgtgagctttgtgaggacaatgatttacctttatcacagctatgtcttcagcaatcaaaagagtgcctgtctcatagttggaactccataaatacctgttgcatgaacaaatgaggaatgaataatcggaaagccaatttttaaaacaaagggataagtcaccgacttasaaaatttgcttcttaagagtaacttgggggtttcrgtttggattatctgctgctttgcttatccctgtcctcgttctcctcctctggtatcgtcaatggcagtgggctatagtttcttctctacttctctagttgcattttcactctccagtgacctgcccctggaaaactcagggcttgggggaatggggctgaatatcttcctccagggcaggtagctccttaaaaaggggttggtcggggggctgagcccaaggcccagtttcccttgcaaacccatttatgagagaggaatgagtgaaaggggaggcaggcatgttctagtggagasctttcacatggtacgaaacaccgagagtgaggaatccatgttccaatgaatcaaaactcctgtgtgagcatgtgctctgtgtcttttcattgagtgcatgtttgtcgagatacgtatctaatgttttttatacaagaacatattcacacacagatcacacaaatatggacacayatattgcagcttgcccttttcatttaataacatatcttagtttttcaaaatcaccccgttttaaggggtacaagcaaatgacacaagaaaagagacaacatttttcccaataactttgaccaagaggaacatataagattgaattcgagtttcagcccctgtggatcgctgtttcttcctgagttgtgaattgctgggctgggggtgaggggtgagtagggagctggtatcagtggaagaggaaaaacaattgactccacaatcaccaagtttccaactggtgacaagttgagcacatagatgaatgtagaactctctgaatcagaacactsttagaatttgacacagacacaagatcagagggaggaattatcttgacttcagtctgatggtaaaatatccagattatttgaaaatttataagaatttctaaaacttgtgatattaatgtaccaggagaggacatagaatcttttccacaggaaaaatcaaaaacccaaagagaatagttgagtattgtcttttcaaaaaaacctaacattgtgtccttcgcaagcaacagtcctctgagatacagaattttgaatgctgttaaaatgaataaaaatgtcctcattaagcttcacacaataccaaacctccaaggagatgctctggatttattagaagtaaattgaggccctgatgaatcaaaggaaactgttttggatcaccttgggggttttcagttttaaaaktaggttgtttatccctggacaarcaaactcacggaaagcctcaagatgaggaggtcatagtgctgtggcttctgaggacaggaaatgaggtagcccactcataggttgattagcatattagacaaggtgggctaggatgtgctatggaaacacaccctaaacccaaaaagtcttaaccgccggtgtgctggagctggcttgtatgactcacaaaagccaactgttagcatttcttctaagctctgcatttaactggtagcctaaaattgaccatgaccgaagtatttacaccayagaaatcatcaaatactacaaatcagatttttttctctccagaaagtgggttgttaaacataggtgcaccaacgggcttaacataataaccatgacatcatagaggcttatttttttctcattcatagcccagcatttatgtttctccagggaggctcttggtgcaattgcttggaaatccaagtgccttctttttcatggtttcactattactagggcctaggagtttttaggactttagagtcatttattggatgctctgaatttattagccagtgagtggggagagagggtttggaggactgcctgagagttttttatggaccaggactagaagtagtatttactggagtcacccacrttcctggccccagcctacttgtggggcaaactgggaaatgcatcttctgcttgttctggaagaggtagtatgtttgatgagcacatagcattacccctgccacaattacatgacaaaaggtattaatttttttctgttgttttttttttttctttcttgtagaacttactggtccaaccttatggtggagagtgaattaatgctttaaatactctgaaagggaggagaaaataaaggactagggtcccagtttgctctaaaacttaccccagttatttgtgtgcaacttctgggagtaagagtgcttctcaggttgggaggagtcatggggcacgatggctacttcttgccaagtgtgtttgcctgggctaccataaaatgtaccacggacytggtggcttaaaacaacagaaatttcttctctcttagttttggaggctagaagcctgaaatctgggtgtcaccaggattttttttttctaatttccaacttttaatttgtgaaggatatgtaggtttgttacatacgtaaacgtatgccatggtgggttgtacagatcatcccatcacccaggtagtaagcccagcatccattaactattcttcctgatcttctctctcttcccacgtcccgtcctctgacaggccccagtgtgtgttgcccaccccccatgtgtccctatgtttttatcatttagccctcacttgtaagtaagaacatgcgggatttggttttctgtttctgtgttaatttkttaaggataatggcctccagctccatccatgtccctgaaaaggatgtgatctcattccttttkatggctgcatagtattctgtggtgtatatgtaccacattttctttatccagtctatcattgatgggcatttaggttgactccatatctttgctattgtgagtagtactacgttgaacatacgtgtgcatgtgtctttataatggaatgatttctattcctttgggtatatactcagtaatgggattgctgggttgaatggtatttctgcctctaggtctttgaggagtcgccacactgtcttccacaatggttgaattcatttacactcccaccaacagtgtagaagcattcctttttctccacaacctcaccagcatctgttgttttttgacttttcaatatccattctgactggaatgagatggtatctcatcgtggttttgatttgcgtttctctaatgatcagtgatgttgagctttttttcatgtttgttggccacatgtgtgtctattgagaagtgtctgttcatgtcctttgcccaatttttaacggggtttttttttcttgtaaatttgtttcttgtagatgctggatattaracctttgtcagatacattggttgcaaaaattttctcccattctgtaggttgtctgtttatgcagttcgtagtttcttttgctgtgcagagctctgaagtttaattagatactatatgtcaatttttgctttgttgcaattcagccggattggttccttctaggggctgtgagggaaggctctgttccaggcctctctccttggcttgttgacggccatcttctcccagtgtctcttcacatcaccttccctctgaatgttcatgtccaaatttctcctttcaataaggacatcagtcatattagctcgggggtctaccctactccagtatgacctcaccataattgattatatcttcaattaccttattccaaataaggtcacattcagagttcctggggattaggacttcaacatgtgaatgcttggaggacacaagtcagctgaccacatccagtgaggttgttcggcagtggttctaagtacagcagtgtggtgcagtctcccatctcaccttcagtcacmtgcacttcctaccctcagcccaagcaattgcccatcattcattcttttctgctactgtactttgtgcacacctctcttattccatttatatttttctgtggttcataactaatgggttaatttctcttctcagtctgtggtctcttttaaggtagggactccccatttctgtcctggagcctggcatagtgtcttgcacaatagtaggcctaatgtgctgtggaggttgaaaactggaggcctccactctacccacagcatctgcccaggccgcctgtggaccagagcaatttctcaggatcaggggtggaggtcactgtgagggaaactgagggtaggtgatcaagcaccatgaccaggctaaggccatgctacattttaacaatattcaaaacacaaagggagagatcacaaggtgaaaaatggatattttgttttgctttttttttaaaggaacatcatctgtgaaatagagacaattccttgagggattttaatggcaaaatttcagtaatttcagaagctctgtcttgtgatagcatctaaatcccaactggtttttattagtatcatcttgcttcaagccatacgagaataaaagaaaaaaaaagaaagattaataattaaaatcctgggaaaagacagatttccagtttgattagttattgaaaatggatagtcacatttcaaagcgaggctgcctgcctgctgatgaatttattttttttggtccttatttttcaatgatagaaaaattcacttttactctggaaagttctgaatatgcaaaatctgcacaaaaataagcttcctaagactctgatcactccacacccacaagcagtgagattcctagtaaacactaagatgtagaagactgttggcaactaatccagggattgtgaggcaggcatggctgctcatagtggttactttyatagtgtttcaggagacctgattagaatgagaagaaataggcattttctctgtaaagttgcatattacactgggcttcttcaatatagggaacaaaatgaatgaacatatcctttctcattctgataacagtaattgcattctcattctattcttaagtccattcttccttcttcagagtttttctcccaggataatccaagcaccccagtgggggctcactcagttcaggagggttggacctgattaaaagcactgtgcagaagaaaatacaagaccaggcagccactggaggatctattttccctgctgttcgtgccatccactctgagggggctgtccctcagacctgggtgatatggtttggctgtgtcgccacccaaatctcatattgaattgtaactcccacaattcccatgtgtygtgggaggaacccagtacaaggtgattgaattattggggtgggtctttcctgtgctgttactgcgttagtgaatgagtctcatgagatctgatggttttaaaaaggggagttccctgcacaagctctctctctggctgccaccatgtaagaagtgcctttcaccttctgccatgattgtgaggcctccccacacatcatccacacagaactataagtccattaaacctctttcttttataaattgcccagtcttgggtatgtctttatcagcagcatgaaaacagactaatacactgggtgagggtggctgcccacctgcagggagcattatagggtttgaggggccaccagacaacaccactttgccacaaggttctcagggtgcaggaggagagagtgcttcttggccatgggtgtagctttctcccaggggttcagttctagagactaggtcttcacgttgtacactgcagctgttctccccaaaacgcatggaacagggtcagccaggtcaggagggattccaaaggcaataggacacctagatgatgagcaagagcctggctactattgaatcccttaaaatattgggcgtatgtggggtggcatgggggtgatggagatcaagctattggctggccagtgtctctgaatctcaaaggaaaggtctgggtggcaatgtctttactctggagaatttatcctccctcatccttgcagaatgtgtgtggtatacttgggcttcctgtgtgttactgggcggcccatcccaaaaatgtttgcttagcctctgcaggccagcagcaaattagcttctgtaccaacagctgcctatgttatggatattaaagatatcgagatttctctatcatgtcttaaaatgtttttttaaagttttcattttatttgataagcagatgtctaatttgtatgtagtcaaagtgattgatattttctgacatttttcctrttgttttcatgtgtacgagttttctaatgggttttctttttctcctatttttctcatcatccagaatttacttttggctataatgtgatgtgaaggtccaaaaaactagccaattgtcacaatactaaatgttgaaaggcttatcaattctccattgattcaggcttttaaaaaatcctatgggtacatagctatagggtaggttgccatcaggagacatgaaggccagggtggtttgacatgaacacatccagaagttgagtgagagtgaagacaatrataagagatgcttgtgtctggtgaactcataaaatggccagcagaggcacagaggcagaagccacagctcctggttggaggttgctttcctccttcaagcggattagagtgactctgaactaagacataccaggatcccgcagtggctggccaggggccttacacatgttactgttggaattcttatgaatcttaaagtaataattcttaaagaccatgttgtktccttactagacggctcwttgagtgaggacagtagccacgtctgagttatcttctaaattccctcagcaggagcacagcatgtttcacatgacagatgatctgtgaatgatttgctaaggattggccaaagctacgttatgctctagttattcccactactggccagagtgccaagttcctgcagtcagtgtgagtgggcattatgtattttccaacatactgtataaagtcttgcatccttttcactgcctacttctacctctgtatcctcctgttggagggaatcattctagcatcactatctgggaacaaaacaaaacaaaaccaaccaagcataagctagagacctaatgctcccaaatcccatggagacatgtctgagtgtgctgctggaagatttaaggcagctggaataacataaatgacaagcctgacctacaaggtgaagattaaagaccagctaacacatgcattcttttttcttttactagataccgaacaaggaagattttcttttgtactcagaaaaagttgggatgataaaatggagataatacagataatggctctgttaatgggtcattttctaatacatcagagttgtgcatgtatgtaaattacatacatatgatatatacatgtatattaaatatatgtattcatatatatatggattaccaagtgttacacttatcacctatgattaaagaaaaaatacttttatctctcaagagaggggtttgcacatagcctgactcttggctagtgttagagttcaggaaccaatacaccaaaatatggcactctgacactctggcctcaagaagaaggctcaagttttctctgaccaccccctacccccacccctggttcttgtctctcaatcttgtctctcccaaagcasttgatgaagtyggtctctaaagttcgcttatctgcctgaagtctagactcaccaargaagaaaacaatgacccctggtaccttccctgagttttcattaactgcattcatgtcatgggaagacaggttgaagtctgttaagacacctggacagacttttgtcatagaccatyatctgctctgtgggccaaacagactttctcccagaccattgtatcttctccaagcccattgtatccccctaaaaataacttactacctccctaaaatcatccgcatttccccatcttcctttctcgtatgaagaaggctatacaagcatctgtagcccatggtatggtggggtaatcaccctgagatgtcccccatgcacattaataaaaatgtgtatgccctttcttcttttaatctcccttctgtcagttgattttcaggcaaccttcagaaggcagagaagacgtctgcccttggctcctgcactagcgacttaaaggatgactcctgttaagtttcattatcctagtatgtaggtaytgtttgtttttcaaagaagctcaggcttattatagagaatttgagaacacaagacaagtagaaatgaaggaaaagtacacacatatataaccttagaaatgtcattttgttatggtctgaatgtttgtgtctccccaaattcgtacgttgaagcctcacccccatgtggtggtattgggaggcggggcctttgggaggggattaggcctgagggtagagttctcataaatggaattagtgcccttataaaagaagcgtgagggggcttgtttgcccttccagcatgtgaggatacagggagaagacaccacctgtgaatcataaattgagccctcacctgacacccaatctcacagggccttgaacttggacttygcagcctccaggactgtgagaaatacactgctgttgcctataagtcacccagtctatatggtattttgttacagcagcctgaatggactaggacacatttttattttaaagtttgagctctagcaatggagtcagacagcaagacagcttggggagccacctctgtcaacaagggaggagaaagttgagaagtgccatgaaaatgtccctgcttcatactgggcctctcagcaaacttctcttgctggtgaggcctgggcttctccctgctccacgtcacagctggttctgcttggtgaggtgaactttcctaccacatactcaccacatgcacctccagcctcccttgggaaagaactggcmtctgtgctccatcgggmctcaatgacccagccttcaaattaacccatggctttctttctcttttttttcctagacaggaattatttccctctatgattgtatttttaagaggcgcctagattatgatcasaagttgcaccgagatgacagagaacatgcaaaaagcctgggacttcatgttaacgaagaggtaatattaagacagaatattaacaagttgtcaacagattaacaaaactttatagaggcatatctagttttattacacttcactttattaggcttcatagatactgtattttttacaaattgaaagtttgtggcaaccttatgtcaagtaagtctattggtgccatttttccaacagcgtgtgctcacttcctatctctgtgtcagcattttttaacaataaagtatttacaaattaggatctgtacatttttcagacataatgctattgcacactcaatatactatagtatagtgtaaacgtaacttgtatatgcactgsaacaccaaaacgtttgtatgattcacttaatagtratatttattgccgtggtttagaaccaaacctgcaatatctctgaggtatgcttgtacgtgtgtgtgtgtgtgtttggtgcggggtgtatgtacagtcatgccttgcttaacaacagggattcattctgagaaattcattgctaggtgatcttgtcactgagtgtacatcagagtgtacttaacacaaacctagatgacatagcttactccacacctaggccatatggtacagcttattactcctaggctaccaatctgtacagtgtgttatgtataaaatattgtaaaggattaaaacacaatgctaagtatttttgtatctaaacataaaaaggtacagtaaaaatatagtataaaagataaaaatgatacacttgtrtatcatttacttaccatgaatgaagcttgcaggactggaagttgctctgggtgagtcagggagtgagtggtgagtgaatgtgaaggcctaggacattactgtacactaccstagacttcataagcactgtacactttggctacactacatttattttaaatttttttcttcaataataaatgaaccttagcttactgtaacttcttaaccttataaactttttaattttaaaracttttatgactcttttgtagtaacgcttagcttaaaacacacattgtacagctgtacaaaaatattttctttctttagatctttatgtctatttttaatttttttaagcttttaaagtttttggttaaaaactaagacacaaacacacaccttagcctcggcctacacagggtcaggatcatcagtatcactgccttccacttccacatcttgtcccactggaaggtcttcaaaggcgacgtcacgcaacacgcatggagctgtcatctcctaggctaacaatgtcttctctggaatacctcctaaagaacctgcttgaggttgttttacagttaacttttaaaaataagttgaaggggtacactcttaaaatagtgataaaaaatataataaatacataaaccagtaacatagtcatttattattattgtcaagtactatgagctgtacataattgtatgtacyatgttttatatgactggccgcacagtaggtttattttcaccaacatcacccaaacacattaggaatgtgttgcactatgacatgacaacagttatgacatccttaggtgataggaatttttcagttctattaggttttgacattttcatggcaaaaacagcaattacttttgcaccaacttaatattataaccttacgggactaccgtcgtatatgagatccatcattgagtaaaatgtcatgtggcacatgactgtatgtgtatatgtgtatgcatgtatataggcatacatgtgtgtacatgtgtgtatgtatatatgtgtgtayatgtatgtacagatatgtatatttgtatatgttgtacatatgtttgtgtgtgggyatatgtgtaatatgtgtacctgtgtgtatatatgtgtgcatgtgtttgtgtatatgcatgtgtgtatgtatctattatatatgtgtgtatatgtgtgtgcatgtgtgtgtgcctgcttgtgaatgtgtgtaaatatgtgtatagatgcatgcatatrtgcatatgtaggtggatgtgtatatattatgtgtgtatatatgtgtgaatacatgtatatatcatgcacatgtgtgtatattgtatgcatgtacatgtgtgtacatatgtgtgtacatgcatgtgtgtgtgcatatacacatacatatttaatattgtgctcagctgctctatgtaattttctttatgcagctctcctctatctttttgtgccaagaagctaaggctaaggtactattatatatagttccctctattcagtcatgtcattgtgtatttttcttgatattgttgtttggttctttagaatttaacaatttaaggacagcaaagctaagacattcccttcaacggataaaacaagtctctgcttaacctctgagtcctggctttcataatttttctagaaaagttggtcttgcggagcagaaattgcacacaygagaacatttcttccaagtttagttaccaagccaccataaccagcacatgtggtgcattctaagttgatgcaaagttattgtcttcctcaggagaaaactgtggcaggtagtttttcagaaaaaagccctctcagagctgccattcctgaaggaagagagaaaaaggcaaagaaatcatgggctgggtgtggtggctcatgcctgtaatcccagcactttgggaggccgaggtgggtggatcacttgaggtcaggagttcgagaccagcctggtcaacatggtgaaaccctgtctctactaaaaatacaaaaactagccgagcgtggtggtgcacgcttgtaatcccagctactcgggaggctgaggcaggagaattgcttgaacctgggaggcagaggttgcaaccattgcactccagcctgggcgacaagagcaagactccttctcaaaagaaaagaaaaaaaagaaatgatgagcaaattctaggtagtgatgagtggtatgagggaagaggaagccatgtgaggatgtaagatggggaaagtgagagggatgagcagggagctggggaggggaggggtcagggaggacctggacatctgagccaggatctgggtggtgggaagggaccagcagcagcaggagctgggaaatgaccaggaaragcacagggacaaacgggtagagcaaatkgtccggcacagtttcccaacatgtccaatgaatacaccagccagccttctagcaaattcaacggttccctgccataggctacttccctgtgaagcmcctggcttcagcgtggaggttccctcttggtctaccatggtgggacccaggcagaaaaagctcccaggacccaggctgatggrtgcacgggtgagctgtgctggcgaatgcagtggtgctgactatgtgctttgataactttcaccaggaacaggagaggccggttggagtrctgacgtcttctgtctatgggaagcgcatcaatcagcccattgagcccctaaaccgggactttggccgtgccaaccatgtgcaggctgacttctacaggaagaacgacatccccagcctcaaggaayccggctttgggcacattgctccatcctgaagcatccccgtggcccacagggcatgtccgataccctgtggcctggcaagtttgcacagygagaaggtggcatctggagcctcctttccccttctcatgacgcctaggagcttggctatgcctgtgttgcatctstacagtgggacacatgaacacrttagcagcccccctcaggttgctgggttaggagcctgaccaacaacacctttagtacatgtgaagagtctctgatgtgatgattttcagctggaattatttttgatcaaatgaatctggagaccgattcattgtgagcacctgaataaaatgaaaactttgtttccccttggtaactgttgggttggtttctgttcactggctctctacatttgccaggattctttggggaggcagtcacaggagtgaggtgcagttgcttttcccacgagttaggggaactcctgctgcctgaacacaaacaaccctgacatgttcccttctccaagaggagatgtgatgacaaytgtcttttggcacaattgaactctagaaactccatttttgtttttccagaggtctgaatcccaaataacagaattttgtgcagtagggaccaggagccctagtaaggatgggtggccctggtggccagcaatgctcactattactgctcagagagagggggccagtcatgggaagaggctagatttcggtgttcaacaaacttgggtaaaattctggttgctgcattttctagatttgtgttctagggcaagtcatatcatctacatgagcagacatttcctcatatttaaagtggaatttccaaacctagargagttcatgcgggaggcaatgagctgctggagcacaggcataacacaggtacccagtgtgtgccccacccagtgccccgtcatcacagcaatgacttgactttaaacagtcttctttttggaagcagtcgcttrtaacctaagttggaaatacttactttggagataatttgaaacttacccaagtattaaagtatcatcagctacatttttaatgaatggatcccttggaagaaatcatctctcatctaccatgattaaatttcccacagtttagcagtgaatgggcaggtggcctaattaatttcaatactgatcgctccatcactggttttattgttttgaatatggaaaaaggattctctaaaaataaatgacactgaattccggcaatttcaaggctgagtgactcctaagtatttctttatttttttgaaaacagtttttcagtgtaggtgtcttttatttatttcaaacaaatggcagtagtttatttcgaatgcctttgggtgcattataccatatttatagtaacataatagaaaatatataaagtttgggttatagaaatatttataaattattcattattcagacttgatttcaacaaagacaaggcatctgtaagtgactgtaataaatcaaagtcaaactaaattattttcatttactttcagtcagaccttactcccttcaccttctactacatactgactttcaaaaggcagggctgtaattggccaagatttcaaaagatctcacatttgttaggccataagagaaaatgaagtatatttctctcggtatcccagtgtttatcatttaaagccaatgcatgaatgcttgttaaagccatcacacatcatatcttcttatattaatggattgttttggtttatcaaattttcatcactgggcaattatgttgctttttcttttttttctttttttttctgagacagagtctcgctctgtcacccaggctggagtgcagtggtataatcaaggctcactacgttctggacttcctgggctcaagtgatcctcccacctcagcctcccatgtagctgggactacaggcacgtgccaccatgccaagctaattttcttatttttttgcagagatgggggtcttgctatgttgcccaggctggtctcagactcctgggcttaagtgatcctctctcctcggcctcccaaaatattgggattataggagccactgcacccggcctgatgatgttacctggtcattcggtgtatccagagcaaaggaaagatgaatggttgctgcctttaggagcacagtgagttgggaaggaagaataacatcctggattgatgacaaaacttagacactcctaaacagatatgtaaaacactggggtttttgggaaactggactggaggcaatttctatgagaggcttcctgtaagacttaaaggttaaggagagcattggggagagatttttttttttcttgaagccaatggcactgggacctgggctgatgagaggtgcactgccagttttctgcctggcatttttgctcacagggatgcttttagctgcccagaactttaaggagctttgaccaggaataatgctctttcagattcaaggaacaggcagttttccattctagcctggcctcaactgctaatcaactgtggaactctgaacacatgtgcctgaattactctgcccctgtttcctcacctgcaaaaacactggggagggagggaggtctgaagcttgatcagggatcagaatcacctggagaacctgttcactaaacagcagttgtgctgggccccagccccggggatctcaaattcagggtcctccttcaggttggggcctgagaatttgcatttttgataagttcacaggggatgctaaggctgctcctatgggaccacacctagaagggaccaggtacacacagagcttcccatagtggattctgacaatgactcaatgcttttaaaagcctattgtttggtaagactggtgatatggctttgggagagcacagttctccttttgagttctttttagcgcaaacccaagttcggtgcaccccgtgggggaatgggagggactctgtttatgagaacttggtggaccacccagctgggggtgttcactcagggtaggtgaactaaggtgacctgcggatgagtgtagcaggatgtaacagaggaagaacccacgaggcacgcctgctgctcatccttacacattttacaccaaggccagtttgagctcacggaaacgctacggcatccgtgaagaatgagttagaggaaagagaaaagcccttgtaataattctcttgctttaatcactgtttttggagatttaggtatattaaggccaatgctgagttgtgattacaggatcaaaaaattccccattgaggcagaatactaaataagtcatgctctactcacacttcggtgatgaaggacggttatcagcttcgataagtgccttttactgggaatgagtcacagtcctggcacagcagctgtgcccgtgctgtgaatgtaccacggggcacctgccaggctctctcacagtcattgcctcgtttaatcactagcgattccataagttgccaataaggaaagtactcctaagagggactaagagatgtgttcaaagtcacacagccagtaaaaaatcagagccaggattcaaaccaggaacttgtgcttcaagttcgagttcccacgaataaaaggcttcctaagagatcatctgggttctctacttcttacagatgcctgccatgagttataaaaagaaaacaagtttgaccaactgggctacaatttgcagttttgcttttaaacattagcttatacacgattgctctacttttcactatttggcaaagtatgatttctttatgttaaaagtaccaaacaacttgtgttggatttacaagaacaaattcttcaaggccttctgtctttaaaaatgcatgaacgttggctgtgtgtcttctttagccttctcagacttaacaggcagtttgtgggtcttagtacttctctcagttagctcacgctattgtgagactgatttgcatagctgattccaaattattcttttgcagtctatgtctgttagctctagcaaaacattcttggagacaggagcgtagtggacggagggggcactgttgctcgcagagaatctttttactattaaagtatttttccctgaaagcgttctctagagatgcccaaattaaaatcagaccactagatacattcaacatgcttgcctgctttccagggagctgagtaaccagttatctgcgtcacacactgtgtcctaatctgaattacatctcaatattggcttctggagagctctttctgaaacaactgtgtcaaaagggagaatggatggaaaacaaaccttaattctggagcaaaccacaggagaaagaagacaggaaaataaaagatacaggcactgtaaatcaaagtacataaaacttttaatgaattaactttacaaaagacaaatggcatcaaaacatcagacgagtttgatacaaaactggtcctaggctgtgaggactaattctggtgacggatggcgacgtgctgctggcatgagacacacggagcagagggacgagagccgtgggtcccaacgggggcccttggacaccactggcaatgagacaatgggtgagcacagagtccacgtgggggacagaatcaacttattcacgaatactgtgtgtttgaatatcagatgagcagatgcggttggcgagctaccatattttccagaaaagaacatgcaccagaagataatatacaccccctagttttattgccttaagaatgtgtgtgtgtttcacctttctcctctgttagttctcccagtgcttttcttctatcacgcgcgctccttttcccttttgcttaggagcaagcacagtgcaagtggcagaacgatctgggcacacatcagacaccaaacggtatgccactgggtcacgagaacgagtctgcagaggctccataggacagacagcacgcacatcaaaaacaagggacagaagttgcagtcagaaagtgtgtgataccttcctgaaaatacagtcttcttgccaaaatgaaggtgactcttcaggatgccacgttgctctgggaaagggaccttgacatttctgtgtttacaaagtacgtcttcaggtccccctttcctttcacgttgattattcctcgacaggtgcacgtgtatccgagggtctgcaggacgaggctcgtctcctcggtaacctagaaggcacaggaacacgggaaaacgggcttagtacatacattgatacaacccatctgactcaaggatgcagagctaaaaaaagcaccatgctctttgacccaggaattccactcctgagaagttagtagaaaagtgagagtaatccacaagaaaaaaaggttgtaaaggacaatgttgtttaattcagcgctgggatagtgaaaaactggaaacaacctaaaattcaagtaactccagtaaactacggtgctaccatgatgctatcatggatgacacaatgtcaaaccatttcacccagaaaaggaattgagcctggatccaggctatgatttcaaccacatgatgttatgtattcacactgaagagacctggatgaaagagagtaaaccaaaatagattggagtggtgggattctggatgatgtttatacattgtcatgaatgtcctttcatgaaataaacattaatcatagatgtcagtgtcgatgggaggaacaccccgagaaggagcactgagcactgtagactcctgccaatggtcgcgtctgtcaggtttgatgcctttgagtgaagtaacctaaaactgaaagagctgtaggaatttgcactggtgtccgcatgagcatgatgctcccagtcaagtctcaaaggtctcctcgcttcactgcattgaaacgggggctaaggagggcagcccctcttgcaggctgctggcttgacaggaccacttatttcctgccattgcaccgacaggcgagggacccggcagccgaaccatgtccaggccctgcaggtcggatggccgtgaacttgctggctctgacagcttcctcctcagcggagatgcactgtccagtactggctccctgagcttctgcgtgtgctgcgccttccttaggacaccctgtctgggactgtgggcccgcgcctgcctgggcttgggctgcctgagtgtggaggagctgcaaaagcagagaaccagtgagacacacaggcgtggtctgagggtgaggcctcagcttctgaggccagggaagacccctctgttggctacctgctcctccacccagtgtcccctagcaggtatctgagtttgggcagacagaaagccctggtaatgctgctttggaaccatgagaaaaaggcacaaaggagcaatctcctcccacttcatctgagaaggcagctggcatggctgcaacaagggcacctgtgagaccctggccacctccagcactggagtgacaaacctgtgccaggtgggtgtgacagggctgggcagcttacaagccacatagcagtgttatggcacacagcagtgttgctatggcacccagcagcgttgttacggcacacaacaagtgttgttacagcacacagcagtgttatggcacacagcagttttatggcgcacagcagcgttgtcatgtcacacagcagcattgtcatggcacacagcagcgttgtcatgtcacacagcagcgttgtcgtggcgcacagcagcgttgtcgtggcgcacagcagcgttgtcgtggcgcacagcagcgttgtcgtggcacacagcagcgttattatgggacacagcagtgttgttctggcacatagcagtgttgtggcacactgcagcgctgttatggcacacagcagcattgttctggcacatagcagtgttatggcacacagcagtgttatggcacacaggggtgttatggcacaattttggttgtggtgtgtcccggggaaggtgcaaaggtgggggccgtgtcaacagcaaagctccagcctccttggacttggagactaagaaaggccttgagggcagacatcactgttggggcagaggtagaagtgcaaggaaaccatgaggggctgtgctcatgagagcccaggacagcatccagggacgcccagaaccagggtgaatcctccatgcgcagatctcaagggcgg

SEQ ID NO: 96306 - DNA, 13118 bp, Homo sapiens
tagttctatatgtgcacagaactgtgcaaccattaacactagttaatactagaacacattcattattccaaaagaaatcccatacacatcagtgttcactctccagtcttctcttcyccccaacccctggcaaacactaatctacctcctgtttctatacatttgcctattctagacatttcatataaattgaattatgtaatatgtaacctttaatgtccggcttctttcacttggcataatgttttcaacgttcatctgccttgtagcatgtatcagtacgagtttattatgcctaatctgaaaatctgaaatctaaaatgcttcaaaatctgaagctttttgagtgctgaaatgacgctcacaggagatgctcattggagcattttggattttggattttgggattagagatgctcaaccgtaagtataatgcaaatattctaaaatttgaaaaaatctgaaatctgaaatacttctggtcccaagcattttgaataagggataacttaacctgtacttcattcctttttatggctgaataatatttcattgtatggatataccacattttatttatcagtttatcaattgatgaacctttgagtcatttccgcattttggtataatgaataatgctgtaatgaacatgcctgaataagtttttgtgtggatataggttttcagtgcttttgggtatatacttaagagtggaattgctgggccatatggtaactctacgtttaacttttgaagaagctgcaaaactatttttcaaagaggctataccacttcactttcctaccagtaatgtatgagggttccaatttgtctatatccttgtcaacgcttattattgtgtgtcttttttgattatagctgtcttggtgcttatgaagaaatatctcatagtggttttgatttgcatttccctgatgagtaatgttgttgcatgtcttttaatgcaatttcagctgactgtataccttccttggagaaatatctattcaaaatttttgcccatttcaaactaagattatttgtctttgttgctgagttgtaagagtttatagattctggatgcaagtctttttttttttaaagggtatgtgaacagaaacacatttattacaaaaaaaaagaaaacccaaaatgaaaaacaaattcacattgtattgagctacaatatggcagcagattaaagaaaaatatttttagacagtttaggataactcctaacagaacatagccttgttgccacgtgacaggacacgggattccaagtactcggtagcggcgagtgaagcgggcattgatgggcctgctccccctgctcgggcctccgaacccgccttgcataccaccgtgtgggatggggtggccccgggaggccccgcctggggcaaagctgccgagccctgacatcccttctcagttcatcatgtggccaggcccggagtgaccggacatgcttctctcaccaccttgccacctcttgtgatccctgtccatcatgcccccatcagctgtgccctgccatgctcagtcatcctctcttcagccacggtcccccgagtagtcatgtctgcccctggggggaggaggcagcccccggccctcgctcatcctcctgtcggagccacagcccccccagccatcacgggagtcccggctgtggtgctctggtcctgcatggcgttctgggtaatgctggacatcacagggccagagggaaaaaagagcttcagtgtcagcccccagaccccaaggcttttcaggcaacacgctaacgatgacaacgacagtcactctggacagaattgttggcaggccgtattggttcacatgacacagctgcctccctgaaatctgtaggccagaggccctgtgccctaggctcacggcctggtacacaaaaggtaccagtaccaaggcatctccaaggcaggtccccatggcaccaccagagctgggaggaccaccaggagtcacccactaaagatgatgcttactagagagattccctgggtcccacagcccaaatggttagtgcccagagccaatagtattctcttgttaagtgtcttctactaaggaaagttcaggtttataaactttaaatgtgtgcatattctggaaatagtttttacaaatttcttccttccacactgaaggaagtatcaaacgtagcccttcatctgaccaattgctaggcaagcatccttcctcatagtcaagtttctcagaagtttctgctgggtgcccggtacagggccttgcaccttgctctgctcaggacacaggacactcagagataaacggctggaagacagccgtacccttggccagtcccaccattccctcctctgtgtcattgtttttgtgagccacgtggctgacacagaccaggagttcttcaccctgctatttgagggaagaccaagagagggcgagtcatactctatgcccacttctttgatggccacggttaatatttacacccacagcctgtttctgtggctggaagcactttccagcctgactttcacaaaagctagtgaggtagctttggctctacagtcctgttctttctctttccacaaatacagtatgtggcctctggggtttttgccccatgaccatattgcaagagaaaagaaacgagaaaggagtcctggtaaggaaacccccttgacggagcctggtcgttgtccatgtccaagttcacctccccattaaacggagaggtcggccagggcgaaggcaaagatggcggcatgctccaccacgtgcaagatgtactgcgtgaccactgcctgcttccctggcctattctcccagtgtgtgctctgacgcctcccctcaacaacgtaagaaaagggactcgtgaaataagagctccttagtatttgaaaattgaaccaacatttttctgtccaaccaacccagctaacagttcaatgaggcccataagttctgtgctagttttccctgtagggagatatcaccatttgcctttggggtaactctgatgactcatttatgactgtgtgtgtgagaagaaaggatcaaaccaccttccactgttaggagagcgtatctgacacctgcatgaaagcagcttgtggccaggtgtgctggctcacatctgtaatcctagcactttgggaggccgaggcaggagaatcacttgagttcaggagttcaaaactggcctggacaacacagtgagaccccgtgtctattaaaaaaaaaagtggctggcaatgataaacacgtttgtacagacacgcacccgcctcatgtaaactccccaccaccccaccctctgtaggaggaatattaccctcctttcactgctggggagacagactcagcaggaaggggtgataccagggtgtgaccccagttctgtctgattctggaggctggacatggaaccattggtctatgctcctccaccaaagaaaatccacaagactagttctaggttttgttgcatataatttgcctccaggagcagggaaaaaggaaccccaccaggctgatggaattcctgagaatcccgagacagagccaagtacttggctatgctcagccacattaaggaaccaagggggacagaaacaggaagcttatgctggagtccaggaaatgctggcaggaggaggaagggctcatgagaggagtcctcagagaggaggcatcttccacacagcaacgtgctgcccccaagtttatagtgaaagccactagaggtccaaggctctcctgggaagtctcagtctcaatgtaagatggaaggagaaaatggggcttattgttctaacgtgcgagccccacaaggagaacgagcacagaccagagacctagttgttttccaaggctaagtggggccctgggctgatggaggatgtccttattttccaaagagggcaggcactaggggacagacacagcaaccacagcctccccagatgcacctgtctgagtcagctgtgcagctcactagacacttcccagcagagcctggatacaagtcttaatttgattttgatagaggatggcaagtcagcatttcttctactctcaactatgtggactaagggttatacttatttcattgattatctattcccatagcaccctttctgcaacacactgtataattgttggctcaatattggtctctctacttagactatcagctatatggatctctgttttcttccttataactgcttttccagacccttggacaaagtagacatgcaatatttattgaaataaatggaaataaataaactgattggttgaatgaatgaatgcctgaccaggtgctcattgttagtaaggaccttcagtagaaggaagttctgttcctttttgctgtgtgtcctctgagtagtaacctctctgcagtcctacctgctcatccagcagcagggccaatcccttgctttctcagaacccaggaggctcagctgggcaggtatgcaggtctctctctggaactgggggccccttgtctgtgttttgaaattacctgatcatcagttagctgatgcctgtgtttcaggctgcataactcaaattcatttacgcttcctccatttttcccttcttctaaacacagtttaaattcacctcctccaggggacctccccaaaccactccagactgtaggaagcatctcttctctctttctccctctctcaatcaaataataaagacacatagtaaaaagacataggtgagtcttttacccctgactcgtggatcacctcaccacttcttaaagtcaatcacaataactggttcttttttcattccttccatagatatttcttatgaatatagataagcacatatatgctgcccccttttacataaatggtactattttgcacagtctgtatttttttccttgaaattacacctttaaaatctttccatggccatatttatagtaccaccttattctttcaaagagctatacagtccttccttccctccctccctcccttccttctttctttccctccctccctctctccctttctcccctccctccctccctctctctctctttttctctccttccttccttccttccttccttccttccttccttccttctaacagggtctcacactgtcttccaggttgtagtgcagtgttgaaatctcagctcactgcaacctctgcctcctgggttcagatgattctcctgccttagcctctcaagtagtaggaatacaggaatgcaccaccaagtccctctaatttttgtatttttggtagagatggggttttaccatgttggccaggctggtcgcaaactcctggccttgagtgatctgctggctttggcctcccaaaatgctgggattacaggcataagccaccacacccagcctaagagctgtatagtagttcatcgtatggttgtatcacagtttatataactatttctagtcttttatattacaaaagatgctttaattagtattcttgtacatatatatgagcacatatatttgtgaggggtaaaagcctagaattgaaatagctagttgggcgtagtgacacacacctgtaatcccagcgctttgagaggctgcggcaggcggatcacctgaggtcaggagttcgagaccagcctgaccaacacatagtgaaatcctgtctctactaaaaatgcaacaattagctgggtgtagtggcgcacacctgtagtcccagctacttgggaagctgaggcagaagaatcacttgaatccgggagacggaggttgcagtgagctgagattgcgccattgtgctgcagcctgggtgacagagccatactctgtctttcaaaaaaaagagagagagagtcaagagtgggaaaagagtggagtgtgtgagcagtacagcagcctcctctcctctcctcacctcgttctcacggactacttttaccgtccccgcctgctcgacgcccagaacaccttccaccatgaccacctcagcaagttcccacttaaataaacgcatcaagcatcaagcaggtgtgcatgtccctgcctcagggtgacaaagtccaggccatgtatatctggatcgatggtactggagaaggactgtgctgcaagacccggatcctggacagtgagcccaagtgtgtggaacagttgcctgaggggaatttcgatggctctagtacttttacagtctgaacagtgacatgtatctcgtgcctgctgccatgtttcaggaccccttccataaggaccctaacaagctggtgttgtgtgatgttttcaagtacaatcgaaagcctgcagagaccaatttgaggcacacctgtaaatggataatggacatggtgaggaacaagcacccctggtttgccatggagcaggaatataccctcatggggacagatgggcacccctttggttggccttcaatggcttcccgggaccccaggatccatattactgcagtgtgggagcagacagagcctacagcagggacatcgtggaggcccattacggggcctgcttgtaagctggagtcaagattgcagggactaatgccaaggtcttgcctgcccagtgggaatttcaaattggatcgtgtgaaggaatcagcatgggagatcatctctgggtggcccatttcatcttgcatcctgtatgtgaagactttggagtgatagcaacttttgatcataagcccattcctgggaactgaaagggtgcaggctgccacaccaacttcagcaccaaggccatgcggaaggataatgatctgaagtacattgagaaggccatcaagaaactaagcaagtggcaccagtaccacatccacgcccatgatcccaagggaggcctggacaatgcccgacgcctaactggattccatgaaacctccaacatccatgacttttctgctggtatagccaatcgtagtgccagcataaacattccccagactctcggccaggagaagaaaggctactttgaagaccattgcccctctgccaactgcaacccctttttggtgacagaagctctcatccgcacgtgtcttctcaatgaaacctgcgatgagcccttccagtacaaaaactaagcggactagacctccagctgtcaagaccctcctagttcttcatcccactgcaactcttccccctctcccagttgtcccagttgtaactcgaagggtggaatatcaaggtttttttttttttttttaaaggagagaaaaaaagaaaaaaggaaatagctggatcaagggacttttttcattcccattttacagatgagatacatgcctttaaatctttgatagatattggtaaatttatttccaaagaagctgtatcaatttatactctcaacaacaaagtatagaaatgcccattcatttgacaatgcatagtattatgcaaatttttgatatttgccaagctgacaaatgaaaaaatggtgtcttataactttaatttgcatttattttatttggaaagatgataatatgataacagatagttatacaagcacagcgcttcctgaatacttttacttgtatatatttaaagtacttaaataaatacaaatacttaaaaatacttaaaaggcatttgtagtaattctataattgtattcttgtccattgtccattttctgttaaggaaattaaatttttgatgataaaaattgaaaatagttttctccagctatattttgcctttcaactttatggtattttttggatgcagattttttaaaatgtaaaatttattattttaaaaaagttaaatctctagggattgatttttgcttagaaagattaagatgtgacttcctatgcttctccaagttaccttttgtctcatttttgcatatgactttgtgactcatctagattctatttttgtgtacagtgtgagatagagatttgtcctgattgtttttccagaggctagctgttttcaacagcaccttttcttttctgattagaaatgacacctttctcatgttccagatgacccaacacatttaagtctgtttctataatttatactgttctagtgatctacttccttatttaggtatcaataccaaatcacttcatttacagtggtcttatagtgtattttaataggtggtattgttatttctcaggattttatgattattttttcttttttatttattttaataattttattactttatttaataaatatattaatacatttattaatttatttaataatacgtctccctgtgtctcccagggtggagtgcagtggcaagatctaggctcactgcaacctccgtctcccgggttagcgcaattctctgcctcagcctcccgagtagctggaattacaggtgcccgccaccacgcctggctaattttttttttatttttagtagagacagggtttcatcatcttggccagactggtcttgaactcctgacctcatgatccactcaccttggcctcccaaagtgctgggattacaggtgtgagccaccgtgctcggccttttcatgcgagctttggaatcagattgtcttatattaacaaaaatgctcattggtattttaacatttatttaagtttatagattaatttcttagggcagtttttggtttacagaaaagctgagcagaaagcacagagtttctatacatttccccctcccataccatagttttctttttcttttctttcttttttttttttttgagacagggtctcactctatcatccatctggagtgtagtggcgtgatcacggctcactgcatcctcagcctcctgggcccaaatgatccttccactccagcctccagagtagctgggaccacatgtgtgtgccaccatgcctggctaattttttagttttttgtagagatgggggtctccctatgctgcctaggctaggcttgaactcctgagctcaagtgattctcctctctcagccttccaaagtgttgggattgcaggcatgaaccaccattcctggccaggtttccctatttttaatatcctgtattttaatatcttgtaattaaagttgatgagccagtattgatatgctattgttaactgaaggccatactttactccaaagagtattgtatgtgctttggattgtaagtgctaagagttttgacaaatgcataatgtcatgtgtctaccattgcaatatcatccagaataagtagtttcactgccctaaaaatcccatgtttcacctatccatcccgctctccctggtcctccgctgaatccctgacagcagttgatcttactactatcttcacagttctgccttttctagaatgtcaaatggttagaatcatatagccttttcatccctcacttagcggtttgcatttaggtttctgccatgtctttttgtggcttggtggctcatttcttttcattaccgaataatattccattatatgaatgtaccacagttgatccattcagctattgaagaacatcttcgttgcttctaatttttggcaattataagtaaaactgctataaacatttatgtttgggattttgtgtgaacatagttttcggctaatttgggtaaacacctaggagcttgattattggatcatatggtaagaaaatatttagctttctaagaaactgccaaactgttttccaaagtagctgcaatgttttctaatcctaccagcaatgaaggagagttcctgttgctccattatgggtattttaattggattagcattaaatttatagattaatttaggagtaattgaacatttcattatatttattggtattatccaagaatagggtagatcttccaaattatgaaatcttcatttatactccaagtacctttttttttttttttttttttttttgagatggagtctcactctgttccccagcctggagtgcagtgacttgatctcagctcactgcaacctccacctcccaggttcaagcaattatcctgcctcagcctcccgagtagctgggactacaggtgtgcaccaccacatctggctaattttttttttttttttttttttttggtagagacagggtttcgacgtgttggccagtctagtcttgaactcccgatctcagatgatctgcccacctcggcctcccaaagtgctgggattataggcgtgaaccactgcacctggccccatgtagcatttaaagttttctctaagcagtgttgggagataattctccagggggccctcctgtttctgcatgtcttgtgtttttctgcctttgttctagactatcttttcaaggacgtagtgtagcaaacagacttaaaagatagagttagcatctctcttagtggcagagggcaggcatgtttaaggtctagtataaaatattcagattccctgaactcaggcctctcgtcctgtagtgcagaccactgcaggtgcaggtgtcacctggccctcttttgccctgccttgcagaaactagagcttaggaaattgtcacaagaaaatgctaatagtctgactactgttattactgtaacaaaatcctttgtttctgatgaaggagtcttatgtctctgccaacatccatgaaactgtggcagactaaatttttagcttgcaagtagggaaagatgatttttacttagtaggaagaaaatatgttgtttagtaggaaaaaatatgttgttgttgtttccatataatggaactattcttattattttaaaagtctatttttaaacttgagatggagttttgctttggttgcccaggctggagtgcaatggtgcgatctcagcttactgcaaccttcgcctcccaggttcaagcgattctcctgtctcagcctcccgagtagctgagattacaggtgcatgccaccacgcccggctaattttcgtatttttagtagagacaggatttcatcatattggtcaggctggtctcaaactcctgacctcaggtgatctgcccacctcggcctcccaaagtgctgggattacaggcgtgagccactgcgcctggcctgacatttattattattaaaagtctattttttgttacatagtcaccttactaaattctcttattacttccaatagttttatagttagttgtctgtacataatcatattagctgcaataaataacttggcttctttctttccagtatatctctttcttttttctgtcttgaccagtacttccagatatatgctaaatagaagtaacgataattaaaaaacttgtctagtttctgactttaattgaattgtttatcacacttcaccatttatcctgacactaggctttggcttaagaatttatatagctacaaaaatatgtatagataggcacggctgtatgtgcttgtattaagggagaattatttaaaaatcaaggaggaaggtttaatttttttttttttttttttagacagagtctcactccatcatccaggctagagtgcagtggcaccgtctaggcttactgcaaactccgccttcccggttcaggcgagtctggtgcctcagcctcctgagtagctggaattacaggtgtgtgccaccatacccagctaatttttgtatttagtagagatggggtttcaccatgttggccaggctggtctcaaactcttgacctcaagtgatctgcctgtcttggcctcccaagtgctgggattacaggcatgagccaccatgcccagctgatgtttaattttatcaaatgattttatagcatctctggatatacaattttatttatgtttttactttgatcaattaataggctaagttagtaaattatgtaaatagattccttaatatttagctgttctttccaggttcaaatctattttgttctggtatattattttttaataagtttctgaattatatttattaatactttttatttattattctgcactcatattcataaattattccataaagtgtgatgttattgtgatatatttattaaatgtggtatcaataaataatgaatctatggaaagaatttggaaactttcttttttaatgttctggaatagtttactgatattggaagtttctgtttttcaaacatttgtagttgtttgcttctagtgcttttcattaatttatttatttgaatttttaaaaattgtaagcttatgaggtgtatatacatatttttttgttttgttttgtttttgagacagagtcttgctctgttgcctaggctagagtgcaatggcatgatctcagctcactgtaacctctgcctcccgggttcaagcaattctcctgcctcagcctcccccagtagctgggactatgggtgtgcaccaccacgcttggctaatttttgtatttttagtagagacagagtttcgccatgttgacaagtctggtcttgaactcctgacctcaggtgatctccccaccttggcctcccaaagtgttgggattacaggcatgagccaccatgcctggcagaggtatatgtatttttgaggtacagggtgatgttatgatttgtaaatacaatgtgggatcattcaatcaagctaacatatccatcacctcaaattcttaccatttttttgtggtgagaatatttgaaatttactctttcggcaattttgaagtgtgcaatacactattattaactgtattcatcatgctatgcaatggatctaaaaaaaaaacccttattcttcctgagattttgtaccctttgaccatcaactccccattcctcacgtaccccagcctctataaccaccattctactctctgcttctttgagtttgattgttttaggttccatatataagtgagaacacgtggtattatttttctgtgcctggctcacttcacatagcataaggtgctctaattctatccatgttgtctcaaataacaggattcccttcttttaaagtccaaatagtattccattgtgtatatgtccacattttctttatccatttatctattgatgggacactaagtttgatcccataacttggctattgggaatagtgctgcaatgaacatgttttgtttttgtttctctttgtgtgtgtgtgtg

SEQ ID NO: 96307 - DNA, 13990 bp, Homo sapiens
agtggtccccagcctttttagcaccaaggaccagtttcgtgaaagacaatttttccatggccaggaggcagaggggatagtttcaggataaaactgttccacctcaaatcatcaggcattaattaaaatctcataagaagcacaccgcctacatccctcacatgcgcagttcaccataggatttgtgctcttatgagaatctaacaccgccgctgatctcacaggaggcggagatcaggcagtaatgctcatttacctgccactcacctcctgctgtgcagcccagttacgaacaggccacagactaataccagtccgtggtccaggggttcgggacccctgtcctgggtgactatttgtttcaatcagtatttcataaaaataaaaatgtaacgtaataaatattagatgcatgcttggcatttgtgtttaataagtgaatgtggtggtttctagaatttaaatatataggcttagagaaagtcaagatagtaggtatatgagttgaatctggaaagaaagactcttcagctgtgtattacctattttttaagctgctgttccaaatttgccaggaaaaatcttcaccttcacactcaagtaattagtaccacatttagcatggagtatactttgtcacaagaatgtgataaaattcttttataagaatttactctgctaaatacatgtgatgaagtaaaaaacatcttaaatcaacaaatatttaataagaatattatgaggaaggcacagtgcccagtataaaatataccataacttaaactataaatttaactttcttaagaacaacgactacttttaaaattttccttccttagcaaatcagtgcaaacaaacaagtaattttacttacaaactgttcatggattccactggaatactgccctttaatgctttctcttcaatttaatcttatttggaggttccatttacacactgaaagagaaaattgaggcaacaattccaattttaaaacatgtgttcctgaactgtctggaccaacatctgagtttgcaccatccctgtgtgctcaggctccaagtctcttgtccttgggggatggacagatacaccttgacttgtgatggggttatgtcacaataaactaatcataaatggaaaatatcttaagtttaaaatgcatttaatacaccgaatctacagaatattgtagcttagcctaaccttctttttttttcttctttttttttttgagacggagtcccgctctttagcccaggctggagtgcagtggcacacaatctcggctcactgcaagctccgcctcccaggttcacgccattctcctgcctcagcctcccgagtagctgggactacaggcgcccgccaccgtgcccggctaattttttgtatttttagtagagacggggtttcaccgtgttagccaagatggtctcgatctcctgaccttgtgatccacccgcctcggcctcccaaagtgctgggattacaggcgtgagccaccgcgcccagccagcctaaccttcttgaaacatgctcagaatacttacattagcctacagatgggcaacatcatctaacaacaaagcctattttataaagtgtggaatatctcatgtaattttttgaatactatactgaaagtaaaaaccaggatgactgtatggatgctccaattacaatttctactgaatgcttttcacttttgcaccatcataaagtcaaaaaagcattaagtggaaccattgttaggttggggaccatttctattcctcagctcatgctgcaataacaaaataccatagactgagtggcttaacgacagacatttatttccacagttatggaggctggaagtcttcatgcaccagcatggttggagctagatccctctttctggcttgcagatgtctgccttctcactgtgtcctcatagtggcagaaagagacacagcaagctctctgatgccacttcttttaagagtattaatcccatggcctcatgacctcatctaaacttaattatgtcccaaagaccccatctccaaatactgtgacattgggggttaaggcttcaaaatacgaattttacagggacgtaattcagtctatagcatggaatatgcaggacctaggcaaaaaagggcctcagggcgatggacctaatctggcaaactggatcaaactcagccctttagtcatcctccagctttcctggtggcttcttccagatgccccaggctgtggggagaagagtaaatgggattgctgctgaaagctcatttctcaggttctctaaatatgggttcaatgtgcaaccctcaaagggaattttctacccaaaactgtagctttgcagctaaacaattatgttcttgaaatgatgtctaggggactgagttttcttaaataacacctctaaggagaaaccaaatgcctagctagcaagatgactttcttgcctaattttactttttaaaatatttttacttttcttgaaatagaaataaatagggtgaagttttataagccagggaaaagattcacctaccaattcttgaactaaatatcactgagctgaaaagagaagtagatgatgagtgtgtatatgacaatcactttcatgagaattcaattctagaaagacactaaatttcattcattgtttgtctaaagagaaagtgcaagcatagaaattaatgggcaagacggccaaaaagtaactgttctagtgctttattctggataaacgcagtgtaattttgattcttgtgaatttcaataaaacatgatttaataccacagcaagggtgccattaaaatgtgggtattaactttccaataatttctagaaattgaaatggaatctatttggcaataacatgacattttgacaccaatgaaaatattttatgtagttatgtaagcgataaaaataaatgctataaaaatgtatccagaaggacttataactaggaaaaacaatcataattaacaagattttgtgaagtgtgcagcagccaaagacaactttagaccagctgaaggtgatgaggtcatttctggtcctaagttcatagagtctgaccacctgtagagattttttttaaagcacttaaaagaattaattttccaaatatggagaagctgagagagtctccctcttttacgtgactttctattgtgccaatgtaatggaatcaaatacacacttcagctttttaagcagctgttcctatggtgcaggagtaaatgtgtaaactctaccagtaccagctggaaaaaaagaacatgaatctattatttccgaatgtattatgaagcctagattttgtttccaggatagaatgtgtccaaagcaaccaaattaagaggagggttgtgaaattattcagtggataaggaaccatgttgacatttcaactggctgatacaaacaaagctatatgggcaggtaaccatgcctcttgttgcatgaactgtgcagagtccaccacaatattcaagagattctttttactatttttaactgagatcattacagcacaagactcttaaccacagtaacgccaaaagaataagaagcaattttatcaagtatatgtctttttcaactagaacattactgatctctaatttcataatgtctactgaggatttctaagtcaaataataataactatgatgatagtaataacaatagaagatatttcactaaaacatgcatatcttttgactctacttttaaatataatcttaataaaattatatttctaagtattaccaaataaggacaaaagaagttttagtgtatcatagtgtttttcaaaataaaatttatctttcagagaagttttaggttcacagcaaaattgagtacaaagtagagggtgttcccatctatactctgcaccccctgacacacacacatagcctccccgactatcagcctcacacaagagagtggtacatttgttacaatcaacaaacctacatttatacacatttatgaccccaaatccatagcttacattagagttcattcttgatgttgtatattctatggctttggacaaatgtataatgacatgtatccacaattatagtatcataaacaatagtttcactgttctaaaaaatcctctgtgttccatctacttatctctcactcctccttaacccctggcaagtactgttctttttactacctctatagttctgtgttttgcagaatgtcatatagttagaatcatacagtatatagccttttaagattggcttctttcacttagcaatatgcatttaagttttccccatgtcttttcatggcttgatagttcatttcattttagttttgaataatattctgttttctggatgtaccacagtttatttacccattcacctagagaaagacatcttgattgcttctaaattttggcaattatgaacaaagctgttataaatatcagtgtgcaggtttttgtgtagacacaggttttcaactcatttgagtaaataccaaagagcactattgttggagtgtatggtaaaagtatgtttagttttgtaagaaattgcccagctgtcttccaaagtagctgtaccattttgcattcccaccagcaatgaatgaaagttcctattgttgcacattctcttcagcatttgttgtcagtgttttagattttggccattataataagtgtgtaacagtatctcattgtggctttaatttgcaatttcctaatgccatatcattttcaggatccttacacatgcatatttgccgtccacatgtcttctttggtgaggtgtctgtccgggtcttttctttttggtgaggtgtctgtccaggttgttccttttcttattcttgagttctaatactctgcatattttggatagctgtcctttatcagatatgtcttttgcaaatattttctcctactctgtatcatagtgttttaagtgttggtcaaccttgaggctttatagcaacaaaaaacaatttgaacaaattatatggttctaaagctttagaaccattcttgaagatgcatttaaaatgatctattggctgggtgcaatggctcacatctgtaatgctagtacctttggaggccaagacgggagaactgcttgagcccaggagtttgaaatcagcctgggcaacatagagagactccatctctacaaaaaaattaaaaattaaccaggtgcagtggcatgtgcggtaatcccagctacttgagaagctgagatgggaggattgcttgagcccaggaggtcaaggctggagcgagccatgatggcaccactgcactccagcctaggtgacagaatgagaccctgtctcaaaagaaaaaataaaaataatgaaaaaaattatctatcttagattattatttcactaactactgtgaaagttgtcagaatcaaaatggagtcactaatgttaaaacacacacacacacacacacacacacacacacacacacacaaacctgacataccaaaaccagacaaggacacaataaaaaaagaaaactacaagccaatatccttgatgaacatagatgcaaaaatcctcaatgcaatattagcaaactgagtgcaacaacacattaaaaaggtcattcaccatgatcaagtgggattcatcccagggatacaaggatggttcagcatgcacaaatcaataacaagtgtgatacatcatgtcaacagaaccaagaacaaaagccatgtaatcatttcaatagatgctgaaaaagcattcaataaaattcagtgttcctttatgataaaaatgttgaacatgttgtgggtaaaaaaatacacgcaaactgggtatatatgacaaatccacagctaacatcatactcaacgaggaaaagctgaaagcctttcctttaagaattagaacaagccccctcactcatcaccgacagcctgcggtcagcgtgcgcaagccctgccactgccccgcagaaatgattcaattacccacagtcttaagtcagatgacaccagtgtcgagggtcctggctcctcatctcactcgggtttatgccaaagatgtacaatttttggttcagatgcctgagtcttaatgcttcaaggtgtagaccttttactcactgctgtagccattacaatggggccaaagggaaaaacagtgattactgagcagaactggggaagtcccaaagtaacaaaagatggtgtgactgttgcaaggtccattgacttaaaggataaatataaraatattgcggctaaacttgttcaagatgttgccaataacacaaatgaagaggctggggatggcactaccactgctactgttgccaaggaagtcttcaagaagtttagcaaaggtgctaatccagtggaaatcaagagaagtgtgatgttagctgttgatgctgtaattgctgaacttaaaaagcagtctaaacctgtgaccacccctgaagaaattgctcaggttgctacaattyctgcaaatggagacaaagaaattggcaacctaatttccgatgcaatgaaaaaggtcagaagaaagggtttcaccacagtaaagatggaaaaacgctaccgatgaattagaaattattgaaggcatgaggccaggtgtggtggctcacgcctataatcccagcactttgggaggcggaggtgggcggatcacgaggtcaggagattgagaccatcctggctaacacggtgaaaccccgtctctactaaaaatacaaaaaattagccgggtgtggtggcakgcacctgtagtcccagctactcaggaggctgaggcaggagaattgcttgaacccasgaggyggaggttgcagtgagccgagattgtgccactgcactccagcctgggtgacagagtgagactccatctaaaaaaaaagaaaaaaaaaaaagaaattattgaaggcatgaaagtttgaggatatatttctccatactttattaatacatcaaaaggtcggaaatgtgaattccaagaaaatttctagtgtccagtccattgtacctgatcttgaaattgccaatgctcaccgtaagcttttggtcataattgctgaaaatgttgatggagaaactctaagtacactcattttgaataggcgaaaacttggtcttcaggttgtagcagtcaaagctccagggtttggtgacaatagaaagaaccacyttaaaggtatgacaattgctactggtggtgcagtgtttggagaagaggagttgacctcaaatcttgaagatgttcagcctcatgacttaggagaagttggagaggtcactgtgatcaaagatgatgctatgctcttaaaaggaaaaggtgacaaggctcaaatttaaaaacgtattcaagaaatcattgagcagttggatgtcacaactagtgaatatgaaaaggaaaaactgaatgaacagctggcaaaactttcagatggagtagctgtgctgaaggttagtgggacaagtcacgttgaagtgaatgaaaagaaaaacagagttacagatgcccttaatgctacaagagctgctgttgaagaaggcattgttctgggagggggttgtaccctacttcgatgaattggtgccttggactcattgactccagctaatgaagatcaaaaaattggtacagaaactattaagaaaacactcaaaattcctgcaatgactattgctaaaaatgcgggtgttgaaggatctttgatagtccagaaaattatgcagttcctgagaagctggttgtgatgccacggtcagattttgtgaatatggtggaaaaaaggaattattgacaaaacaaaggttgtgagaagtgctttactggatgctgctggggtggcctgttaactacagcagaagttgtagtcaaagaaattcctaaaaaaagagaaggaccctgtattgggtgcaatgggtggaacgggaggtgttatgggaaatggcaagttctaatgattagaatagcgttttactttaattaatgaactgtggcaggaagcccaaggcagtattcctcaccaataacttcagagaagtcagctggagaaaacgactgaagaaaaggctagcagatgtttaggaaatcactataacaatcagttactggtttcaagtgacaaaatatataatgttttactgctgtcactgtccatgcctacagataatttattttgtatttttggataaaaagacatttgtatattcctaatactgggtgcgagagcacctatggttccagttccagctactcaggaggctgagggaggaggatcgcttgaacccaggagatcaagtacaactctttctatatatatatatatttcatatttttacataataaaattctatatggcagttaagaggagtaacctaaccatatatcaaaacataaatctcatataatgttgactgaaaaagaaatttgaaaaatatgtccaacctagtaccagttatgtaaattttaaaatacaccgtatgttgcttataaagatatgaatgtttataaacgtataaatgcaagatccatgtttttacatggattagatggacatacactaaatccataagagccttggagagaatgttacacaattaaactgaaggcaaatagagaaagaacatccatcttatttgtaatattttagttcttgtatttaaaaaatattttaaggaaacatgagaaaatactgtcatttctgggtttaaaacttggggttttgaaatttgtaacccagccgggtgtgttaaaggctcacacctgtaatctcagcactttgagagcccaaggcgggtggatcacctgaagtcagcagtttgagaccagcctggccaacatggggaaaatccgtctctactaaaaatacaaaaattaggcagccgtggctgcaggcgcctgtaatcccagctactccggaggctgaggcaggagaaccgcttgaacctgggaggcagaggttgcagtgagcctagctcgcgccactgcactccagcctgggggatacagcgagactctgtctccaaaaaaaaaaaaaatacataagtagaaataaaataaaataaaatttgtacctcaaatacttttctgtatttttatttctcaaatttaaaaaacgagctgtaaaaatgtttcattgcgaaacaaatttcagaaattgactcaaaaagaatgcaaatacttgaatagtctaataacttacagatgttccaaaacatcaaagatccattcactcaaaaaggcaccaagcccagccagttttaaggctttctacctaatgttccagaaacagtgtcctaactcacataacgagggtagcgtaatcttggtaaaaaaaaaacggagccagattattagcctccccaattcagcagtgtattaaaccgcatcatcttgcttaaggtttataaaaagagtgcattcatgattcatcaggaaggcaatttataaagtacagtaaaaaaacgaggaaagtcttcatctttatagcgtaaagcttaaagttcagctgacaaaaaaacagtaaaatttattatgtattttttcaaatccttgcaaactaggaataaaacagaatttccaaatatcattagaatgaagaaagaacattcaccttagtcaaaaacaactcagaatgcccactatcaggttctagttcacagaataaaatttaaatgttccaaagaagaaagcaaatgtcaatagtcacggattatacaactgtctacttagcaatttcaaggagagccactgacaaatttagaattaagacccaacaacaacacactggtcgcccgggacgccagccccactcctaggcctgcgcatgagggcgagggcatgcgcatgcgcatgcgcacgccctgcgcacgcgcatggaacgcagcgaaggactatggcaggggagaacttcgctacgccgttccacgggcacgtgggccgcggcgccttcagcgacgtgtacgagcccgcggaggacacgtttctgcttttggacgcgctcgaggcagcggctgccgaactggcagggtgcgaggaggggaggggctctgacgggaaagggttgcggctttctgaagaagtgcggtggaggagggccggaacggtgactatcaccgccctgagccggagcaggcggggtccatttgcagatgattgacagccaggacgccgtaattgagaattttcctgtagctacaagtaatgagtgtgccggggacgcatctcctttgccagggggctgctctgtctcatgagctccctgactgcttaccatgcaaaggcgtatcttttcctgtcgcctgttaatctgaagaacacatgtccctgagagaagcgatagtataacacgtttggaaacaaaatattccggaaacattgcttattaatatttttaaagtattacatattaaaattgcatggtattatttgatttactcagcacatagaaagcacccttaacaaacatgaaagaaagttgtgttactggagtggggaaatatttttaaacccactgaatagcatactctagcaccagccagtcctcacatgtggctacagagcgcttgaaatgtggctagtgctattgaggaactgaatttttcatttaattgttaccaaaaaaaagttacatgcagctagcagacaatagtctaccctagcactttatttaaatggatttattgaagtgatcgccatcaattttaaattaatagcagaaggaatgaatactgacattgtgatttttaaatgtaaggaatttgggttgttagatttgtttgaagataagatgaactgggttttctcaggatggaacaaacagctttcaggtttcaaagatctatattgtatttatttatccctcttaaacttggtcatatttctccagtataaaatgtcccagctcttattaaactagtctttcattgtagatgatggaacttttggatctactggaatatacagtggaacagtactgttttataacttgtcttttcttctcaagatagcccagaaagatttacaagcacaaattgcactgcaaagtatgctgtaaaaggagctgattttgttataaagtcttgggttatttctagtttggaattctaattatttatgagaccatgatagttattttcaaagagaagccacctggtgagattctcagaccttactaccacctaataaagacttgtcagatgtgtagactggttccaaaagtttaaaacctctggagcttgtcactgggtagttgttttgggagttcagtgctaaaaattcccctaaatgccatcaagctgatctttttaatggggatgatttatgcttttgatgcatgtataacattatagagggctggcactgtggttcgtgcctatagtcctaactacttgggaggctgaggtgggaggatcacttgagcaagcccaggagttaaaggctgcagtgagctgtgatggcaccactgcactctagcctaggtgacagagcaagagcctgtctctaaaaaagaagcaacttccaagattataggcaagaaaataaatttaatggaaagataaagtacagtagaatgaagattttatagttaacagcattctaagatggttaacattcaaagatcagatactattttcccaattagcatatagctgtccagaaaaagaatttttgtcctgctctattattggggcaggacaaagaattattattttaattctctaggatatactgatggctctatgaatgttaggtattaaaaatgatagaggaacttttttcaaaaataaattttgtaataatacaaactttattttaggaaatactaagctaggagctccttgtgcgaaggaatgatgtctttcacattaatatttccaaccctagattaacatttttccatactttttaatgtaatggtttgttgaaattaactgaaagccatgtttggtaatagataacttttatggacttatattacgtacccaaaatattagtaattttgagttatgcaatattaagtacaaagtagttgtcagaaattataaatttctattttcatatatttgcaggtgagtgatgatgctagagaaatatatatgctagaaataacactagcatgagagttttctgtgaagagtattttgattctactatactaatatttatttatttttttttcagagtggaaatatgcctggaagtagggtcagggtctggtgtagtatctgcattcctagcctctatgataggccctcaggctttgtacatgtaagtatatcatattcatctagatcttccactgacaggttaactatgataactctaatgaaataatttttaaagagacagtatgtatcttatagtatttaagcatagcaaaaactcagattacaaactatgcttccctaaaaattattcatgttcaaactgctccatcatactacgtaattgtagaagcagcataattttagatcatctctaaatttgatttcttagctaaataatttgatatcataagacatttaaagttgcttaaatttatagaagattgggaatgtagaaaagtataaagaagaaaattaaaatcacctataaattttaccatacatggtccaactgtgtttccttctgtttttttttcatttcctgtgtttttaatttaatttcgtctcataaacattttcctatcaaaaattccttttaaatttcatttttggtggctgcatagtactccttcattggatgtataattcataaattccttcagatgtctgtgcatgtatgtgtattcttctactcttggacattgtatcaatataacagtctttttcatcaatagaacaaatccttgttctctttttctttgccattattgaatacgttctaatttttttttttctaaatctgttctgtgtagaattaatggaacataccttgatattactcagtaacagatttgccttatggacataggatatagtttccttccatttctgtttataggtgcactgatatcaaccctgaggcagcagcttgtaccctagagacagcacgctgtaacaaagttcacattcaaccagttattacagatttggtaagataatctttgtccagtaataattttcttttcaaataaagttaagatgctttaggtcaaagaaactttggtaagtaattaacttttgacccactaagcagtataccatgtacaaagtaaattctttgttgatgtaatccaccttttccacaattcaggcctctttcagtcagaagtgatagtgaacccagttcaaactggcttaaatttaaaaaattagtccgggtgcaaaggctcacgcctttaatcccagtactctgggatgctgaggtgggatgattgcttgagcccaggagttcaagaccagcttgtacaatatagtgagaactcgtctctacaaaaaataaaaattaaaaaaatagctggacatggttgtgcgcacctgtcgtgccagctacttgggaggctgagatgcgaggatcacttgaccctgggaggttgaggctgccttgagccatgatcgtgccactgcactccagcctgtggaacagaacaaagccctgtctcaaaaaaaaaaaaaaaaaaaaaattgatggcttcagcacagctacttccaggaactctaagaatgctatagacatctttttcttatctctgaacttctctctggtggctctattcctaggcagtcttcccttcatggtaacaagatgtttgcatatctgtatcttatttctgaacaccttcccaaggaaagaggccctttctattcagttactctagaagaggccccagaatgagtgttatctggatcaacttgggttatgtgcctatctctcaaccttttgctgtggccaaaggagatttgaatgtggagatgattggcttcaaactgcctcatagttccatcccaggag

SEQ ID NO: 96308 - DNA, 29340 bp, Homo sapiens
gcgcggccaccctccccaaggggcgggctcgcgggggggtgtcgtgggcgccccggacttggagagggtgcggccctggggaccccccctccccgagtgtgcccaggaactcagagagggcgcggcccccggggattcccccccgagggtgcccaggactcggaaggggcgccccggactcgacaagctggaccccctgctcccgggggggcgagcgcatgacccccccgccctcgcgctgcctctttcccccgcgcggccgccccgtgttgcacaaacccgcgcgtctcggctgcccctttgtacaccgcgccgcggaagggggctccgagggggcgcagcctcaaaccctgcctttcctttacttttacttttttttttttttctttggaagagagaagaacagagtgttcgattctgccctatttatgtttctactcgggaacaaacgttggttgtgtgtgtgtgtgttttcttgtgttggttttttaaagaaatgggaagaagaaaaaaaaattctccgcccctttcctcgatctcgctccccccttcggttctttcgaccggtcccccctcccttttttgttctgttttgttttgttttgctacgagtccacattcctgtttgtaatccttggttcgcccggttttctgttttcagtaaagtctcgttacgccagctcggctctccgcctccttcttcccccgccggggcctggcgggctgggcggggcctggttcgcttcccccctacacccccgcctttctctcctccctctgtccctagctcctccccttgttggagggagcagagagcgggtgtctgagagcggcccgcacatctggcgcgcagcgagcgccccctagacgcgccttggcgcggggccggctgatgtccaggttggggaggggtcttggggtctttgatctgcgtttggaactagctaatgcccccttgccttttgggaaggagagatttcgaggtggaaagggcacagccccagcccaaagcaggaaggaagagacagaaacttagtaaactttttaaccttttggtccttggtttgcctgtccgtataaaatggggagaacagtcgaaaaacttgccccataaagttgtgacgattaagagagtttatgtttacagagcagtgcttggcttacagtgtaagcttttctcttttggtggatcgggggatgctgaggcccaggacaagctgatggacccagtaccaggaggaagttggcacaggtgggatctaacccaagaggtctgcctccaggactgggattttccaagtatctccctgaagttcgcttctcctcctcctcccaacatcctactccctactttgaggaaatctaaggttcagagaggttgagcaactggcttgacatcacacagccttttaaggagactgtgcagagatagtctgaccttggactccctcactttcagagctttgacccgaggcttcctgcttctcctgcctgctctgccctttgctgttaagaccctgcgctttgggcttccaactcattggggaccctgagggatgtgaacattagtggccgaggtcacacagcaagtagggctggtggccatgtgtacctagccagccctgttagggagggccactgaattgtacccattttacagatgaagaaacttggagagaatggccaccgtcccttggtcatggagaaaggccttgccaccaacagctatgttggggttcatttgtttgagacagagtctcgctctgtcacccagactggagtgcagtggcgccatctaggctcactgcaacctctgcctccccgggctcaagtgattctcctgcctcagcctccaagtagctcagattacaggtgcccaccatgctcggctacttttttgtatttgtagtagagacagggtttcaccatgttggtcaagctggtctggaactcctgacctcaagtggtccacccgcctcggcctcccaaagtgctgggattacaggcgtgagcccccacgtccggccagggtttggtttttagctgtcacgttgccttgtgggaggtcatgcagacgtttcagcagggcctgaaggaacctgctgaagggaactgaggctgaggtgggagagcaggggtgtcttgacacacaagagaccaagaaccacatctcgggcagagtgtcactggttgggagaccgggacccagcttaggttccagttggcatttgtgagatctcaggcgagtcctcctcccccgatggcctctacatcctgtgctgtgagatgcgggtgtttgcatccagcataacatctctcaggtcagaagtcagaactgggaggtgctcaggggacggacaacagtgaccgcactcaatgatggtacctactgtggcccccaattagtagagaaggggaagggaggttttgagacttgcccaacacccctgttttttttttttttttttttgagacagagtctcgctctgtctcccaggctggagtgcagtggcgcagtctcggctcactgcaagcttcgcctcctgggttcatgccattctcctgcctcagcctcctgagtagctgggaatacaggcgcccgccaccacgcctggctaattttttgtacttttagtagagatggggtttcaccgtgttagccaggatggtcttgatcccctgacctcatgatccgcccgcctcggcctcccgaagtgctgggattacaggcgtgagccaccgtgcccggccaacacccctgttaaatggcagagcagcgattcaaacccaggtctcttgcttgcctgcccccaagtggtctaaggcgaaaggactctgaggagccctgcagagaggtggaggacatactttgtttttcttttttttttttgagactgagtcttcctctgtcgcccaggctggagtgcaatggcctgatcttggcttaccgcaacctccacctcccagtttcaatcgattctcttgcctcagcctctcgattagctgggattacaggtgtctgccaccatgcccagctaaatttttttttttgagacggagtctcgttctgtctcccaggctggagtgcagtggcgcgatctcagctcactgcaagctctgcctccctggttcatgccattctcctgcctcagcctcctgagtagctgggactgcaggcgcccgccactatgcccggctaatttttttgtgtttttagtagagacggggtttcaccgtgttagccaggatggtctcgatctcctgacctcgtgatctgcccgcctcagcttcccaaagtttctgggattacaggcgtgagccaccctgcctggctaaatttttttttgtatttttagtagagacagggtttcaccatgttgcccaggctggtctcgaactcctgacctcaggtgatccacccaccttggcttcccaaagtgctgggattacaggcgtgagccactgggccccacaagtttgtttttttttttctttacaagatgaggtctcgctcttgccttggccagagtgcagtggcaagaccacagctcactgcagccttgacctcctaggctcaactgattgtcctgcctcacctcagcctcccaagtagctgggaccacaggtgcacgccaccatgccctactaatttttatttttattttttctttgagacggagtcttgctctgccgcccaggctggagtgcagtggcgccatctcggctcattgcaagctccgcctcccaggttcacgccattctcctgcctcagcctcctgagtagctgggactacaggcgcctgccaccatgcctggctaatttttttgtgtttttaatagagatgggctttcaccgtgttagccaggttgatctcgatcacctgacctcatgatccgccagccttggcctcccaaagtgctgggattacaggcgtgagccaccacgcccagccgccctactaatttttaaataatttttttgtagagatgggatctatgttgcccaggctggttttgaactcctgttttcaagtgatcctccaacctcggtctcccaaaatgctgggactacaggtattgagccactgtactcggcctctttttttttttttttgagtcagggtctctcattcaggctggagtgcagtggtgcaatcttggctcactgtagcctccacctcctgggttcaagtgactctcctgcctcagccaccaaagtagctgggtttacaggcatttgccatcatgcctgactaatttttgtattattagtagagacgaggttttgccatattggtcaggctggtctcaaactcctgggctcaatcgatctgcccgccttggcctcccaaagtgctgggattataggcatgaaccatcgcgcccagcgtccccagcatttattgacacctagttgatgcatactccctggaggccagccctccagtatgatgggggagtcaagcaggcatgagctgtgatgtgaagggctttttctaaatcacagatctgactccttacttgaaacctttttggaaaaagtcctgactgcaccagtccctgggctggccagtgtctcctttcaggagcctctccacccaaattcccaatatcctgccttcctggcctcagggtctttgcacggctgcagctgtagttctgtgccagctactcttcccccagtcatgcagctgagcgccacctcccagcctcagctgcacagtcctcggaagcctgtccctagtaaccctcaggctaggccagcaccttactgggctcctacggtctccaattgccctgagaactcccagtttgtgtttagctcgttgacagcacagaagggacctgttctgatgaaacatccaaaggatgagctgggtgcagtggctcatgcctgtaatcccagcactttgggaggccgcagcaggcggatcacttgtggtcaggagtttgagaccagcctggccaacatggtgaaatcctatctctactaaaactacataaatcagctgggcgtcatagcatgcacctgtagtcccagctactcaggaggctgaggcacgagaatcgcttgaacccggggaggtggaggttgcagtgagctgagatcgtagcactgcactccagcctgggcaacagagcgagactcaatctcaaaaaacagacaaaggatataaaccccatccaactgccatctgccatgtccctgattttgtccaaagtcacacccacagtatagggaaggttttggagggggtgatcgctgcagagggaggtcaggcacccctgctggttcttgtcccggcaacccccagcggctccccaaggaagccaggcagaggcttctgggccaggctggctttggctggagccagctgcactgagtccaaggtgcgtgtcagccttggcccagccagcggtgactcatgctgggccccagcccagccccaggaggtgatccaggacagcagcctgacttccccttatagcgctgcggctcagggtcagtacccacttttgccgggcccagtggggatcccaagagatcaagtccggccccaccccaaggagcccgcagtctcagagccacacccaagacatcagtgagaaccctgactggcccgttgcaccccctttttggtcccttcccatctagccattttacagcctcaaattctttgagttgtttgtatccccagacatggggcaaattccagcatatagtaggtgctcagaaaatgcccgtgggatgaaagactgaaactgcctctaggtacatggagggggagatttggggttccctctgtgctgagaaccctttgtactcaggatgagccggtgtaggtagcaaccaccatgacctttggccctgccctgcatcctgttccccaacctctggctgtgccttctagaatccccaccccctaagagctgccagggattggccagaacttggctttgagtcacaaagctgctgcggcaccagggctccaagactggccgttcagactgctaggtttagcttcaggggcrggtgagtggggctggtggctttgggggcgggtgagtggggctggtggcttcaggggcgggtgagtggggctggtggaggacttgtttgcgagggttcgtgggggaccctgtcgttctcctctggcccccagtgcctttagagcccttctgggccttctgggtgactgcaaatgatgggtcagctccttggcccctcacagcaggggctctagggacctctaaagccttgatggtggatttgttcacctgtgatgggggacatcmtggagagcctgttatgtctctttattattatttttttaaataaatagagacatgttgcccaggctgttttcaaactcttgggctgcagygatcctcccaccttggtcccccaaagtgcttggattacgggcaggagccactgcgcccagctgagcctgttgtgtctctttggcaacctgaggatggtgatcttatgtcttgtgacagatagggaaattgaggctcagaggggtttactcaaaattaccgagccagtcgcttggcttctgtgtccagggggcccctgttccttcttctcatcccccacaatcccgtttctcaccccttctggttgagttcctctaaagagctgcaccgtttggttgatgaaacctcagcccctggaatgggcccattcagctcccaragctgctgtctcccgggttcaagtgattttcctgcctcaggagttcgagaccagcctgacccatatggtcaaaccccatctctactaaaaattcaaaaattaggccgggcaaggtggctcacgcctgtaacgccagcactttgggaagccaaggcgggcagatcacctgtgatcaggagttcaagaccagcctgaccaacatggagaaaccccrtttccactaaaaatacgaaattaggtgtggtggcgcatgcctgtaatcctagctatttgggaggctgaggcaggagaatcrcttgaacctggaggcagaggttgcagtgagccaagatggcgccattgcactccagcctgggcaacaaaagtgaaattccgtctcaaagagaataataataataattaggccgggcatggtgrctcayrcctgtaatcccagcactttgggaggccgaggcgggcggatcacttgaggtcaggggttcgagaccagtctggccaacatggygaaaccccaactctactaaaaatacaaaagttagccaagtgtggtggcaagtgcctgtaatcccagctactcgggaggctgagacaggagaatcactttgaacctgggaggcggaggttgcagtgagccaagatcgtgccactgcacttcagcctgggcaacagagcaagattccgtccatctcaaaaaaataaaaataataaatatatgtgtgtcaattatccatgcattgcctcttgtctccraatggaccctttcaatatgtgataaacaaaggaatttctttcgttatgtcttgtttaaagtgagcacaatgctcggccaggcgcggtggctcacgcctgtaatcccagcactttgggaggccgaggtgggcgaatcacgaggtcaggagatggagaccatcctggctagcatagtgaaaccccgtctctactaaaaatacaaaatattaactgggcgtggtggcaggcgcctgtagtcccagctactcaggaggctgaggcaggagaatggcgtgaacccgggaggcrgagcttgcagtgagccgagatggtgccagtgcactccagcctgggagacagaacgagactccgtctcaaaaaaaaaaaaaaagtgagcacaatgctaagatttctcaatagagggcgctggtgaggcattagggatagaggtgtgaagacaccaggtgaagcctgcccgagccctggatccagaacgtggtcctgtgactttgcagtcttgacctggtgaaaacctttctgcagccctctcaacacacacaaaaaacagagcccctaaggccgggcgcggtggctcatgcctgtaatcccagcactttgggaggccaaggtgggtggatcacctgtggtcaggaatttgagaccagcctgaccaatatgatgaaaccccatctgtactaaaaatacaaaaatttgctaggcgtggtggcaggtgcctgtaatcccagctgctcaggaggctgaggtaggagaatcgctggaaaccgagaggtagaggttgcagtgaaaggagatcgcgccactgcactccagcctgggcgacaagaacaaaactcaaaagagagagaraaaaaaaaaaaggccaggcgcggtggctcacgcctgtaatcccagcactttgggaggccgaggcaggcgaatcacctgagatcaggagtttgagaccagcctggccaacatggtgaaaccccgtccctccaaaaacaaaacaaaacaaaacaaacaaaattagctgggtgtggtgggattcatgcctgtaatcccagctactcgggaggctgaggcaggagaatcgcttgaacccaggaggcggaggttgcagtgagccaagatgctgagtgccgctgcactccagcctgggggacagagtgagactctgtctcaaaaatcataaataaataaatgataataaaygaacagagcccccacggtggcccatacacattgaaggcctcctgccccagcaacacttaggtttccagtgcacatccagagcaccaactgttgataacctgttcccacatctgcaccctggagggtgggccttttgcttgttttgcaactccagaccagctctggcttggccgatccagcaattatctccgttaacttgttaggcgggaccatactttctccaaggaagtctgaatgctctccaaatttgccccttttttggggatactccctcagccctaaagtaccacatagagtttccttttatcttttttttttttttttgaactgagtttcgctcagtcacccaggctggtgtgcaatggtatgatctcagctcactgcaacctttgcctactgggttcaagagattctcccgcctcagcctcctaagtagctgggattacaggcacctgccatcatacctggctaatttttgtatttttagtagagacagagtttcaccatgttggccaggctggtcttgaactcctgacctcacgtgagccacccacctcggcctcccaaagcactgggattacaggcgtgagccactgcgcctggttttttttttttttttttgagacagagtctcactctgtcgcccaggctggagtgcagttgcgtgatctcggctcactgcaatctccatctctcgggttcaagtgattctcctgcttcagcctctgaagtagctgggattacaggtgcatgccactgtgcctggctaagttttgtatttttagtagagacggggtttcaccatgttggccaggctgttctcgaactcctgaccttgtgatccacctgccttggcctcccgaagtgctgggatgacaggtgtgagccaccatgcctggcctcccaggttaccttttatcttatacttactctttaatcacaatctttttttttttttttttgagacagggtctcagccaggcaccgtggcttacacttgtcatcccagctacttgggagactgaggcacaagaatcacttgaacctgggaagcagaggttgcagtgagccgagattgtgacgctgcactccagcctgggcaaaagggtgggactctgttttaaaaacaaaaaagagatagggtctcattctgtcgctcaggctcgagtgcagtggtgccatcgtagcttactgcagtctcaacctcctggcctcaaatgatcctcctgtctcagcctcccgagtagctgggactacaggtgcatgtcaccatgactggctaatttttatgtttttagtagagacgggttttaccatgttgcccaggctggtctggaactcctggcctcaagtgacccacccaccttggccttccaaattgctggggttacagacgtgagccactgtgcccggcctattttttttttttttttgagacagttttgctcttgttgccccagatggagtacaatggcacgatctcagctcactgaaatctctgcctcccaggttcaagatattctcctgcctcagcctcctgagtagctggaattacaggcgtcaaccactatgcctggctaatttcttgtatttttagtagagacggggttttaccatgttggccaggctggtctcgaactcctgacctcaggtgatccaccctcctcggcctcccagagtgctggaattacaggcgtgagccacgcctggccaatttttttttttttttttttttttttttaagagacagttcttgcttagtttcccaggctggtctcaaacttctgtcctcaagtgatcctcccatcttggcctcccaaagtgctgggattgcaggcaagaaccactgtgctcagcctggacgccatttctgatgcctggatatcatgcccttgtatgattaatttaagcctgtctccattgataattttggtttcttccagtttttcctctgctaaacaatacagtgttaaacatccttgaacatacttctgtattcatttgtagcagaacctctaccaatcactgttttggttatttccagttgttttgtttgatttstagctacaaaataacactggaataaatttcctcatctttgcacatttttttttttttttagaatttagcttttttagaatttagaaattttagaatttagcatttttgcttttaacatttctttttgtgttggtcttgagccagcccagggcagtgttgctgcatattgcatggatgaaaggctgaaggctgcctcctcttgcaggctggcttctgagattgcaccttcttctcctgctactcctccaaatctatgacccttcaaggtaagaagatggtctatgggcaaggggtctggctagtccaacctgaagagaggggcttctgccaaacaagtgtgctgtgctccaggctatgcatcagggtggcttgacagtgtcccagctctctctgcatcctagttacttctgaaagccacagtcaccactttttcttccttctttccatccttccatatgccatttacctayccatcccctaatccacccacccacccatccacccatcagtctacctcctgttgggttatctcttcaccagtctttccagctctctttaatttccctccctcccttgcttccttccttctttccttttatttgacacggagtttcacttctgttgcccaggctggagtgtgatggcgtgatcttggctcactgcaacctcctcctcccgggttcaagcaatgctcctgcctcagcctcccgactagctgggactacaggctcatgccaccatacctggctcttttttttttttttttttttgagacagagtcttgctctgtcacccaggctggagtgaggtggcgcgatctcggcttactgcaacctctgcctaccgggttcaaacaattctcctgcctcagcctcctgagtagctgggattacaggcacgagccaccatgccgagctaatttttgtattttcagtagagatggggtttcaccacgttagccaggctggtctcaaactcctgaccttgtgatccgctcacctcggcctcccaaagtgctgggattacaggcatgagccactgtgcctggcctacttttctgtatttttagtagagacgggtttcaccatgttggcccggctggcctcgaactcctgaccccaagcaatctgcccaccttggcctcccaaagtgctggaatgacagacatgagccaccgtgccgggccaatttgcctttaacactttattcatcagctttatttacctattcatccaaaccttcatctgtctttccaacccatctaccattcactcatcgactgattcatccattcagtatctagtcctgtatctatctgtccatccaacttccaatccactcaccatttatcagtcaagatgccccccccacccaatacctacccattcacagcttggaaccaagctctatgactgagatggggacacagaaatgactctgtcttctaggattcacaatcaatggggagaggcaaataatctcccccaccacacttctctctctctctttttcaaacacacacacacacacacacacacacacacacacacacacacagaggcaaacaggaaatttccaaaacattgtgatcagtgctaaacccagggtacatccaagataaagtttgaaaagcaggccgggcgcggtggctcacacctgtaatcccagcactttgggaggctgagkcaggtggatcacccgaggtcgggagttcgagaccagyctggccaacatggtgaaaccccgtctytactaaaaatacagaaaagtagccagccaggcatggtggcgtgcacctgtaatcccagctactcgggaggctgaggcaggagaatcgcttgaacccaggaggcggaggttktggtgagccaagatcacagcattgcactccagcctgggcaacaagagcraaactctgtctcaaaaaaaaaaaaaaaaagaaaagaaaaaagaaaagcaggtaagtggtcgggcattcaggtgtcatacactgtgtgccaagatgaagtggccgtagggtgatgagaggtggatataaggatggcaaagaccacttgggagagggagggatggaaaaagggaggcggaagatcgcaacgtgccaggaacaagatctgggcctggggggccagtgtccaccccagccaggagacctcttgtttgcaggacctgctacaccctgaccaccccctgcygcccccacaggcagagctgacctgtccggtaatcaaggcaatgcagccggccgcctagctacagttcacgagccagttgtcacccagtgggcggtgcatcctccagcccccgctcaccccagtctccyggacaaaatggagaaagygcctccacagccccagcacgagggcctcaagtccaaggagcatcttccgcaacagcctgccgaaggcaagacggcgtcccgccgcgtcccacgcctccgggctgtggtcgagagccaggccttcaagaacatcctggtagacgagatggacatgatgcacgcccgtgcagccacgctcatccaagccaactggaggggctattggctccggcagaagctsatttcccagatgatggcggccaaggccatccaggaggcctggcggcgcttcaacaagagacacatccttcactccagcaagtcgttggtaaagaaaacgagggcggaggagggggacataccttatcacgccccacagcaggtgcgcttccagcatccggaagagaaccgccttctgtccccgcccatcatggtgaacaaggagacccagttcccttccygtgacaatctggtcctctgcagaccccagtcgtcccccctcctgcagcccccagcagctcagggtaccccagagccctgtgtgcagggtcctcatgctgccagagtccgggggstggccttcctgccacaccagacggtcaccatcagatttccctgcccagtgagtctggacgcaaaatgccagccatgcctgctgaccagaaccatcagaagcacctgcctcrtccacatagagggtgactcagtgaagaccaaacgtgtaastgcccggaccaacaaagccagggctccggagacaccattgtccagaaggtatgaccaggcagttacragaccatccagagcccaaacccagggccctgtgaaagcagagacccccaaagcccccttccagatatgtccagggcccatgatcaccaagactctactccagacatatccagtggtctccgtgaccctgccacagacatatccagcgtccacgaygaccaccaccccacccaagactagcccagttcccaaagtaacaataatcaagaccccagcccagatgtatccgrggcccacagtgaccaaaactgcacctcacacatgccccatgcccacaatgaccaagatccaggtacaccccacagcctccagaactggcaccccacggcagacatgccctgcgaccatcacggcaaagaaccgacctcaggtttcccttctggcttccatcatgaagagcctgccccaggtatgcccggggcctgcgatggcaaagaccccaccccagatgcacccggtcaccaccccagccaaaaacccattgcaaacatgtctgtcagccacaatgtccaagacttcatcccagaggagcccagttggggtgaccaagccctcaccccagacccgcctgccagccatgataaccaagaccccagcccagttacgctcggtggccaccatcctcaagactctgtgtctggcctctccarcagtggcaaatgtcaaggctccaccccaagtggcggtagcagccggaactcccaacacctcaggctycatccatgagaacccacccaaggccaaggccaccgtgaatgtgaagcaggctgcaaaggtggtgaaagcctcatccccctcctatttggctgaggggaagatcaggtgcctggctcaaccacatccgggaactggggtccccagggctgcagctgagcttcctttggaagccgagaaaatcaagactggcmcccwraaacaggygaaaacagacatggcatttaagaccagtgtggcagtggaaatggctggggctccatcctggacaaaagttgctgaggaaggggacaagccacctcacgtgtwtgtgcctgtagacatggctgtcaccctgccccggggacagctggctgccccactgaccaatgcctcatcccagagacatccaccctgcctgtcccagagaccactggccgccccgctgaccaaggcctcatctcagggacatctgcccactgagctgaccaagaccccatccctggcccatctggacacctgtctgagcaagatgcattcccagacacatctggccacaggtgccgtgaaggtccagtcccaagcgcctctagccacctgtctgaccaagacgcagtcccgggggcagccgatcacagacataaccacgtgcctcatcccagcgcaccaggctgctgatctcagcagcaacacccactcccaggtgctcctaacagggtccaaggtgtccaaccacgcctgccagcgcctcggtggcctcagcgccccaccctgggccaagccagaggacagacagacccagccacagccccacggacacgtgccggggaagaccactcaggggggaccatgccsggcagcctgtgaggtccagggtatgctggtgccgcygatggcacccaccggccattccacatgcaaygttgagtcctggggagacaacggagccacacrtgcccagccatcaatgcccggccaggcggtgccctgccaggaggacacggtaggctccctgctggcctccttgtgtgctgaagtagctggtgtgctggcatcccaggaggatctccgcactctgttggccaaagccctctcccagggagaagtctgggcagctctgaaccaggccctgtccaaggaggtcctgggtgccactgtcaccaaagccctgccycagagcatgctgagcatggcgctggtgaaggcgctgtcctggagtgagctgcgcctgaccctgtcccgagccctgtcccggggcgagctgcgggcggaactcaccaaggtcatgcagggtaaattggccgaggtgcttagcaaggctttgacggaggaggagtgggtggctctgagccaggccctgtgtcagggtgagctgggtgctctcctgagccagtcttggtgtcgggtggccctgaggactggaaccatcctccccaaggccgcctcgaaatcaacaggaagcggggtgactaagacgccggccctggtgaaggtggcctgcaggaggagtccatcggccgcatgggggccctccctgggccccgtgagaccacagaccagcaaggtcagggattcccaggttgggatctggggttgtttcaccatgggccaacctgccgggcccttggaggagatgggggattgatggggccatcttgtgggggtcaccctgcttatctgtggtcactgtgggagcctcggtgatgggtagcgtcatcaccagcattcaccagggtcccctgatcactggcctgtatcccatgctgtcccgggagatgatggagtccagcagggacttctcctcaaacctggatttgagccccaagttccaaaaggaagaagcatgcccgaccctggagcctggcacattggcatcagattttaaccccgaggggagtggggagggccccagtttgctcaagctgtcccacatgcagccacccccgagtctgtggcagcctctcattgccaactgtgtgggcccaagcatgaaccagccctctgtgayctatggcacagccccgagctgccacaggccacatgtggtcagcagggtggcctcttatctatcgaccagggagggcagggtggcctcgggtaggcttccttgcagcgtgggtggtgggagggctgcccatgttcaccagccttacctcrcctgtgggggcctgccttggtgtcagtcctcaggggtacatcgtggtctctaccaaccctyagtggccagaggccagcagcaggcatccagggcttccagggagagcctggggaggaggtatcagcccccaaatcgcaaacagkcccccccgggtactagggaggtgatagacaagggggccccaagtcccttgcaggtcaccatggtgaccaaaactcaggcatccaagactcatggtctgtttcaagcttcccccggcagtgcattggctcaagttcgtcccaagacatctgtctgtggacaggggaggaatcgaacacagggttctgtgtctgccctgctctgcccccagaagctagcaacagaccaycagccatccatcctcggtgagccagtaggtggtttgccacaggatcgagacggtgacctggccaggagcttctcccagggctttgtgacctacagtcaggagaacaattccgaaagctctctgcaaagttctagttccctcagcctttccactatgtctgtggccagcctgcctgccgtcaacaagatagatgagtcacgggaaagcagtttagaaggggaccttgcggtgaagtctgtttttcctccggagtccatggggacactccagaggtttaaggatacgcaagagactgaaaccggctataggtacatgaccctacacttcccctaccggcccactccagcctcggagaaagtgcccagtttccaacacagctcagtgtctaactgcttgaccttgcgtgttcactggggctcagaggctgagatccacaagttctccttaggcaagagctctgtgaatctgattgaggtgtcccaggcaaccgtcaagacagagctgaggaggactctgtctttaggtactgtggtctccactgcatataagccaccatctgtggccaagagcttggccccaattgtgtcccaggctacactggccagtagggtagccccaaacctaggccaggcatcagggttcagtaggctggccccaagcctatcccagcatatagcatccagtaaggtatccccaargctaacctgcccatctatgggtaattgggtgaccccaaggctaccacactcctctgtgcctaatagagtgacaccaagaccagcacagccatctgtggtgactaggaggtccccaagccgaggacacccatcaaggacctttagagtggcctcagaccaaggtcaccaatcaatggctaactgggggtcccaaaacctagcccagccatctatggacagtggggagccctcaagcctagcccagccatctcaagccyctggggtaacctcaaatctggcccagccatctcaagcctttggggtgtctccaagtccagactacccatctcagtctgttgggragtacccaatgctggctcagccatttcagcccactgaggtgtccccaagtccaacctacccatctcaggccattagggagtacccaaccctggcmcagccatttcagcccactgaggtatctccaagcccagcccacccatatcagctcactgaggtgtccccaagtgcagcctactcatatcagcccactgaggtgtccccaaacccakgctacctatctatggccattgagatgtccccaagcccagaatacccatctgtggccactgaggtgtccccaagcccaacctacccatatcagcccactgagatatccccaagctcaggctacctatctgtggccactgaggtgtccccaagcccaggctacccatctcagctcactgaggtgtccccaagctcaggctacctatctgtggcyactgaagtgtccccaagcccagactactcatctcagcctactgagatgtccccaagctcaggctacctatctatggccactgaggtgtccccaagcccaggctacccatttcagcccactgaggtgtccccaagcccagactatccatgtgtggccactggggagtcccctagccttgcccagccatctcagcccactgaggtgtccccaagctcagcctacccatctgtggtcactggggagtctccaagcctggcccagtcatatcagcgcactgaggtgttcccaagcccagcctacccatttatggccactgaggtgtccccaagcccaggcgacccatctgtggtcactggggagtccccaagcccagcctacccatctcagcccactgagatgtccccaagcccagcctacccatctcagcccactggggagtctccaagcctgacccagccatctctgaccatcagagtgtccccaagcctagccatgtcatctcagactattggagtgtccccaagcctagccatgccatctcagaccattggagtgtccccaagcctagccatgccatttcacaccattggagtgtccccaaccctagctcacccatctatggccattcgggagtctccaagcctggcccagcctcctcagtccactggggaatccccaagcttgacctggccatctcaggccactggggtgtccccaagtgtagcccaccaatctgtggccagtagggtttcctcaagcctagcccagccatctcaagccagtgggatgtcccctagacaagattacccaccagtggcctccagggtgtccccaaaccaagctcacgcatctataaccagcaggatgtcccctagcagagctcatgcatctatgacctgtatggtgtccccaagccaggttcatcgatctatgcccagtgaggtgtccccaagccttgcccagctatctcargccaccactgcagtgcccttaagaccagctcatcaacctatggcctgtggtgtatccccaagcctagcccagccgtctcaagccacagggatgtcttcaaggctagcccaccaacctatgacctgtgtggtgtccttaagcccagcccagccatctcaagccattggtgtgtccccaagcctagcccacccatcaggaccccatgggttgtctccaagtctagctcacccatatgtggccagtggggcgggctccagcctagcccacccatctcagaccactgcagtatccccaaggcaagcccaaccatctgtggcctccagtccaggcaagacaaattcatcctgtaccctagcctccagcctagccgagccagctatarcccccagcctattcccaccatctgtggcccacacggaagccctaagcctggctcagtcacccccggacactaggttggccccaagccgatcccagccatctgtggtcagtggtacatgtcatggcctcaatgagccatgctggggctctaggctggattcaaatctgcagtgttcaagggtggactcagtagccccgtgtctgtgtcacccatcagcgtttgtttcagttagcctgggtggaccatatccctctgtggctggaaatatggaccagggtctgaaccagccatccctgggtactggggtgaacctatgtgaagaacctctgatggttagtgagatggtatccagccccccggacttcaagttcaacgacgtgtcccttgggttccatcatccacccagggttggtgggaggcatgtgtgtccaccctctgtggttagtgtttcaacaccaaatctctctcatgctgatgaggaggcctgttgtgtaggccagtgaatcacgcctctgttcaggggtgtggctgtaagccatccccaggagcctttggctgatgctatgttccccagtgggtctcaggggaccacatctcctggcckagctgggaatctcccctggagaaccatagcaactggcatgggccaaagtcaatgtcaggtggccaatggcatggcttcccttgcatcccaggtcttagaggcaggtggccctttgacacatccctctggaaccacagggatggcccccagcccctctctggcttcagtgcccaacagactggccgtgactcagtctaatctttccctgaacagcatggrccccagcagctcccagatcagtgtggttattccaaaaaacatagactgctggcacccttctgaggcatccatggtcccacccagttaccagcagagagatgtgattccgcaggactctctgaagagcagggctggtcgtggtgcggcaggaggttttgtagccagtagaatgagcacgggcgcagtcccaggcactctgcctggtggcataacctccagccttcccccgggctccaccatccgaggcatgggtcacagccttcccgcaggctctrtgtccagttgggtggctcccagtctgatggcagacagaaagaagccaagtctatctgtaagaccctccgctagcttagctgctccaaacttgctcccaggttcagtagtgagtcgggtgagcccagttgtcccccctggttctgtgccaatgatgggggcctctagtgtggctcagagctgctccaaggggcccatggtgattgacatcactgcccctccttacctcaaagccctggctggggagaggtctttagcccccttgcagatgccccacaccaccagtctggctccaggtcactcctcagccccggcagctagtggcacagtgaggagtctacaccgagtgcccacggttctatcaagagccttacaattgagccaagatgctaggataatgccatctggggtcacaggggaccaagccaagctaggagaattggatgaggctgtgttccaagtgtcaggatcaagtggatccaatgacctattcagcaaagccagggtcactggtgcaacccagtggatgtactccagtcctctgggagctgatgggggccatgatcataggtccctgtctgagaaagggtctcttccccaagggaggtggctcccagccatgctagtggcatggtccctgtccctttccaggccccgggtttagccactaagtccccctcagtttatcaacaggggtctgtcrytcacgtcataccccmaaatcactctcagggtacagtggcttctaatgtagtctcaggatcaccccagctggcccgtggcagtactgaggctttcagattgctttcagtgtctgtgggcaggatggggaatcctagtcttcttcagaggtcagggaccaccagcatggtctcacatgtgccactatatccgtcctcggctagaagggcattgtccagtcccttccagacagaagctgtccccaatccactccagaaaacagtgtctggaaacatggctccgagcagccgctgggacgccatgggccctaaaaattcctacagatccrtgcatggtaggattgttccagaactgctagaaagttctgtggccagggttaggcccttmcagtatgtgcaaagacaaccatcccaggcctcagcccgaagtggtgcaaaccccacccacaggccctctgcagaggtaaggcccgtcatcygcactggggagatgacacactcctcggtcattcctccgctggccccgggagttcggagggtgtctctaggctatgagtcttccccaagtggttccctgccacccctttttaaccaggagtcaccgtggagayggcaggactcctatagccyccagaatcctgccgttagtcacaaggcatccctgaactccactatactccagggccccgyggaygctggtgtggttggtggccaatcgtggaacygcgcatgggagccagccaggggtgctgcgtcctgggacacctggcgcaacaaggcggtggtgcmtcccaggcggtccggggagccaatggtgtccatgcaggctgcagaggagatccgcatcctcrcagtgatcactatccaggcgggcgtccgtggctacctggcgcgtcgcaggatccggctgtggcaccrgggggccatggtcatccaagctacttggcgcggctaccgtgtgcggcggaacctggcacacctctgcagagccaccacgaccatccagtctgcctggcgcggctacagcacccgccgggaccaagcccggcactggcagatgctccaccccrtcacrtgggtggagctgggcagccgggccggggtcatgtctgaccgaagctggttccaggatggcagagccaggacagtatctgaccatcgctgcttccagtcctgccaggcacacgcttgcagcgtctgccactccctgagctccaggatcgggagcccgcccagcgtggtgatgctagtgggctccagccctcgcacytgtcatacctgtggacgcacacagcccacccgtgtggtgcagggcatgggccagggcactgagggccccggggcagtgtcttkggcctccgcctaccagctggctgccctgagtcccaggcagccgcatcgccaggacaaagcggccacagccatccagtccgcstggaggggctttaagatccgccagcagatgaggcagcagcaaatggcagcgaagayagttcaagccacctggcgaggccaccatacccggagctgtctgaagaacacagaggcgctcttgggaccagcagacccctcggccagctcacggcacatgcattggcctggcwtytaggaccctggctccctgcagtggggacttcgtgggaggcactcatggctctctgggtctaatgaataaagtcctccmcagcctagatcttgggtgatgtgttctgggttaatggaagtggcttgggtatagtgggggaatctggaacatcccagagggaagagaactctgaagttaccaaccatgcagtatgcatctggggtctgtggccagcatggggacctcaaatctttcctggaggtcaggcactgccaatgtggtctcagctgtgcctctgccatatccacgtacaggtagtggggtggtgtccagcccgtcccagatggaaactgtccccagtgcactctagaaatgtgcctgggacctggcccagagcactcacctcaagtccctcacccctaaaaaatcctacaggatggctgggtgtggtggctcatgcctgtaatcccagcactttgggaaaccaagacgagtgggtcacctgaggtcaggagttagagctatcagcctggccaacatggtaaaaccccatctatactaaaaaaaaatacaacaacaaaaaaaggccaggcacggtggctcacgcctgtaatcccagcactttgggaggccgaggtgggcagatcacctgaggtcagaagttcgagatcagcctgaccaacatggagaaaccccgtctctactaaaaatacaaaattagccggccatggtggcacatgcctgtaatcccagctactcaggaagctgaggcaggagaatcgcttggacccgggaggcggaggttgtggtgagccaagattgtgccattgcattccagcctgggcaacaagagctaaactcagtctcaaaaaaaaaaaaaaaaaattagccgggcatggtggtacacgcctgtaatcgcagctacttgggaggctgaggcgggaggttgcttgaatcccagagtttgagaatgcagtgagctgtgattgtgccactgtgcttcagcctgggcgacagagtgagaccccgtctcttaaaaaaaaaaaaaaaaagggctgggcacggtggctcatgcctgtaatcctagcagtttgggaggccgaggcgggtggatcacttgaggtcaggagttcgagaccagcctggccaacatggtgaaaccctgtctctgctaaaaaatacaaaaattagccaggcctggtagcgggcgccagctactcgggaggctgaggcaggagaattacttgaacccgggaggcagaggttgcagtgagccaagattgcatcactgcgctccagtctgggtgacagagcaagactccgtctcaaaaaaaaaaaagaataaaagaaagaaaaagaaatccataatagaaatgctagaaggttagaaggtttcagtcatgtccccaaaaggccccagtctgggtgagacagaggacagaggaggacgaggacagagaacaaggacatccccagccctgtgggttcagggatcggagggaggtgggagaaattggtgctcccagaggggacaacctggctggacgaggggcagagggagtgacagcaggggtttgggcagctgtggaaccaggagcagggggaaagaggacggcaggggcagggtgtctttagtggatgactggctttgagagcttctgggtcgtcgtgtttagaaggggtggagtccaggtgaagagggcgagaaccgcacccgggggaacaggagcgccccagggaggtcccacaccctgcagccccacctgcgccttgcccctgcacagccccgcgctccgccagcagggagcgcacacgcaggtgcaaggagctggcacctgggcacacacctggccacacacctgtgcagagccggtggcaggccctcccggcgcaggaatggcgtgcccccagctgccgccacttctgcttttggtgctggtggtgctgctgaaagctggtgtgaattacaatactccctttacaggtaagagctggtaaagaggctcagcttccagaaagcggaagggtgggggtgggggacgcacagcccagtcacacacctggcttctggacccctccctcaggccacgctggtccgccaaccctccgaggaaggctggcttttcccccagaaacaaacggagcagctgtgaggacagatgaggcaccgctgctcccaagccctggggctgtgggtcctgcaactccagtgagccctgaacctgctggaggccacagatggcctcacacctacttttgggctccttttcaaatctgttgcttttagccaatccccaaagggagaatggtgaagacctcagggccatgggggttccagggaacagggactcacttcctggtcatcaaacatctgtggttcccatgagaagttcttctgggtgtctgacttaattccctcttgctctcctataagacagtgcctagggtggaggggaggagccttgagcttctcgcattccctttttctgccctttacctgccactatgttgtcactctctctgaccggtgtcctaccccacagacctgtaatagcagagcagaggccaccatggctgctgaaatgctcattgcagggaagggtttcattcagaaggcaccacttttatccccatttcatagctcaggaaactgaggctcagtccagcttgtcccagacccagattagaactggttgacttggctcatgtgagcctcccagtctaggagtctctggggagagcaaacacccagcacagtgcctagaaacatctttatttttaccttctggtcaacccttcagcagctcaccagtgcctactcagtgccaggcactcaacagggcttgtgtcctccaactcttcctttttcaagtccacagcttttcctcagttcactaagcactcagctccccagaattctgacttggcttggggtccactctggcctctgaatcatcttcatttcagcagaaacagaggacaagggtccttgaggggcgttcttcccagctccccagtcacctcaggccagaccctctgctactctgagcctcagtttctcatctgtcaaatggggatgaagcccagcctgagttccatgcctcttctagactcagccgtcatccccacagggcctggggggctacatagagatctggggagggtggcatgtggacccagccccctctcagggccagtgttgtgtgttatttcggcatttctgctgcctagggtgagtcaaggaggaagcacaaagtttggcccagagcagagtgcatgggtggagcagagagttgatgaatgaacttgtaagtgcctaagaggcccagtcacctggaactgggtgggaagtcgttgtgggaggtggctcatgaactgcttacctgccctcagcctggtccctggactccatgcctgggatgggatgtgagccaggaagtagctggaccaacacgtagaagggtgggttccggagacatgttcccagcgcctgtgtctttgtgtcttccattaaagttgaggttagcctagggctacctggagaaaattagggctgatcctctctgagctcataggtggatctttatagttgagtgtcactgtgcacccactgtgtttctattctattgtgtgtgtgtgtgtttttttttttttgagacggagtctcactctgttgcctaggctggagttcagtggcatgatcatggcttactgcagccttgaactcctggactcaagcgatcctcccacctcagcctcctgagtagctgggactaggcatgcaccaccatgcctggctaatttttgttttatttttttgtagagacaaggtctcattatgtctcccaggcaggagtgcagtggcgcaatcatggcgcactacagccttgaattcctggggtcaggcaatcctcccgcctcagcctccccagtagctgggagcacccagcttgtgtacacccactatgaacctgactgatgaactgtcagaggcaccaactccacatgaactccattttacagaaaagaaaactgagtcccagaaaatttaaaggagctgcccagcactgcctgggatgcagtcacttcccatatccaaagggcttctagagctctcagccaagaggactgggaacgctgatctgcacttgaacccaggctgtgggacctcagaccaggagcatgaatttgagtgggagcttcagtttcccactgagagctcacatggtgtcctaaatctttcaggtctccctatgacctggacaaaaaaataaattaattaaaaataaaaatgaaaaggctgggcatgatggcttatgcctgtaatcccagcactttgggaggccaaggcaggtggatcatctgaggtcagaagttcgagacaaatctggccagcacagtgaaactaaaaatgcaaaaattagccaggcgtggtaatgcacgcctgtaatcccagctacttgggaggctgaggcaggagaattgcttgtacccaggaggtggaggttgcagtgagctgagatggcaccactgctctccagcctgggtgacagagcgagacgccatctcaaaaaaagaaaaaaaaaaagagagagagaaagagagagagagagggtctcgctatgttgcccaggctggtctctaattcctgggttcaagtgatgctctcaccttgacctctcaaagtgctggaattacaggcgtgagccaccgcgcccagtttttctttccagatattgtgacctcagagaacagtatggagacatcacctgtcagctctctgatttcttctcccttcgcccacagcacccacagttcaggggaaccccccaaatcctactccagcaccatgagtttggagacagactccataacccacctcagcccctcaagttcaggggcaacccctaccatccagccgagccccagctccacagattcaaggatgataccctcctccccacaaccagagacaatcacgcaccctagttctggctcccccagtgcagagctcaccccctcttcccattccaccctccccagttccgaatccctgaccccgcactggagccccccttcccacagccccggaacggagcccttgacctccactgaccagaccttggagccccctggcccaggtgagtattaagagatttgggtgtttgtagggaggtggcgggtgtaacaggctgcagttttggaactgaccaccagggggaggtacagccccgagaatgctctaggaagggcttcttgtctctgctccattgtctaaagctcttcatgctatgcgcatttattaagtgcctagtgtatgtcacggctgggcacgcagcgatgggcaaagagagaaactaatacttgctgtggtggggagacaggttatacattatgtatttgggcctgggcaaaatagcaggactttgtctctacaaaaaaatctaaaaatggcggggcgcggtggctcaagcctgtaatcccagcactttgggaggccgagggcgggggcgggggcgggggcgggggcggggggggcgtgtatcacgaggtcaagagttcaagaccagcctggccaaaatggtgaaaccccgtctctattaaaactacaaaaattagccaggcgtggtggcagacgcctgtaatctcagcaactcgggaggctgaggcaggagaatcgcttgaacccaggcggcagaggttgcagtgagctgagatcgtgccactgcactccagcctgggtggcagagtaagactctgtctcaaataaataaataaataaaataaaaatggctgggcgtggtggttcacatctgtaatcccagcactttgggaggccaaggtgggaggatcacctgaggtcaggagttcaagaccagcctggccaacatggtgaaaccccgtctctactaaaaatacaaaaaatagccaggcatggtggcgggcgcctgtaatccgggctacttgggaggctgaggcaggaaaataatttgaacccaggaggcggaggttggagtgagcccacattgaaccactgcactccagcctgggagacagagcaagactccatctcgggggggaaaaaaagactctatctcaaaaata

SEQ ID NO: 96309 - DNA, 13732 bp, Homo sapiens
cgagaggctgctgctcaagctgcagagactgccccaggctgagcccgtggagatcgtggccttctcagtcatcatccttttcacaggttagttggggcactcagcaccccatggctctccctggcatctgggagagaccacaccatggtgccagccagagggctggcagaggtggcgggtgtctgccggatcaaggaggaaaaccagttgtcccttgggggaagccaagggacttccctcatcctctgatatgctgcttgggtgatgggcggtgctggggactgggcccagcagtaccccaggatcccaaacgcggggatgacgggagccaggcttgggcagtgaaagagaagacacaacatggaggaggttggccctggcggctggcatggggaccgtccgcacctctcaccagcctctcggatctttctgacctccaccaaacctgtgggggaaagaccctggcaggcagtgggtttctctgggaggagggtgggcatcctttctctcccccaacctgagtcccgtgctctctcccggccctccagctactgttctgctgttgctgctgatagcctgcagctgctgctgcactcactgctgctgccctgagcggagaggcaggaaggtccaggtgcagccgacaccaccatgacggacgggcgatggctgaggagaagctggagaggagatggccaatgccatgacacaggccatcagcctggccctgcagcccttacccctcaagaccaggctcccctggccccagctctggcccagcccaggtacctggacactgacaacttgagccctaccaaggaaacaagggctggtataggtgcaaacctctcatctgccagtggacactgggtgctggggagtcagctgtttcaaagactgggtcaactgcctgggcttcttcgcctacctgcactttttaacaaaacaaggaagtaggggtccccataccttgatggagaacagtccccacctgtgggcaattggcccttggggctctgctgatacatgccaaagaggagcaaggcaatcagaggggctttgtgcaatagcttctgcatccgagctcccgccagagcgtgagcatgtcagtattctagtccagtatttgccagtttccaagtaaaagcttttgtgttacgtgtttctgcggtgccggactccctgaggttgggctgggctctgtacattgggagggggtatggctggtgcccgtccttcccaggcctctgctctccctgtgcccacgaaagctggaaaaccacgcagagaagcatgccacacaggcggttaacaccacgggaccagtggacggtgccatgaaattcctgtcatgcattagctgctaatgagctctgccaggctgaggcactactctgcagagtggcagagactgtgtttgcccaaaggcaggagctaagctcaggaacagcactttactctgtcaactgcctgcacctttggcctgcacatcccacactagcagactcagaccagtgggtcttcacaaactgccagaggaaggccctaatgtcacctgtaacctgcctcctgaccctgtggccctcccccatttgtgtgctgtctgggctcacaccctcaccctgtcagctgcgtgactcaacttccctaagccgaactcccccttggtgaaatggagcaaatcctggtactgcttcctggggtttgctgtgaggataaactaagatgacctatgtctagcactcagctcggtgctgggcatatctttagagccccatcaccatgacccgttattatttgcccctctaaacatgggaccaaccagggcaacagggacccattttaaagactggtcttgctgagaagcagcacctttccttccttaccccctcctttcagctgagtttttcttccagagaactttccaggtagagctacgaacccaggagtgaggggaggggaggcacatggctccagaaatgccaatgggtccagacagagcatcccgaggtgcctccccggggcttccccagagcctcaagaagtctgtgtttttcacatgcttccatcatcttggcctgcgtgacccgtgctctggccacctgggagcagagccctgtctacctgggaaacatgtcatggagaggggatcccagcccctgccacacccccgccatttccagctggcagtccaggccacactggcaatagcaggcagggaggggaagctctcaccctctggtttcactttctagtgtccacggacttgtctgacaggtttaggttaaagacccagagagtaagtgttttcatacaaaagaaaagaaattcaaaaatttgtccattctcagccccctccaaagaataggattcagaatgatgacgatgatcatgaggaggaggatgaagatgatgatgaagatggctaaaatttactgaggagttacacatactcagcattgtcttcagcattttggtgcagataaactcaattactcatcacagtacctccatgttgaagataccactattacccccattttagagatgaggaagctgggcctcagcgatgttaggtaacttgtctacattcaaccagctgaaaaggagcagggcctgcttgagtccagcctatctggctccagagcctctgcttaccacacccagggctctgagacccagaacttggcctcctggttgcagtacagataaggctctaatccattatcctccatcgaccaaccctacacccaaaacacccacaccccaaactctgtctcaaaataaccttcgcaggactgggtgggacccaacaggtaagagctggggtggtgcccaatgaggcacccctcccggaagaaaaacacagggtagtggacggacaggaaaccctgcatttttcattcccagcaccaatggctggagggtccctggaagccttctgtttgggagatggccaacagggaagcagcccaattcctgggtgacttttccataagccagttttcatcagcataagaatagccctgctccagggcggctgaggctgaggccctttgttagaaaatattctgcttccccagcccagctgcggagaggtgggaaccacagacagccctgggcacagacaggccgaatggccgctctagggcaggcggtgaacaactgctgagtccgcacaggattcggtccctgccctcacaggactcactcctccctgctccttggccaactggcacacaccaggcccggctgtcgggccaactccttcacaggcttcaaacccactgagattaacaaaccagacctgctctccgacagcagcctggcccgctcctttaagaggcagcttcttgtgccggtcttccctggggaagatgggcatggaaaggtggcagcagttgccccactgtgggaaagaataaacagaaagatgctgcagacctgggcggcctgaagacaggtgggggccatggaaggggcagccatcaggctggtttcaggtttagaggacgtctgacttggtcaccacctctctgttcccgccactgtgccatcctggaccatgccaccatcaatgcttacctgtggtcactgcagcagcatcctaagtggtccccacaatcatgtcgccagcctcttcatgcccaccccaagctgtgccctctgcttccgccacagggcaggctgctctcggctcctcaaaagggctgcactctactctgaagacctgcgtgccacactgtctgtacatcatgcctgattaaaagctacaatagggatgggcgtggtgactcctgcctgtaatcccagcactttgggaggctgaggcaggcagatcatttgaagtcaggagttcaagaccagcctgaccaacatggtgaaacctgtctctactaaaaatacaaaaaaattagccgggtgtggtggcgcacgcctgtagtcccagctactcgggaggctgaagcaggagaattgcttgaacccaggaggcagaggttgcagtgagctgagatcacgccaccgcactccagcctgagcgacagagtgagattccgtctcaagcaaacaaacaaaaaacaacaacagaccagcatagtatatcacatgcatgtaatcccagcactttggaaggccaaggatccttgagctcgggagtttgagaccagcctgggcaacatggggagaccctgtccctacaaatataaaaaaaaattagccaggtgtggtagcatacacctgtggtcccagctactcctgtggaggttgaggcaggaggactgcctggggcatgacagtggcactgcactccagcctgagtgacagagcaagaccctgtctcaaaaaaaataaaataaaaataaaaaatgacaataaagccacggatacaagaatctcattagaaaaacttggcagagagtatataaaagtttcctcccaaccgggcatggtggcacacgcctgtgatcccagctactcaggaggctgaggcaggagaatcgcctgaacccgggagacagaggttgcagtgagccaagatcacaccactgcactccagcctgggctacagagtgagactctgcctcaaaaaaaaaaaaaaaaaattatccaattggggccggcagttaattgaaagagctggtcaaagcaacttttgttaaagaacacctaagttctctacacatctattacttttttacatatctcacattaaatggaaacatacacctattccttggccggccttcctggccttttctctgagtgtgggcttgccaaccagagctcctggattgctatcttctagttttggttgagtgtgggcttgccaaccacagctcctggattgttattttctagttttggtttctttaaagcagaacaaaaacttaaagtcattggaacttaaaggcaaaggaagctgggtgtgaaaaccttctgggtttttacaaaatgtccctgatgtttagttatcatgtctgcatctttttcaacaggaacattatctgagtgattccaaagtcatcccaaagtagtcaataggtatttctagaaagaatttctttctccactcgctctgaggtgcagcacaggtgcttcagcgctcagactgtgtgctgctggattcaaactccaactcagttacttactagctgatgacctcggctaagttatttaacctctctgtgcccgttccccacatgtaaaattggggtttcagctattattgttgcttcattggttcccgggatgttaaattcaattatgtaattacaagtacaactgccatgaacaggtttgggaaccaacacttgactcttgataagcatctgacttaactgacggagctgcacgcaaagggtgagctagagactggcccactgctgtgagcattcagcatgccaagggccttagtcagtaagtttcacacaaggaaacagaaaacatcaggtaacccgggtcagtgacgcccatgatagttaagaacgactgttctaaatctgcctccatctgtcatccaaccctggccacacctggggagaatcacctggggatgtgtaaacaatacgacatcctggcaaccccagagactgatataagtggtaccaggtggggcctgggcatttctcaaagctcctagatctttaccagctgggataagcacccgagggctagaagggaagcccttggagggcagggcccgcctctctgatctcacaactggacacacagtgcctggcatggttcctggccatagcgggccctcacatcctagcttttaaaggagtatatggtggccactaggtttcaagcaccagggcacaggcttgatcccctcttcccagcttccctattgtgccagtgggcagaaaccaaccacacaatgttgctgaggccgtgcccagggagcagacaaaggcaccaatgggaagcctcaggggggagcaacacttcccccagaaacagttccaggaggcaccaggcgccagccagggctgcagttaatcattcaccccacaacacaggaagtgagccctacgccagtcccagccccagggcttcctgagctcggggcaggtccgcagtccacacgtcacccagacagaggacagcccagcccagccacaggtgaggcggcctgatggcctggggcaaaggccctcggtccagtctcttccccgtccaccccaagtctgacttctctcaggagggactcatgaacacgtgccctgagcacccccaaaatgacatcacacaagggcagaaaggagctgaagggggaacgtgaaaggcagaaagggagccgtggttgccaggcaaccagccctagcccacctttgtttgtttggtgacagcaactaaggtctggtcagggccgcttggccacgctcatgccttttcctctcaacagttgcttctttgagtcagggtgcagctctggtcacctggcggcctcttcagctcagccctccacaaagtgtgagcctgaaggaccaccctgaattgcccttgtaggacccagaacagctaccagcagaatcaggtaatggctccctccttctccacctgggctgccctcacctggctatgggcttgcagtctgcgataaggagctccgcttctagaggactcctaagttctattctcagctgctccaaggaggctaccgaggcctcagctggagttggcccctcctcggctcctatacgctctctcaaatgcctcccaaatgtttggcagttggggcaggaaaaacagggagactctatcatgatgctttttagattctagccaagtaggtctcagggatgagagagagtccttgctcacacttgctactcaggaaagaaggactggagaatccaggggcatcccctaggaagaatccagggccccacttcttgcgccagtcctggctcctgtatctagagcgggggaaatgccatttgctgctggctgcaggcatccagcacaaagactctagccctttcatgtcccctggctgccaggcgggccggctgctcacagaggctgctacagaggctggagtcggcgggcagagcatagcacctgggacagggcctgggagggctgcctgcactcaggtcctctgtccctcttttccagattctcatggaccaactggtattcaaagagacaatctggaatgatgcgttctggcagaacccctgggaccaggggggcctggcagtgattatcttattcatcaccgctgtcctgcttctcatcttatttgccatcgtgtttggtttactcacttccacagaaaacactcagtgtgaagcgggtgaagaggagtgacctgacttgctggggactgagatggcagcaggggaggcgagctgacctgcccccattccagtggtgggccccttcgcggttccctctggctcaggggccaagccctggtgtcttcctttcccaycaggaaaaagtctagtaaaatactgtatctggcttagggttggtcagactagtaagatggggaggctggtctgagaccaattctggctccttgaccctattgtttttagggttccccgaccagaaccctaaaagcacatggagaggatggctccactgcctcaggtggaaggagctatggctaacaaggttctctaacaggctcacaggcccagccagcaatttcacaaatccttgacagagaaagacacaaccaaatgaaataaaaattccttttcaaatctgctaacttgtgagagctcatttttaatccagatagagccaccagagcaagcttcccgaacaaagccgcaccggggcctgcacgctctagcctgcctgtctccagccatcttgcccaccccatcctgccctgcccctgggttctcagcgtgtctttcagttcttgaatatgcttgttctctcccaccacagggcctttgcacatgctattctcattgaccgggatgctctccctcacaccacactttactctatggcctagttagtccttcctcatcctttgtatctccgtttgaacctgactccctcaggtaaatcttccctaaccctcaaggattagggtaaggccacttgttttatactctcgaaacaccatttacaggacttatatgtctttgttgttgttgtttctttgtttttgagacagagtcttgctctgtcacccaggctagagtgcggtggcgctatctgggctcactgcaaactccacctcccgggtcacgccattctcctgcctcagcctcccgagtagctgggactacaggctcccaccaccgtgaccggctaatttttttgtatttttagtagagatggggtttcaccgtgttagccaggatggtctcgatctcctcaccttgtgatccacccgcctcagcctccaaagtgctaggattacacgcatgagccacggcgcccggcctttttttttttttttttgagatggggtctcactcccatcacccaggctgcactgtagtggcaccatctcggctcactgcagattcgacttctgagtttacatgatcctcccatctcagcctcctgagcagctgggactacaggcatgtgccaccatgcctggctaattgtgttttttggttttttttttttgtatttttagtagagacagggtcttgccatgttgcccaggctggtcttgaactcccaggctcaagcgatcctcccacttcagcctcccaaagtgctggtataacaggtatgagccaccatggccggctctgggacggggctatttctgcccactagtgtatcccccatgtccaatgtgcctggcacagagctggcatcagtcaatatttatcagctgaataaatgaatgaatgagtaaacacacagagaaacaagaagatgccaggctgttgggcacccccagccccaagatcccaggaaacaacagggcccaattcaatccaggtctaaacacaaggctgctcttccatctcaagatgccgaggcctcaagctggaggttgcttcaaacctaataactgttccctgtgacactaaaagacactcattgttatgaataatcaaacactgctttttcaaggctgcagcccagagaaagtagctacagatagagaagagaggaaaaccgctggctgccacagccccgcctcattagttaactgacctgagtatcttttctgctggtcccactcccatgtgcctcagaccccacaacaaactgacaagaaacctacagcttcctttgcagaaatgcacccacttctgctgagcccaccccactagctctgtccctcactgccaggtgcccgccccaagggatcgctggtgggaggctgcttcgacctcagcctccaatgagaactattcttaggaagcaaatatctggtggagaaggggctttttctttgtgctacacgccagttatgcaataaagaaacattcacttattcaaagaacagtagccaatacagacataccagcagcgtttattccagcctgctgcctggatttcagaatcatcacatgtagcaaaggagacaggcacgaggctgctcaagaggcagcgcaacaccgtcacctggactccttgagtccacagatgcctggaccccagcccctggcaaccaggccactgatgcactaagaagtcccagctccccggaaggtgacaggagaaatgaaggcagaggcccttgggaggacctgttcccttgcctggcaggcggagcagaccctggggacaggcagagttaaccctccagagagcattccagagcctcagacagccccagagcttttttcagcaaacaggactcacaatgaacaggaacacttggccctttcattcctcaccagaaataagagctctgctcaagaagcctaagaaggccaaatttagcaactcccatattaattgtgcttgaaaagggctctggtcgcaaaggctgcaggcaagggtggtcctggcactgcagccgaccacttttgctgggcgtggtcttgccacagaggccaaattagagacagcagtttggagaagaaaatagcttcagtccagaagccaccgactcactggtcaacaggaggaggtggaaataaaaacacacagcccaaagagtttctctgatttcctcgcttttttcttgcaaaaaccaagatggcccaggtgtatgcaaatgaggacgccactgaaaatcaggagacgggtgtttagtggcctcagtctaccatgagcttcgtgactgtgacctctctggacctcaatttattcacctctaagtctgaagcaatcacgtcagcgtcatccgacaggatcattccatgagatgagatgaatccaagagctttttagaccaaaatgtaaaaactcctcctgggtgtctctcctgcaggcactcacagctccgcatgcctggacacaacctgactacaccaagcagccctcagactctttccgtggcccctgccccatcgcctgcagatgcaggtaaaacagatgcgtgagttcaaagcacatgactccccgaggtaagtggggccacaggcttctgtgtgggtcctggataagggtgaggactactcaagtgatgccagaagtcccagctcggtggcacatgatgaccacaaagccgatggctcagagctggtcacatcccttggaactgagtggcttgtggggccagccatcccagaagagggtggagtggagggaaggacaccactcagaatactgagcaaatccccacactgcgagagatcccggggcctccaatagagaagagcaaggtcctgacttccacactgcccgacacaatggcctttgcaggcaggtgtcccttggtagcctacgggctgtcttatgtcagctgcttaactagggcgtgccggggaagtaaatgatctcactgacactttgctccacatataaaataagtcacttaccccagttcttcacagaaggtcaccagggcatcaaaggccatgatagtggctttatcagatgctttgtttcctctcttttcctggggacaaaaaatgaccacttagcaagtcttatagaattggactaccttagagccacaaaaagtaatgaggaggccgagtgcggtggctcacggctgtaatcccagcactttgggaggctgagccaggaggatcatttgaggtcaggagttcgagaccagcctgacctacatggtgaaaccctgtctctactaaaaatacaaaaaaattagccaggtgtggcagcgcatgcctgtagtcccagctacttgggagactgaggcagaagaatcacttgaacccaggaggtggaggtttcagcaagctgagatcatgccactgcactccgtctcaaaaacaaaaaaaagtaacaagggagaaaaatattaaatgacagtaataaagccatttacaaaagtgtccccaaacctgactatgtatcataacccccagactactgaactgaattttctgggatgagcttttgagagtttccgaaaagcttctcaggaggttctcatgcaaagggcccacagactggcatttaggaagcgctatataatatcacctattttaataatagtaaatacacgcacaaatgttgtgaacttaacaaatatgaacacatatacttctgtgtatattggagggagatatattaaaaggttaagtgactcttcttgataagcttaaaacatgaatttaaaatacaatttaaaacctgtaatcccagcactttgggagactgaggtgggcggatcacctggggtcaagagttcgagaccggccttgccaacatgttgaaactccatctctactaaaaatacaaaaattagccaggcatggtggtgcatgtctgtgatcccaggtactcaggaggctgaggcaggagaatcacttgaacccgggaggcagaggctgcagtgagctgagatcgtggcactgcactccagcctgggcaacagagcaagactccatctcaaataaaataataaaataaaataaaataatgcttgacctgccgactcagaaacccatgtggggtgggggtgggcagctgccagctacaccaggagagcaagattcccaagcccttcagttggcacccaaggggccagtgtgcaccacttggatcacacaaccagaaaacaggaggaccccaaaggtttcctgagtctctacttaccagggaggctgtgtgcggccctgccagctcatgcctgagcacagcatcccagatggggcagagcagggtacggctgggcaggggaggtgggctctggaaggtgctaatggtagcagacagggtgttgcctcctgcctgcaggtagggagcaccctgaatgagcgggctgagctgggctggtcaccaggcctggacccacagctcctttggctatggactaatatcagaggagtggcttatgggaagtggatagcaggaagcgctgaggcctggctcctgagcgcagggtaaagctgggggaaggagatggtactgtgaaggcagataaaggggcaagagcctcaggtttctgtcccccaccccacttccctggggctttccaaaccaaagcctgcaactaacttaaaaggaagaaaaagcacttaagttaccaacaactaccaaactcccccaaagcccctctcacaaaatccaaactgttttctcatctccactcctgcctcccccacacaatatagtttcctgttttctttttaaaatgttgcctgccacctctccacctgggaaacccaaggcatgactgccggttgctggtgacaggcacacagcaggcagagccccatctttggtggtggggcggagggaggtgggggcaccagtccctgccacatcctcaatccgcagacactcatcagccagccttccctttggctcccactagaggggagtagggcaatagcaggtggtccccacagctgagcaacaacagctccaggccttcccaccaggaagacctctgcacccttatccaattcaaagtacaggctcaccttgggccaggaaccactattaggtaaggaatgggcactatacatttcaaatgtggacacctggtcagggcagtggaactctaaagatggcagccaacttccttccttgcccattcctggaggtaattcccctcttagtgaccgaagctctggtgcagctctgctcagagaccgttcctggcttcactctgttataagcctgtctatggacttgtggctgaatcaactagcagaatactgagcatttgtgagtgatgtgattattcatcagcggccttttttgtgtacatgtctatttgccaacatatccttttaaaatactgtgaattatttaatacagaaaaggaaaaaaagagcccgggcatggtggcttatgcctgtaatcccagaactttgggaggctgaggtaggtggatcacttgaggtcaggagttcgagaccagcctggccaatgtggtgaaacctgtctctactaaaaatacaaaaattagccaggcgtggtggtgggcgcctgtaatcccagttacttggggggctgaggcatgaaaattgcttgaacctgggaggtggagaatgcagtgagctgagattgcaccactgcactccagcctggacgacaaagactgtctgaaaaacaaaacaaaacaaaacaaaacaaaaaaaaaaccccaaaaaaacaaaaaccagacactgatatctgagacatcatctattga

SEQ ID NO: 96310 - DNA, 12608 bp, Homo sapiens
gttgctcataggctcccgaggattgaggactgcccggggaaagggagcctctcctcctcttccctccctgggcggggtctcttgggagggggggacagacctcctgtgatgccctggcaggtgggctgggttagggtggtagggagggagccattgtggctgcagctggcatcggatcctggccacccccgcagtgcatatcagagatcacacacacacgcgtgcacacacagaggtcacgccggatgtacacatgcacacatagcgcacaaggatgtttctgtgtacaggtgtgcacacgcagcccacacagaatggacatgtgcgtgtgtgcacaatgcactcacacaaagctcacagggatgtgagtacacagctctcaaggggcatatgtttctgtgtgcatgtgcacacagctcacccgggagggttacgtgtgtctgtgtgcacaagtgggcctcacgcagggtgtacacatgcgcgcacatgcacagcgctcacacagggtgtacaggtgcgcgtgcacacagctcacagtgcttatgtgtccgtgtatgcacactcgcagagagcccacagggggaccactctctctctgaacacagagagtgcctgagaatgctggcatcacagttgtttttgtccccagtaaaacaaccactctccaccttccgctctgttctccccctcgggtccactctctctcagggtcctggtctccttcctttccacctgggtggtggcatccaggacctgcctgagttcattctccgcccccagcccggcctgccccaggtgccgccggcagccactgggaggcagtacgaggcaagtgcgatgccgcccgcgggccgtccccacaacgcgtctcctgccggggcaggtcccgcgacagctctggtggaagcagcttccggcttctgcggtgcgggcggaggtggcggggtccggccctcgccgtccagtccgcgcgaggcggtgcccgcccctagatggccagatctcggcggccggtggccggtgacgccttgccgcggccgctgccgcactcgcggaggctggccggcgccgggtgcgcataggccggcggggcgcasggctcggggccggggcgccgggagggcagggccggtggcggaggtggcggcggcggcggcgggagcagcttctgcgcctcttcgtgtgcacggttgcagcggttgtcacgctccccggcgcgcgggcggcccttccagagcaggtggcccagctcggctacgctgagcagcgccgacagcagccccaccgcgaaatagaagagcacgaagacggtcttctcggtgggccggctcacgaagcagtcgaccgtgtgcgggcagggcggaccggcgcacgcgaagtgcggggccacgcggaagccgtagagcagcgcctggccgcccaggaaggtcagctcggccagcaggcgcagcgccacgctcagcaggtagcagcggcgcgcgcggcgggcgcgcagggcgcacggcgcgcactgggcctcgggcagtccgggggcgcactgcgccgccgcctcagcgccgcccgcctccttgcctgcccggtgcatggagtagacgacgaacagcaccgggggcgccgagagcagcaggatgtggaagagccagaagcggtagtgggagaccgggaaggcgcggtcgtagcaggtctggcgacagcccggctgcagcgtgttgcacacgaactcctcttgctcgtcctcgaacacggcgccgcccaccgtggccagcaccaggatgcggaagatcagcatgaccaccagccagaggcggcccacgagcggcgactgcagctgcacggcgtccagcagcgagcccaggaacgcccactcccccatggcgctggggacgcggggcggggagtcaggggatggggcaagtcagggacccctgccccttccaagcctatcggggtggggtccgttggaccttctctgacttcagggtgagtcgtgaggtaggagaggcccgggtttagcgatgagaccagtatgaaacggagggccacgggagggcccgaggggagcaggcgacgctcagctatgggttaccttctctttgggaccgatgggtgctggggaggatcccccatttgcattttagccgcaccccctgagccgtctccgttcgaccctgggatcctccagatcccagattcttaggaaggaccttggagatcagctggaccagcccctgacttgcctggtttcggaagcggaaacccagcggtgcccttagctgtcaaggatgctgtgggaagagtggagcctcgaacccgagacgctagacccaatttggtgcccatgggaggagtgggagtggcagaggcagcgagaccactcctttcttggcccaccatttctctcaccatttttactgcagtgaactcctctcagggtggggggctggtacagaggcaactccgctttcataactctcacagggtcctttgtcggaggtgtccctgccctcctaccccagcgtggtgggagtgcgacgccaggcttctccctcctccctggcctcctgtgcctccagcctccacatctcctgagatcctccccaccccacacttacacaggtccccacacgcccctggtgcccctaaaccgccacccaaccccactcaccctggggccgggactggggtgtcagagctgagccagggaccttgggaggtggctgggaccggcgcctcctgctccctctttcattttccctttcggatttggccaggatggaggacaggacaggatggctgagaggggctagcgctcccccttctcttaaaggaacagggtgaccctgctggctggctccgcccttgggaacaggcacggaccacgccccttgctgggctctgtggccctcactctttagctaaatttccatctggaaatgggggaggggggtaaccagagccacatcctttatcgaggaagctgggggattcctagaagcccttcccagacagaccctcagtctggagcctagatccactacgcactaaccatgccctgtgaagatggtcttcggggacagagggaggtttggtgctggagtttaaggggcagcaaacatctaacagcttctggttccagctctgccaccgctcaccttggacaaatcattcggcggtactgagccaggctttcctgccttgtcaacaaaggcggccagtccagctgacccccaagtttccttccagctttacatcttttttggaacggggtctctctacatagcccaggtcgatcttgaactcctggcttcaagtgatcctcacaccttagcctcctgagtagctgggattctctacttcttaatattgaattcccaaccatattacagagaaccaaaaaaacccttgtgcctgcaaaaaaaaaaaaaaaaaaaaaaatcccatatggaaaaccattaaaatatcccaagtgcctggctttgatagttaaataaaatctttggtttccttcccacttttctgttatttccagctttactataatgaacatgttatttatttatttatttttaatttgtttgttttgagatggagtctagctctgtcgcccaggctggagtgcagtggcatgatcttggctgaatgcaacctccgcctcccgggttcaagcgattctcctgcctcagcctccccagtagctgggattacaggtgtgcgccaccacgcccggctaatttttgtatttttagtagaggtggggtttcgccatgttgaccaggctgatctcgaactcttgacctcaaacaatccgcctatctcagcctcccaaagtgccgggattacaggcgtgagctaccacacccggcctaacatgttattttattatttatttatttatttatttattgagacagagttttgctcttgttgcccaggctggagtgcagtggtgtgatctcagctcaccgcaacctcctcctcccgggttcaagcgattctcctgcctcagcctcctgaatagctgggattacaggcatgtgccaccatgcccagctaattttgtatttttaatagagacaggatctctccatgttggtcaggctggtctcgaaatcctgacctcaggtgatccacctgcctcggcctcccaaagtgctgggattacaggcttgagtcaccgcgcccggcctcatgttattttataatgtgaaaaataggactttttccccccagaaggctctgaattgagagttccctcctactgccctgggtggcgggggaagctgttttatggagaagggagtaagggtgaccgacggtgatctgagtggtcagggaggggacactccaggctgagatgtttggttgtctgctctgccttcctaggggtccgcctgagtgcatagcaaaacccgcttcacctatgcacctgctgggccagtccccgtgtggaaccccgttagctccatatgccaatgagctcattcgattctctgtcaatggtggcatgagggcactatttacaccaggggaaactgagactcagagggtctaagccacttgcctgctgtcgcgcagccggtaaatagcagatccaggcctatgcgaggcccaactagttcttgagcccaagctcttgagcctttcatggaactgtcctccatccagcctggctgggcttcccaggtgctgtcccagggcctgacagtccccaggaggggttgcctctatgccagccttgtgtggggctggtgggtgcaggcactggagggaggtcatgcctgcccctctgaagaagggcagcaggactcacctccttggtcacagttcctctccctatcagccatgggtgcctgtgtggttttccatatgctgacgcagacccccaggtccactttcaggaaggggaaggcacgtacccttcacccaccactccctccagctcaggggcccagcccccgcaggaaaaactctaggtaaactcctgcttgtgtgtgttggggaaccctcctgccctcgtgcaggcttcccttgggagtgggcctgggtgggggacgctgccctggagaaagtccaagggaaaaagcacatgctggagccccagattctgaaaacaggatgtgggttgggggcgctgctggcctcaccctcccgacctccctctgcccctggcaaagctgctaccggccccctgcccccagccacaggggctcagggtcacatctcatctcccttgactgtccaggaatggtccccaccccgtcctgtcccgtggctcctgctgggtcaggccattggcgccacctggaaaaagcccatcagccctgcgggaatggaaagcagctgaggcggtgggccagggtggggtgggaagtggagagcctacagtcaccctgtgctgtctgcagcctgtgatgccacagggccagacccagagactctacaatctcaggcccggtcctccttccctgatagcgccatccagcctgagaggaggtgttgctgacgctgcctccatctggcagccggtggcccattctcggccatgcctaaagactggggccgggggctgggtgcagtggctcacgcctgtaatcccagcactttgggaggccgaggcaggcggatcacaaggtcaggagatcgagaccatcctggctaacacggtgaaaccccgtctctactaaaaaatacaaaaaattagccaggtgtcgtggcgggcgcctgtagtcccagctacttgggaggctgaggcaggagaatggcgtgaacctgggaggcggagcttgcagtgagccgagatggcaccactgcactccagcctgggcaacagagcaagactccatctcaaaaaaaaaaaaaaaaaatctggggctgggctgagaggccaatcctgcctcgctccggtctctgttccagacacctctccctggccatcggattgtggggccactgctcatgtaagacacacataggtgcacgtatgtgtttgtacccagtaactatcagccatggtcaaccccaccatgttcttcaacatcgccgctggcagtgagcccttgggctgtgtcgccttcgagctgtttgcagacaagtttccaaagacagcagaaaactttggtgctctgagcactggagagaaagggtttggttataagagttcctgctttcacagaattattccagggtatatgtgtcagggtggtggcttcacacgccataatggcactggtggcaagtccatctgcagggagaaatctgatgatgagaacttcttcctgaagcatacagtcctggcatcttgtccatggcaaatgctggacccaacacaaaccgttcccagttttttatctgcattgccaagactgagtggttggatggcaagggtgtggtctttggcaaggtgaaagaaggcatgaatattgcagaggccagggagcgctttgggtccaggaatggcaagaccagcaagatcaccattgctgactgtgggcaactctaatgagtttgacttgtgttttatcttaaccaccagcccattccttctgtagctcaggagagcaccctccaccccatttgctcacagtatcctagaatctttgtgctctcgatcagttcgctttgagttccctgttttccttgttcctttccatgcctagctggattgcagaattaagcttatgattatgaaataaaaactaactaaataaataaaaataaattatttgtaaggcctggcatggtggctcatgcctgtaatcccagcactttgggaggccgaggcgggtagatcacctgaggtcaggagttcgagaccagcctggccaacatggtgaaatcccgtctctactaaaaaatacaaaaattagctgggcatggtggcacatgcccgtattcccagctagtcaggagaattgcttgaactcaggaggtggaggttgcagtgagccaagatcgtgccactgcaggccaacctgggcaacagagggagactctatctcaaaaaaaaaaaattatttgtagagatgagggtcttgccatgttgcccaggctggcctggaactcctgggctcaattgatccgccagccttggcctctcaaagtgctaggatcacaagtatgagccaccataactggccacttattttttattgttatttatttatttattctatttactgacatccttgagccatcacactgctgttttgtctcctgtgccctgctaacattttaaaaagtccttacagaaatgctgtcttttcgtgaggctttccccagctgccctagcagaaatttacccctctgtttcctgtcccttctcagctttatttcctttgtattgactactacataactatacacacacacacacacacacacacacacacacacacacacacacatagagagagacggagcctcactctgtcacccaagctggagtgcaatggcacgatctcagttcactgcaacctccgcctcccaggttcaagcagttctgcctcagcctcccgagtagctgggattacaggcacccaccacaacgcccggctaatttttgtatttttagtagtgacgaggtttcaccatgttggccaggctggtctggaactcctgacctgaaataatccacccgcctaggcctcacaaagtgctgggattataggggtgagccaccgcacctggccaattttatctttttcttatgtatcctgcttagcgtccatctctcccaatagcacaggtgatccacagggaaggaatttttggtgctctgcttactgtcccatccccagcacctagaatggttgggggcacacagtggatgctcagtagatgtttgttgggtggatgaatgaatgaagtgggtggaagtttctgccctaaggtgataagaactctgagtgtctcaggtctcaactgctggctctggtctcctctagggctgtgggcatttaagtggccaatccagtctcaggtcagcaatcagaatttcccatcctagatagaaacaagaactcaaaaatggattcatggtaaacacctgcccccagctcggctggccttgggtccatgcctgggtgggagagggaaggggtggagggcggcagagttggctcttcttggtcccttctagtccttctgcaccctccccaacctggctgcagcttctgacccttcatattcttcccagcgccccgaaaaccttccagaccagatgacttctgccaccccagggtggccccacctcctggctcttgccttggagcttgcctttggctccctatggacccctggggccctgcattttcaacacctgggacgcgccttcgcatctagcctttgctccctcctttggctccatgattatttaagattaggtttggggccgggtgcggtggctcacgcctgtaatcccagcactttgggaggctgaggcgggcggatcacgaggtcaggaggttgagaccatcctggctaacacacggtaaaaccccgtctctactaaaaatacaaaaaaattagccaggcgtggtggcgggcacctgtagtcccagctatttggggggctgaggcaggagaatggcgtgaacccgggaggcagaggttgcagtgagccaagatcgcgccactgcactccagcctggatgacagagcgagactctgtcttaaaaaaaaaaaaaaaagattaggtttggatggaacaacaattccaaacagtggcttaagcaagagagaagtttgtttctctctcacataaaaactctgccccagctgggtgcggtggctcatgcctataatcctagcactttgggaggcctagaggggcggatcacctgaggtcaggagttcaagaccagcctggccaacacggtgaaaccccatctctactaaaaaatacaaaaattagccgggcgtggtggtgcacgcctgtaatcccagctactcaggaggctaaagcaggagaatcgcttgaaccctggggcggaagttgcagtgagctgcgacattgcactctagcctgggcaacagagcgaaacgcagtcttaaaaaaataaagggctgggcgcggtggctcacacctgtaatcctagcactttgggaggccgaggtgggcggatcacctgaggtcaggagttcgagaccaacctggccaacatagtgaaaccaggtctttaccaatagccgggcgtggtggcacgggcctgtaatcccagctactcgggaggctgaggcaggggaatcgcttgaactcaggaggcggaggttgcagtgcacccagattgggacactgcactccagcctgggcgacagagagagactccatctcaaaagaaaaaaaaaaaaagaaaaaaaagcctgccccatggagtcctcaggggcgcgggcacctcgctgcccccgccacagccccatgctgtctccctctcgctctctctctctctctctccccctgtctcagaaaagggccaggaagtggccactttaccgatttgctcacatgtcattgggtaggatgagccccacgaccacacctatccgcaagggatgctgggaaatgtagtctttattcttgtgcccaggagggagcagggagactccctcgctgtcacagatctgcttctggcattggtcccccacgctgacatgggtcgttggactcactgggttcctcccaagtctttgcccccattagctgctctggaggaagaaggaagcctccacagtcttgtctgtcaccttgtccctaggcccttccaaaccactgcacctctgggctttccttcacacccctctgccaagcctcatcccttctttaccgtccttgggcagaagggtcatttcctccgaggggagctcctgcgttttcgcccatttttaggttgcacatgtagcaaccttgctctggaaagacaatgagtgtacctgaaggtggctggggcctgcggtagcctcttcttagtgaccaaggggcttgggaatccctttcttcctttccttgaaagcccttctttttcctgagtgaactgacaggtgagagaaattgctttgggattggggctggggcaggggaaggatttgagtcatcaagaggcatttttcagagtccctcccctgcaccccccccaccacccctttgccatgcagctctgaatggcctgtgtttttgtacatgtcaagatgtgtaagcaatcactatcactgcctgtagcctggggtcccgatcctttttccatcaccccagcctcatgatcctggacttggtctgggatggagagtactccgagatccctgcccttccagagtctctcaagggggactaagcaggtcagtagtgcaatcaggtcagctcaagatcagtggacccacagaccactgaagctccctgcctgaaaacaattctggacccaaagggctgtgcttggcacaggccctggaaagttactaggggcagaagacaaggtcatctatggatggagcttcctttcttccacctaaaaactgtcaagcgcatccatgtgaagagaccaccaacagggtttgtgtgagcaacaaggctgtttattcacttgggtgcaagtgggctgagtccgaaaagagagtcaatgaagagagatggggaaggggttgctttataggagttgggtaggtaatggaaaattacagtaaaaggtggttatctattgttagcagaggagggggtcacaaggtacatggtggggagattataagactcattgtccagaagaagaatgtcacaaggccgattgatcagttaaggtagggcagggacaagtcacaatggtggaatgttgtaatgttggttaatcagttaaggcaggaactggctgtttcacttcttttgtggtttttcagctgccccagacttcttggctcctgcaggccatctggacgtgtatgtgcaggtcacaggggttataatggctgagcttcggctcagaggcctgacaaaaacacatttatgggtataatatctttttacactcatcatgatgtattggagctaccttgagcccaatgaagatatcgtctgtaatggttaatactgagggtcaacttgattggattgaaggatacaatcctgggtgtgtctgtaagggtgttgccaaaggagattaacatttgagtcagtgggctgggaaaggcagacccacccttaatctgggtgggcacaatctaattagctgccagcacggctagaatataagcaggcagaaaaatgtgaaaagagtgactggcctagcctcccagcctacatctttctcccatgctggatgcttcctgccccccaactccaaattcttcagttttggaacttggactggctctccttgcttctcagcctgcagatatggcctattgtgagaacttgtgatcatgtgagtaaatacttaataaacttccctttatatatatctattccattagttctgtccctctagagaaccgtgactaatacattgtcttacccaagagaacacaaatctgactcctgaaagtaccgagcaagtaagagggaatgtaccatgatgcaactgctttgaaaaccagctcctcagtttcttatgaagttaaacatacacttaacatgtgactcgacaattccactcctacgtatctacccaagagaaatgacaagttatgtctagaaaaggatatgtactctaatgcttattacagctttattcataatgagcccaaactggaaacagcccagatgtccatcaacaggtgaatggagaaacaagatgataccatggaaaaatattcagcaataaaaaaaaaagaagggccggggcccttggtcttgatctcctgacctcatgatctgcccgcctcagcctcccaaagtgctgggattacaggcgtgagccaccgcgcccggccaacatggatgcatttctaaaacatgctgaatgaaagaagccagacacaaaagcatacgtactgtgatttcatgtatatgaagttctagaataggtgaatgtaatctgtaatgctggaaatcaaattagggtttttctggggctaggggttgaagaggcacataagaactttttgaggtgatagaaatgctttatatcttgattgtgattgcggttgttcaagtggatacatttaccatttacagccataccaccctgaacttggaagctaagcagggttgggtctggttagcacttggaagggaggagttcacctttatcaaaaagtcatcaatctttacacttggaatgaatgcattttatggccgggcgcggtggctcatgcctgtaaccccagcactttgggaggctgaattgggcgaatcacctgaggtaaggagttcaagaccagcctggccaacatggtgaaaccccatctccattaaaatacaaaaattagccaggtgtggtggcgggtgcctgtggtccgagctactcgggaggctgaagcaggagaattgcttcaacccaggaggcagagattgcagtgagctgagattgcatcacttcactccagcctgggtgacagagtgagactccgtctgaaaaaaaaaaaagaatgggtgcattttatgtatgtaaattacaactcacggttga

SEQ ID NO: 96311 - DNA, 20031 bp, Homo sapiens
cgccactgcactccagcctgggcaacagagcgagaccctgtctccaaaaaaaaaaaaaaaaaactaaaaagattcttcaccttagttatctggatttccagaaccccatcctgtccataagggccctgcagggttcttcacaggcatcaaacctggtcctctctagaacaagtctccctctagaatcactccagaaacacagaaggggacttggtgaatgcttgctctggagcaatcatatgctccttcagtctttggaggacccaggggagaagtaacccctcttctagagtagaccagagggagagttccccattcctgggggcagccatctggaagtactgtagatatgggctgggaagagcaggtgggcactgtggcttctagaactgcctgccagccatcaggaaaagatgttttgctagttctagaatattcagacagttccagaaacgtcccccttctctccaactctcccaactagaatcactctggatacgggcacccatttgcttcaggaacaccacaagcttctccagaagatgccaggcctctgaagccacgtactgctggctctagaaagatcaggctacttcagaaagtctccctggctctcaaggcttagccaatgtccagagtggagacaagtctgcattaatgcccacccactcgggcaggaaggccgcctccggcttaaagatcttcaggaactcagagtctggcagggtgaagttggccaggtagacagtgtctccgccagccaggtaggcagcccagaagccgaaggtgccaatggtcataatggtgtggttgcactgtgtgagcagggcaaagtctttccacggtgtagcctcctgtccatcgccagcaaacgtcacatcgccctgggaggtgtcgatgttttctttacaccactccatgccgttgctggtgaccacgaaaacgggggcttcgtgccgtgcccggaaccagtccatggcctgccggaggtaggcgctgtcgcccaccacacccttccagcgctgaggcataacctgcagatagtccccacggcgcacgtggacgccgacaaaggtgcgcgggcggtcccctgtgcggcccaggcggagctgacccagcacactctgcgcctcttcccgaaggtggtcgtgcagggtgaactctctgcggatctgttcccggagatggtggaagaaagtccaagagcaggggaagccagagagcttcaggaaaggatctctcaagtccgcgtactcctccgacatccagtcgtgaagctgcagctcccgccacggcgtgcggctgtccacttctggggccagcacgggcagggtgatgcggaataccggggccagggcggcatgcatggcaggcaggataaaggcccggcggccgttgagctgggccagagccagcagcgtggcatactgtcccatctgattaccaaaccggccattggggtagacagtccaggtgccggagagggaagcagggtgctggggacaggaagaggaggcgttggggcccatcgcagtacccggcaggcagaagatggccactgggggtgtcaccaggcggcggtctggacacaggatcgacaggcctaggccatgtggaaagctgtcttgatggatatggaggaagaagattacagagaggacacagactagcaggaaggccaggcagagctgacgatggctccggagccacatggctgcaggggaggaaaggcgaattagcaaatgcactgaggctgaggaggggaggctgaggagggatgtggggtaagggaggcgcctggggtgcagcactccttagtcccagggaaagaggaagttaaaggtttagactcctggggctgaggtagggagagcctgagtcctaggtttcagggatgagagccttggaatttcggggcatggggactggaagacaagtggttttcaagatagccatggtttggctgggcactgtggctcacacctgtaatcccagcatattgggaggctgagatgggaggatcccttgagcccaggagttcaagatcagcctgggcaacagagcactcttacaaaaaaattttaaaattagcttggcatgggccaggcgcggtggctcacacctgtaaccccagcactttgggaggccaaggtgggtggatcacctgaggttgggagttcgagaccagcctgaccaacgtggagaaaccctgtctctacttaaaatacaaaattagccgggcatggtggcgcatgcctgtaatcccagccactcgggaggctgaggcaggagaatcgcctgaacccggggggcgggagttgcggtgagctgagatcatgccattacactccagcctgggcaacaagagtgaaactccgtctccaaaaaaaaataaataaaattagcttggcatggtggcacatgtctgtggtctcagctacaccggatgctaaggcgggaggatccccggagctcacaatgagccgcgatagcaccgctgactgcactccagcttgcgcgacagagagggaccctgtcttaaaaaaaaaaaaaaaaaaaaaaaaagaaagtggtccaggttcctacacctttcctgaaggaatctcgagtctcccctcctgtaagttccgctgatactggactcttccaccagcctgtttctcaggagtacctgtctgtgaggcgcaaaatccaccacagaggtggtgatgggaaacgatagttcaagtaaaacaagagaggctggagggtcaggagcggaaggagcatcttggttcctggaggagtaatggctggggaggtggcggagattcctagggccttaggaagacctggagaagaggttgggggtgcacctcctggttctgaaggagttgttcctgggtcccaggaacaactgagtggggcagtccccacttacccgagctgcttgcaggtggcagatccacagtccgcttttcgtggccggagcgcaccctccgcaaaggcaggccacatccggccgcccctggaacgccaggcgtccggctatccggcccggcagccctcccctccgcgcagcctgtccggactggcagcgagggcttggggaggagaggaaggagagggcgcggccgggagtctcgcagcgtccgccctcccgggccgggcggatggctggaaggtggagccccgcccgtcacttggcgccgagccccagcgccaggggctaaggcgatggcccctgggcccaccgctccccagatcggggatgcaggggaccgcgccctgcccctccgccccgtcattgacctgcgcgaaggcttcacccagggcaggctacctggcttctgagcagccgcagcatcattgcgtggaccaggagacggagcgcccagttgcaatgctggagccgggaggtccaatccgccgccctctctcttccggtgccagggcttagagtcggcccccgacacctgggtgcttcgagcctggccacgccccagcggctgggcagggcccccgcacctggtcccggcgagtggagcgatcgtccgccctctgccgcgtcctcctgggggatggagaacctgtttgccaggctgccgccggagcgcgcgagggcctccagcctgcaggtgctcccgcgcccaccagggtctccgatctcccacaccccccgcctcaccgtccacactcaaattccagaatcccagcccctagtcactccttttggggaattctagggtcccgtgccaaactgctactttccagacctgcactgcacgaaggcaaccattccaaggctggagaccggagtggaacagggtctgtttcccacgccgtcagcgggggccgtggctgccggcgccagagacaaaggcctctgcccgcttgtcacctaattaaagcattttctctggtccaaggcccacctccagcatcgccaaccccgagcagggcaggctaacgtagggtccagccctacggggctttgcgggtgggtgttcttcccctgtgaggagaggagagattgtaagaaataaagacacaagacaaagagataaagagaaaacagctgggcccgggggaccactaccatcaagacgcagagaccggtagtggccccgaatggctgggcgcgctgatatttattgtatacaagacaagggggggcaggataaggagggtgagtcgtccaaatgactgataaggtcaagcaagtcacgtgatcatgggacagggggcccttcccttttaggcagccgaagcagaaagagaaggcagcatatgtcagcgttttcttctctgcacttataagaaagatcaaagactttaagactttcactatttcgggcgggcgcggtggctcacgcctgtaatcccagcactttgggaggctgaggcgggcggatcacaaggtcaggaggtggaggccatcctggctaacacggtgaaaccctgtctctactaaaaatacaaaaaattatccgggcgcgtggtggagggcgcctgtagtcctagctatttgggagggtgaggcaggagaatggtgtgaacccaggaggcggagattgcagtgagccgagatcacgccactgcactccagcctgggggacagagcgagactccgcctcaaaaaaaaaaaaaaaaaggctttcactatttcttctaccgctatctactacgaacttcaaagaggaaccaggagtacgggaggaaaatgcaagaggacaaggagcgtgaccattgaagcacagcacagcaggatgactgcgggcaggcctagataatacccagcctcccacaagaagctggtggagcagagtgttccctgactcctccaagaaaaggagattccctttcgtggtctgctgagtaacgggtgccttcccagacactggcgttcccgcttgaccaaggagccctcaagaggcccttatgccggtgtgacagaaggctcacctcttgccttctaggtcacttctcacaatgtcccttcagtacctgaccctatacccaccggttgtttcctggttatattagttatacaacaaagaataaaagtaatagctaatgattaataatgtttacactaatgattgatactgtccatgatcatctctatatctaatttgtatgataactattcttattctaactattttctttattatactgaaacagtttgtgccttcagtctcttgcctcggcacctgggtaatccttccccacagactgaccctcccattcaagatacatcaatgtcaaagactcaggagtttgacttgattcccagaagtttaaccatcatctccccaggctcgggactcccagcacccagacccttctgctcacacccagcagtccaggcccccagaccctcctccctcagacttaggagtccaggctcccggcccctccttcctcagacccaggagtccaagccccctgcccctccttcctcagacccaggagtccaggaccccagcccctccttcctcacacccacgagtccagatccctagcccctactccctcagacccaggagtccagaccaaagctccctcctccctcagacccaggagcccaagttccccagcccctcctccctcagatccaggagtacaggcccagaccctcctccctcagacccaggagtccaggccccccacccctcctccctcagacccaggagtccagagccccagccctcctccctcagacacagaaggcctacccttgcacccttaggggctccaggaaattagccaacctgtcttccctctgggtgcccactccagggcctggcttggctgccaactccagtcagggactttcagccacccctccccccaggttatttcaggagcacctgcctgggcctgggatggcttctctggtgaaagaaacaccaggattgcatcagggaggaggaggctgggatgtccagggtctgagcatctgagcagggacagatgaggttgaggttggcccacggccaggtgagaggcttccaaggcaggatacttgtgtctcagatgcggtcgcttctttcatacagcaattgcygccttgctgaggatcaaggaacctcagtgtcagatcacgccctccccccaaacttagaaattcagatggggcgcagaaatttctcttgttctgcgtgatctgcatagatggtccaagaggtggtttttccaggagcccagcacccctcctccctccgactcaggtgcttgagaccccagatccttctstctgagacycaggaatgtgggcccccagcccctttcacctgggtcccagctaacccgatcctcccctccctcatcccctagacccaggagtctggccctccattgaaaggaccccaggttacatcatccattcaggctgcccttgccacgatggaattctgtagctcctgccaaatgggtcaaatatcatggttcaggcgcagggagggtgattgggcgggcctgtctgggtataaattctggagcttctgcatstatcccaaaaaacaagggtgttctgtcagctgaggatccagccgaaagaggagycaggcactcaggccacctgagtctactcacctggacaactggaatctggcaccaattctaaaccactcagcttctccgagctcacaccccggagatcacctgaggacccgagccattgatggactcggacgagaccgggttcgagcactcaggrctgtgggtttctgtgctggctggtcttctgctgggagcctgccaggcacaccccatccctgactccagtcctctcctgcaattcgggggccaagtccggcagcrgtacctctacacagatgatgcccagcagacagaagcccacctggagatcagggaggatgggacggtggggggcgctgctgaccagagccccgaaagtgagtgtgggccagagcctgggtctgagggaggaggggctgtgggtctggattcctgggtctgagggaggaggggctgggggccttggcccctgggtctgagggaggaggggctggggatctggactcctgggtctgagggaggaggggctggggatctggrcccctgggtctgagggaggaggggctgggtctggacccctgggtctgagggaggaggggctgggggtctggactcttgggtktgaagraggaagggctggggtcctggactcttgggtctgagttgggagggggctttggcttgggcttctcctgggtctgagggaggaggtaggctgtgggcttggactcccagggctgggacagagcyggatggtgggacagagtcgggtggtgggacagtcccgggtgggagaggtcctcgaaccaccttatcgctttcaccccttaggtctcctgcagctgaaagccttgaagccgggagttattcaaatcttgggagtcaagacatccaggttcctgtgccagcggccagatgggrmcctgtatggatcggtgagtttccaggaccctcctcaccacccaccatgctcctcctatatgtcgccctcacagcctggggtgccttgtcttgctcatcccccccggagccagacttgattctatttgctctgcacgcccccagctgcaacatttggaggttgaagttgtcatcagtgtttgcaagatgaggaaactgaggcccaggccggggcgccagtgacctcaatcatgtgatgtgtggatgctggagcggcctgaggctcaggttattgggagtctcgtgattcagtaacccctgctcctgcccacacggcccctgtgtgcacggctcatgctgggcacagggacactcgrggaarccatggccagtaaagtgaccaggaccttgagtgctagggagacmccccgcctggcctgagagagcactgatggctccgagggctggaatgttctctgtgaagtctgaactgggaggcaggtccctgcaggagagccctggggtaaaaaacaaaacctgccttgctgttttgtttcctagaggaggggctgggggcctggactcctgggtctgagggaggagrggctgggggcctggacccctgggtctgagggaggaggggctggggcctggaaccccgggtctgagggaggagaggctggggcctggaaccccgggtctgagggaggaggcgctgggggcctggactcctgggtcggatggaggagaractagggtctggacccctgggtctgagggaggaggcgctgggggcctggacccctgggtctgagggaggcagggctggggcctggatcctgggtcttacatcaggaaaacagaggaaccctgtctctgatcctgtttttgtcccctagctccactttgaccctgaggcctgcagcttccgggagctgcttcttgaggacggatacaatgtttaccagtccgaagcccayggcctcccgctgcacctgccagggaacaagtccccacaccgggaccctgcaccccgaggaccagctcgcttcctgccactaccaggcctgcccccsgcacycccggagccacccggaatcctggccccccagccccccgatgtgggctcctcggaccctctgagcatggtgggaccttcccagggccgaagccccagctaygcttcctgaagccagaggctgtttactatgacatctccwstttatttattaggttatttatcttatttatttttttatttttcttacttgagataataaagagttccagaggaggataagaatgagcatgtgtgagtgtctgagrgaagacatggcagctgttttgtctyccttggcccggacaaycccctctacacctcccctcacgtggtcckagggtcctggcttcccaytgggcctcacttttttyttttcttttcttttttttttttgagacggagtctcgctctgtsacccaggctggagtgcagtggcgcgatcttggctcactccaacctccgcctcccaggttcaagcaattctcctgcctcagccacccgagtagctgtgattacaggcgtgcgccaccacacccagctaattttgtaattttagtagagacagggtttcgccatgttggccaggatgctctccatctcttgacttcatgacctgcctgccttggcctcccaaagtgctgggattacaggcttgagtcactgtgcccagcccagcctcacttttctactctgctaaagtgtccccagggactgtggactatccctgctctctgaaaggacaagactggccgggagtggtggctcacgcctgtaatcccagcactttgggagacccaggcgggcaaatcacctgaggtcaggagttcgagaccagcctggccaacatggtgaaaccccatctctaccaaaaatacaaaaattagccaggtgtggtagcacatgcctgtaatcccagctacttgggaggctgaggcaggagaatcgcttgaatcccggaggtggaggttgcagtgagctgagatcgagccattgcactccagcctgggcgacagagcaagactcaaaaagtctcaaaataaataaataagtaaacaaataaataaaataagaccaggcaccatggcttacgcctgtaatcccagcactttgggaagctgaggcaggtggattgcctgaggtcaggagttagagcagcctggccaacacagtgaaaccccatctctactaaaaatacaaaaactagccagacgtggtggcgggcrtctgttgtcccagctactcggggggggggctgaggcagaagaatcacttgaacctgggaggtggaggttgcagggagccgagatcgtgccactgtcctccagcctgagtagtacagcaagactctgtctcaaaaaaataataagttaatttaaaaaatacaaatagccaggcgcggtggctcacgcctgtaaacccagcactttgggaggccgaggcaggtggatcacgaggtcaggagattgagactatcctggctaatacgatgaaaccccgtctctactaaaaatacaaaaacaaaattagctgggcgtggtggcgggcgcctgtagtcccagctactccggaggctgaggcagaatggcgtgaatgcgggaggcggagcttgcagtgagccgagatcgcgccactgcactccagcccaggccacagagcgagattccatctcaaaaaaataaataaataaataaataaatataaaaataaaatgaaagagcaggacttctttctacaacccctcaacttgtgtgagcgttgtgtaactatttcatagagctacctcrataacaggggagcttttacgaggtgacacagcacactcacatcctcatgggagatgtagttttctggcatcatttagcagcaggaatgagatctgttgggcctcaaatctgggacaaggactcctgggtcctggagtaggtttggggctagtgtaacacccaagttctggggaatcagtgggctggacatctggacacctggatcacaggagaactggggactgcagacttaggcatcctggtctgagaaaaaaggggctggagggtgggagtttgggttctcaggaaaaggagctgaaacctggaattcttccatctgggtccttatgaactttttaatatttatttatttatttatcttattttgttttttttctgagatggagtctcgctctgtcaccaggcccaagtgcagtggcacaatctcggctccctgcaacctccgtctcctgggttcaagcgattctcctgccttagcctcccgagtagctgggactacagacaagcgccaccacacccgtttgtttgtttgattgcttgtttgtttgttttgagacagagtttcactcttgttgccaaggctggagtgcaatggcacaatctcggctcaccacaatctccgcctcccggcttcaagtgattctcctgcctcagcctcccgagtagctgggattatgggcatgcgccaccatgcccagataattttgtatttttagtagagatggggtttctccatgttggtcaggctggtctcgaactccccacctcaggtgatccgcccgcctcagcctcccaaagtgctggggctataggcgtgagccaccacgcctggctgcttgttttttgagacagagtctcgctctgttgcccaggctggagtgcagtggcacaatcttggttcactgccacctctgtctcctgggcttaagcgattctcagctctggagtagctaggattacaggcaccaccactatgcccagctaatttttgtgtttttagtagagacrgggtttcaccatgttggtcaggctggtctcaaattcttgacctcaagtgatctgcccaccttggcctctcaaagtgctgggattacaggcgtgagatactgcacccggcgtttacttttatttatttgtttgtttgtttgtttatttttgagacagagtctctctctgccacccaggctggagtgcagtggtgcaatctcagctcactgcaacctccacctcctgtattcaagcgattctcctgtctcagcctcccaagtagctgggattacaggtgtgtgccaaccctcccggcttggacttcagctgggactccttccatgggggtccttatgtaatgagcgtcatagattccagtcccggcaagcaagttgcccggtctcgctcccctcacgcaaccgagatttccatattgttcttcaagccacttcctggtaggaaggaagctggcctgggccagccccagttgctgcagccgggtgggagttgtcatcctggacccttcattttaagtccaaagttcaagtgagagaaatatcacagtcaaaaggacctaactgtgggtggccgagggtcactggagggacttgatgcccagaaaaaatgaaagtcaccatttgtagaaagggtagttttcaactctgatcacacaagcctggctcagtcaagggaaggaaatagaatttgaaatttcacaaagctcccgagcagtggtttaggtcctgggggtgactcaggtgacacgtaagttccttgtcagaagagaccgcatactgctgtcaaggaaaggcgaggtggccagtgtggaaagaggagggagcactgggcaccatcctgacccggttcccacccgcccgccatgccaggctggagaccaggagacacagacccagagggaaggtcagagcccaacatccagagagaaggggggacagggacctgatgggggggtcagagacccagagatagggagacagagacccagagagagagggagagtcccagagagagggagacagagacccagagagagagggcracagagacccagagagagagggggacagagacccagagagagagggagacagagacccagagagagagggggacagagacccagagagagagggggacagagacccagagagagagggggacagagacccagagagggggacagagacccagggaaaaaggaagacagagactcagagagagaaggggacagagacccagagagagagggagagtcccagagagagggagacagagacccagagagaaagggggacaaagacccagagagagagggggacagagacccagagagagaggggaacagagacccagggaaaaaggaagacagagactcagagagagaaggggacagagacccagagagagagggggacagagacccagagagagagggggacagagacccagggaaaaaggaagacagagactcagagagagtaggggacagagacccagagagagagggagagtcccagagagagggagacagagacacagagagaaagggggacaaagacccagagagagggggggacagagacccagagagagagggggacagagacccagagagagagggggatagagacccagagagagagggggacagagacccagagagagggggggcagagacccagggaaaaaggaagacagagactcagagagagggacagagacccagaggaaggggggggacagagacccagagagagagggggacagagacccagagagagagggggacagagacccagagagagagggggacagagacccagagagagaggggaacagagacccacagagaggggggacagagacccagagagaggaggacagagacccagagagagaggggaacagagacccacagagagggggaacagagacccagagagaggaggacagagacccagagagagagggggacagagacccacagagagggggacagagacacagagagagagggacagagacccagagagagagggggacataggcccagagagaggggggacagaggcccagagagagggggacagagacccgggggatgacagaggcccagagagagagggggacagagacccagagagagagggggacagaggcccagagagagggagacagagacccggggagtgggggacagagacccagagagagaggggaacagaggcccagagagagggggacagagacccagagagaggacagagacctagagggaggagaagacccagggaaaagggagacagagacccagagagagaggaacagagatccacagacagagggggacagagacccagagagaggaaaggcaggcagggaagctgagaaatgtgttcaaatggggacacttcactgtacctgaggaccttgaactcccaaccctgttgtacccacttcctgtagaaggagccgctttcctcatctggacagtctggggtcccctgtctgcaaagcctgtcctaggttgctgtctcgcagggaaccacggatcctccgcagggtcaagccccccagctctggatgcttccagacctgcgtccagactcagctcccggcaggttgtacaggatgagctgcarggtgtgggcggtgagggctgccatatgcacccggagaactgcaagaccttgctcactgatattgacagaacccacactgagaagccggtctgggacgggatcactggggaatgatggggcatgatggaagcaattgaatgttgaattgggatgaatttattgacagagattccacactcaagcattggctataggggctgggagtgactctagttcgctctttggttgagtgaaatctgcatcccaaatcctttgcaaacgttggccaggtgcagcggctcacgcttgtaatcccagcactttgggaggctgaggcaggaggataacttaaggccaggaatttgagaccagcctgggcaacataacgagacaccatctctacaaaaattaaaatttcgggccaggcacggtggttcaagcctgtaatcccagcactttgtaaggccagggtgggcggatcacaaggtcaggagatggagaccatcctggtcaacatggtgaaaccccgtctctactaaaaatacaaaaattagctgggtgtggtcgcgtgtgcctgtaatcccagctacttgggaggctgaggcatgagaatcgcttgaacccaggaggcaaaggttgcagtcagccgagatcgtgccactgcactccagcctggcgacacagcgagactccgtctatttaaaaaaaaaaaagaaagaaattcaactaccctggagcctgaggtgtgaggatcacctgagcctggaagattgatggtggctgtgccacagcactacagcctgcacgacacagtgagatctgtctctaaaaaataaaaaattagaccaggcatggtggcttacacctgtaatcccagcactttgggaggctgagtggggaggattgttcgagaccaggagtttgagaccagcctgggtaacatagcgagattcccgtctctacaaaaaatagaaaaattagccaggtgtaatcccagctactcgtggggctcaggtgggaggctcacttgagcccaggaggtcaaggctgcatgaggtattacggctccactgcaccccagaacaagcaggctacagagcaagactccacctaaaaaaaatttttttttcctctgttgtgtctatttcctctcatgctctttctaatagagccttcacttatgatttttttttcttttttttttttgagatggagtctcactctgtcgcccaggctggagtgcagtggcatgatttcggctcactgcaaccgccgcctcccaggatcaagcaattctcctgcctcagcctcccaggtagctgggactacaggcgcgcaccaccacacctggctaatttttgtatttttagtagtgacggggttttgcttattgaccaggttgttcttcaactcctggcctcaggtgatccgtccacctcagcctcccaaagtgctgggattacaagcgtgagccactgtgcttggccctggctagtttaacttttacttttgtacagacagggtctcactatgttggccaggctggtcttgaactcctgggctcaagccatcctcccacctcggcctcccacagtgctgggattataggtgtgagctactgcgcctgactctttgtcttaatttccctcttcctataaggacgccagtcacataggatttagcacacaccccaacccagtatgagctcacctgaacttgattccatctacaaagaccctatttcccaggaagatcacattcagaggttccaggtagacctgaagcttccaggacactattttccctcagtgcacagctctacataaatttggtcacactcttcttcttcttcttcttcttcttctttgcagacagagtttcactcttgttgcccaggctggggtgcaatgacacaatttcggttcaccgcaacctccgctgcccaggttcaagcgattctcctgcctcagcctccggagtggctgggattacaggcatgcaccaccaagcctggctaattttgtatttttagtagagatggggtttcaccatgttggtcaggctggtctcgaactcccgacctcaggagatccgcccgcctcggcctctcaaagttttgggattacaggtgtgaaccaccacggccagcctcacactcctcttcttttcctcacatttaagtgagctgtacccttaggagaaagttgcacagttagcactagggtgggccaggatagctttctgagccttaaaaatcttaaagtttggctgagaccagcctgacgaacatggagaaaccccgtctctactaaaaatacaaaagtagcttggtgtggtggtgcatgcctataatcccagctactcgggaggctggggcagtagaatcgcttgaacctgggaggcagaggttgtggtgagccaagattgcgccactgcactccagcctgggcaacaagaggtaaactccatctcacaaaattaaaaaaaaatttcttttaagtttggccaggcacggtggctcacgcctgtaatcccagcagtttgggaggctgaggcaggtgaatcccctgaggttaggagttcaagaccaatctggcccacatggtgaaacctgcctctactaaaattaaaaaaattagctgggtgcagtggtgtgcacctgaggtcccagctactcgggaggttgaggcacaggaatctcttgaacccaggaggcagaggctgtaggcagctgagatcgtgccactgcattccaacctgggcgacagagcaagactctgtctaaaaaaaaaaaagaaaagaaaaagaaaactctctgggcatggtggtgggcacctgaggtcccagctactcaggaggctgaggaaggagaatcgcttgaacccaggaggcggaggttgcagtgagccaagatcatgccactgcacttcagcctgggcgacagagcgagcccgtctctctctctgtctatatatatatatacacacacacacaataaataaataggttggctctttgctgtttccccacagtactgtattcaatatataaccactcagcacagccacctctccaatgttcaggagcaaactcttatctccttggttcttgcccccaccattatcagaaccttccctctgttttactctctgagcgcctgccaagatcagtttgggttttgtttctctattagttttcacccgtgtggagcttcgtccttccaagagggaggttctactgagtgagcacttcccagatccctggggagccaggctatttagcatctttcagcttctccaccgcaccctatcctcacctactcactggagcccctagagatttgactactgttcttgttttcttttctttttttgggggggtgggggagggggacagggtcactgtcgcccaggctggagtgcagtggcatgattttggctcactgcaacctctgcctcccaggttcaagcaattctcctgcctcagcctcctaagtagctgggattacaggtgcccccacctcgttaattttggggggtttttgttttgcttttttttgagagagaatctcgctctgttgcccgggctggagtgcagtgggctcactggaacctctgcctcccgggttcaagagattctcatgcttcagcctcccaagtagctgggacttcaggtttgcgccaccatgcccagctaatttttgcatttttagtagagacagggtttcgccatgttggccaggctgctctccaactcctgacctcaagtgaactgcctgccttggcctcccaaagtgctgggattacaagcgtgagccactgcacctggccctggctagttcttttaacttttactttggtacagacagggtcatgttggccaggctggtcttgaactcctgggctcaagcaatcctcccacctcggcctctcaaagtgctggggttataggtgtgagctaccacgcttggctctttgtcttaatttccctcttcctataaggacaccaatcatataggacttagcgcacaccccaacccggtataacctcacctgaacttgatttcatctacaaaggccgtatttccaagtaaggacacattcagcggtaccaggtagacatgaagcttccaggacgctatttccccaatgcacacctctacacggagttagtcacactcctcttcttcttcttttttttttttttttaagacagtttctctcttgttgcccaggctggagtgcaatggcatgatttcggctcactgcaacctctgcctctcgggttcaagcaattctcctgcctcagcctcccaagtagctgggattacaggcatgtgccaccacatctggctaattttgtatttttagtagagacagggtttctccatgttggtcaggctggtctcgaactcctgacctcaggtgatacgcctgccttggcctcccacagtgctgggattacaggcgtaagccaccgcacctggcctcacactcctcttctttttctctcatttaagtgagccgtacccttaggaggaagttgcacagttgacattagggtgggccaggatagctttctgagccttaaaaatcttaaaagttttgccggtcgcagtggctcacgcctgtaatcccagcactttgggaggccaaggtgagcgaatcccctgaggtcaggagttccagaccagtctgcccaacaaggtgaaaccctgtctctactaaaattacaaacattagctgggcgtggtggtgcacacctgcggtcccagttacttgggaggttgaggcacaggaatctcttatttattttttattttttattttttttgagatggagtctcgctctgtcgcccaggctggagtgcagtggagcgatctcggctcactgcaagctccacttcccgcgttcacgccattcttctgcctcagcctcccgggtagctgggactacagtcacccaccaccacgcccagctaattttgtttttgtatttttagtagagacggggtttcatcatgttagccaggatggtctcgttctcctgacttcatgatccgcctgcctcggcctcccaaagtgctgaggcacaggaatctcttgaacccaggaggcagaggctgcagtgagctgagatcacgccactgcactccaacctgggcaacagagcaagactccatctcaaaacaaaacaaaaaaactatctgggcatggtggtgggcacctgtaatcccagctactcgggaggctgaggcaggagaatcgcttgaacccaggaggcggaggttgcagtgagccaagatcacaccactgcactccagcctgggtgacagagcgagcccctgtctcaaaaaattaaatatataaataacaaataaataaataggctgactctttgctgtttccccacagtattgtatgcaatatataaccactcagcacagccacctctccaacgttcaggagcaaactctatctccttggttcttgcccccaccattatcagaaccttccctctgctttactctctgagcgcctgccaagatcagtttgggttttgtttctctattagttttcaccagtgtggagcttcgtccttccaagagggaggttctactgagtgagcacttcccagatccctggggagccaggctatttagcatctttcagcttctccaccacaccctatcctcacctactcactggagcccctagagatttgactactgttcttgttttcttttctttttttttcggaggggtggagggggacagggtcactgtcgcccaggctggagtgcagtggcacaatctcagctctctgcaacctctgcctcccaggttcaagcaattctcctgcctcagcctcctaagtggctcagattacaggtgcctccacctggctaattttttggaggttttttgtttttgtttttgttttttttgttttttttttttgtttttttttgagagaaagaatctcgctctgttgcccgggctggagtgcagtgggctcactggaacctccgcctcccgggttcaagagattctcgtgcttcagcctcccaagtagctgggacttcaggtttgcgctaccatgcccggctaatttttgtatttttagtagagac

SEQ ID NO: 96312 - DNA, 12608 bp, Homo sapiens
tctcctcctatgtcctggtgactgccaatctacttgctatctctgtgaatttacctattctggacatttcacataaatggaatcatatgatatgtggtctttgtgactagcttttctcacatagcataatgttttcaaggctcatccatgttgtgagatgtaacagaacttcatttctttttattgccaaataatgcccattgtgtggatatgacacattttgtttatccattcattagtaaatggaaatttaaggttttttttcccacattttggctgttaagaataatgtggttatggactttttaatttgtatgtgtgtgtgtacttgtatatttatttcctcagaggtatatacctaggagtagacttgctgggtcacacggtaactctatgtttaactttttaaggaactgccagatgctttttgaagcaccattttataatcccacttgccaatatgagacttcaaatttctccacagcctagaaaacacttgttattgtctatctttttgatcatagccattctagtgagtgtgaagtggtatcattgtagagctgatttgcatttccttcttgactaatgatgttcaacatttttttcatgtgattataggccatttgtatttcttctttgtgagctaccattttaatctccattttagaaatgaggaaacaatggcactgagaggaaacaagatttattagggtacctgcatgaggtaatagcccatcagtattggaatttaagttctctcacttagctatgcaaaagcatagacattgagtacctagtaataaaataagctataagtgatttgcatttagtcttaacttctttatttacaaatgacagaaacctagctctaactgtggcttaatgaaagtaagaagattttggcttgcctatctataaagttaagagctttttgcctccagaatgattggatgcagcttctcaaagatggcatcagaaatatgtctctatcatctcttagttttctttccattgggttggtctcacgcataggcatggtctcactttgtagtggttagatggccgctagacgctcaaagtttttatcttaccagctcagaatgccagcaagattttttttaaattcttccctttcacaatagttccttcagtagttctcaaatcttagcattgagtagtactggactgacttgaattaatgattggctccctgaatcattcatcggtgaaatacattgattggtcatttgctcattctcagtggggagtgaagttagctccatctacaccatctggagtcagaactggagaaggggattccccagaggaaagtgaggatgatggtaccagcacaatgaggaatgcatgctagcacaagtgaaactcatagatgtccattgtgctatgcagttttttccttgggccttgatcatttatcatttactggtttcctgtctgtaaatttagaaaagatacaggctctctgaaaagtaatttctggtctcttacaagtgaagggttaatcaaccaatccacataattttctccagtactgagagatcatttgttttaataaatgcaaataaggtttcttatagttaaaggtaattggcttttcattgtaattcttgatgctggtcattttgtgtctgagttgttcctaattgctttggttcagagtctgagaaatgaaatagccccttgactataactgtaactacaattataacaatttatttatttaaatcagcaatccctgcaaagtcatttacagtttgtttatttcagtatgttttacaaggtgcaacaaaagcagcctcatcacatagcaaatctttcttacaggattaaaagttaatgggtaaggtaagtctggcataggcattaaagtggaagcattgtttcttcttgactggtcaactttagagacaacttttcccattcgaagttatctatcctctaaaatatacagagattgaggccaggtgggatggctcacccctgtaatcccaggactttgggaggccaagatgagtggattgcttgagctcagaagtttgagaccttggtaacatggcgggatgccggtggtgccatgcctgtggtcccagcttcttgggggctgaggtgggaggaccttctgagcctgggtggcaaaggttgcagtaagctgtgttggtatcactgcactccagcctgcactcctgcacaaagcaagaccctgtctcaaaacaataaataaattaaaatatagagagactgagatgcagcagcagttgtatgttgttctctggcttttgaataataaattgtatgtgtaccttcatatgataggatcttcagctctcatgccaactctatttcttaatagaaataaacaagatggacacgatacatctaggataccatgttaaaatggtttctaagactgcattcagccttagaagaaaagaacgttgtgatcacttaatgatgtctgtcacaggcccaggagagtgaaacaatggcgcttgcattgtatattttccatccctgcttacatcttgaaaggaagtcccaatgctgaaagtttgtaggattgggacagttgctttgatacttcagaccaacagacggattcttctttcattattcagataaagtgttttatgttgcctgtccacctaagtgttttaatcctcaagattaccttaactatggagacttgacttagacttaatattttgatccagaaatgcatcaagtatagaataaaaacttctatcctagcaagactaggaatacaaaatatttactcacagtatacatgtactgtctgctgggtgtgcaacattctgctaagggaatgtgaatgtggcaggagaccaagggtcctcggcattagaaatctatagtccaggtgtaattagagaaagataaagggctcaccaatggaccacagagcatacatactaaaggctaaaagagtaaaacagtttggtaatgaggaatgaaggatagagtgatctagggaaaattatatggagaaatagtttcttcagcaacatctgaaaggaagtgatgggcatcggttggtggaaaggatggttggttgaggtgggtgtagtggtgaaaaagactgaaagctactgaccaaggaatgacataacccagaggtctcgatctgtcagctcactggcctaaaaacaaaacaaaacaaaacaaaacaaaaaccacacaaataaaaaaccagatgtgtgctacacaggaatatagaaataaaatatattggaacaataaaagatttcaagcaaaaattagaaaatactagaaaatctggaagtttcacataaaatgcaggttttcttacttttctgtaataactgaaagatctgacaacattctgcctgaattcctagttggcaagaaatggctgagagggagtagcgattgccatgatacacgagtggtttgtcgcagtcttcacctctccctgcagtctcccaacactgaagtcaaaggttaattgctctctagcatcatgcttgcactgttgagactattcataaaaacttgtccagcaaagtttgaaagatgaaaaatacattttcagaagtctttgttaaaaaaagatgggggtgagataggatggggaaatagtgcatttcatatgcaatcaggccaggcgtggtggctcacgcctgtaatcccagcactttgggatgccgaggtgggccgatcacctgaggtcaggagtttgagacctggccaacatggcaaaaccccgcctctactaaaaatacaaaagaaattagccaggtgtggtagctcgcatctgtagtcccagctactccggagactgaggcaggagaatcacttgaacccggaaggtggagattgcagtgagccgagattgtgccgctgcactccagcctgggtgacagagcgagactttgtcaaaaaaaaaaaaaaaaaaaaaagcagtctttgcagacgctgccactgccgggagcaccctactatcagccatggtcaaccccaccgtgtacttccacattgccattgacacggagcccttgggccgcgtctccttcgagctgtttgcagacgaggttccaaagacagcagaaaactttcgtgctctgagcgctggaaagaaaggatttgggtgtgagggttcctgctttcacagaattattacagggtttatatgtcagggtggtgacttcacatgccatatggcactggtggcaagtccatctacaggtagaaatttgatgaggagaacttcatcctgaagcatagaggtactggcatcttgcccatggcaaatgctggacccaacacaaatggttcccagtttttcatgtgccctgccaagactcagtggttggatggcaagcatgtggtctttggcatggtgaaggcatgaatatcgtggaggccatggaacactttgggtccaggaatgataaggccagcaagaagatcaccattgctgactgtggacagctctactaagtttgacttgtgttttctcttaaccaccagaccattccttctgtagctcaggagactacccctccaccccatttgctcgcagtatcctagaatctttgtattgtcgctgcaattccctttgggttccatgttttccttgttccctagctggattgcagagttaagtttatgattatgaaataaaaattaaataacaacaaaaaaatgcaatcaagtgtaattgttacagtaggtagctagtcagctagtcagatatgagttggggcagtaaagggacaccccacatcccaccaggaatgtcaggcgaccatcaggtgatggtcaggcagttgttaagatggttctctcaaataataattggttgcagctggcaccagggaacaatagtctcccaacagacagaagaaacctaaaaccggtgatcagcagcttcctaataagatctcaggaggtgggtgcgtgggatcaagtatgtgcactaagaggcaaaatggtggagtttaactggtgtatgaccttatagggacgcttgataggtaagggaagcatgcctcaagtgggtatgcataccactgcagtaaacacactgtgcatgcaggccacccagcacgtgaacagcccactccatgggaagactcaggggagaagggaggcaagaccctggaagtatgccaatatatgaaaccccaagtcaaaaggtcaaaccatgcactcgatctctcaagtcactcacttggccctcctccaagtgtactttacttcctttcattccagctctaaagctttctaataaactttcactcctgctctaaaacttgctttggtgtctccttctgccttatgccccttggttgaactctttcttctgaagaggtaagaactgaggttgctgcagacccatacggattcactgctggtaacattctttgatgacgcatgactcagatatgttcggccagtaacgtactgctgtcttatttttattttttatttttatttatttatttatttttgagacagagtctcgctctatcacccaggctggagtgtagtggcgagaccctggctcactgcaaccttcgcctgccaagttcaagcaattctcctgcctcagcctcgcaagtagctgggattacgggcgcgtgccaccacgctgggctaatttttttttttttttttttttgtatttttattagagactgggtttcactgtgttagcctggatggtctctatctcctgacctcgtgatccacctgcctcagcctcccaaagtgctaggattacaggcgtgagccactgcacttggcctgtcttatttttcttaacactagacttctctgttcatttatttacagtacctcccagcacaaaaggcatttgagtttgcgtttttcctaggattagcaaaaagtgccaggtaggcgaaggcagtagggtggtgatggcggcagtggctctggaggccgcagtgcgagtcctggcctctgctccagccccactgtggtgacgctcgctgagctgctgttgctccagaacactctcctgaccatggtcttgggctatttcatcagcatccacgcacatgctgaagaatgcttaagtgagtcacctcaggcaccaagatgggcctcatcttcgaaggtggcttcctgggcatcaacgtggagattacaggacctaagaataaaaggatttataaaggagacaaagaatccagtgggaaatacacattttctgctcacatggatggaacaaatacattttgttttagtgaccgagtgtccaccatgactccaaagatagtgatattcaccattgatattggggaggctacaaaargagaagacatggaaacagaagctcaccagaacaaactagaagaaatgatcagtgagctggctgtggccatgacagctgtacagcacaaagaggaatacacgaaaatctgggagaggatacacagagccattagtgacaacacaaacagcccagtggtccttcggtgcttctttgaagctcttgttctaattgccatgacattgggacacatctactacctgaagagattttttgaagtccagagggttgtttcaaaagcctcttcctgatgattccaaactcatagtttactgtttaccaaacaccttggtgataacgtcataggccattaatttctatgttttaattttctgaactatacagtcacagcttatgtttctttgtgattaatagaaattggaagaaaacacctttttaggaaagtcatagtgaaaatttgacaattgattggcataatttcctaattaaatgctgcctccattatataggtccttccagaaattaaacactggaattgaaatataggaatatatatatatatatttttaaaatcttcttttccttttgttttgataataaaatgcagttagttcaggaaatcagcacaaagcctgatagtactttactgaaatgactgcattctgtgtattccctcattctgtggtttaagctattaaggattcattttgttgagtccttatgagaaacaatagtatgaatcctgacattttctatgcatgctcatggcagagctctctggcttgggtgtatgctgccaggctgggcacttttatactttgttttcaagttttgcttttaaaggtaagacttgccccagcacctattttcccccatacattttacattgaaccttaggactcagtcacctccacttaaaattgatgacacaagccgcatacaaccattttttgtctttattttttgcgtaactttctaaggagtctctgttaaagccagttctgtggttgtcccagtgaatggtggctcttttcatttccacactggcgcatccactttctccactcttggaatgtaggaagtatgcattcatgtaattggaaaaatctggatttctgaagccagaaggttaaagcctgttaaacttcattgcagtgatatacagccgctattttatttttgatccgtggccttcgggccactgtttaaccagggcactgaacatcagtgtcagcactagggtttttgtttttgtttctcttgggtctttcttttttggcatatgtgaattttgttttgtgtaaaacgaaatgactttctcttgctctctgataatgagtttaaaattaaaggagcatctggttttgatgtggggatgatccaggattatgttgtgactgatgtatattagttatttgtacatttctggagatctttgcaaggggaaaactacaagtaatgagttttatataagtaatttaaatttgttacaggttttcaggtttaggataagcaaccttgggtgagaacacctatgacactttgttgatgaggtgattgtttcaccttaggacaactgttgcatgccaattgtgtgtgtgtgtgtgtgtgtgtgtgtgtatgtgtgtgtgaaaacacttcaaaattgatttaaaagatgtaaattttaaattggtcaagtatctaatatgccccagatttagtaaataaacaataaacaattttttttaaaaaaacgacgcaaaacaaaataaaacaaaaacaaacaaactgcgaggtagaatttaatgggaagagcaaagagggtagtagaaaatttcaatctggctggaatacaaacgtctgtttttatctcattttacctgcaaaaacttgaaggaaaggcttaaatggtaaactgaagaatttagttttgacctgtctgaaagggtgggtattgagggtcagaagtattgttaacagaaagattaatgagcattaaaagaaaggagttaatgtggatctgccagaaatgaagtaaccagactagttttccttttgacagggttattggagtagaagataaagttgagtttgagaaatagtgtatttcagcaatgtgtatgtatctcatggtatttttgtggtcaacactgagaaatgtgacatagttgatagcacaaccacgaatttagagctggtagaagaatttttacattatgtcctgcattttaaagttttgccacaatgtttaagctctgttatgaaaatcaaaataggcattttccttcctatttggttatggacatactatgctccttttattttatttatttatttttgagacggagtctcgccctgtcgcccaggctggagtgcggtggcgtgatctcggctcactgcaagctctgcctcccgggttcacgccattctcctgcctcagcctcccgattagctgggaccgcaggcacccgccaccatgcccagctaattttttgtattttttagtagagatggggtttcaccatgttagccaggatggtctctatctcctgaccttgtgatccgcccgcctcggcctccgaaagtgctgggatcacaggcgtgagccacagtgcccagcctatgctccttttaaattactgttcaatgaagcaaatgattttatccaagttttaattgataaaatacatttggataatattttagtaataggacaaatgctctttgatcttttggatgaactttactttatagagtcacatagtaagttatctttgctttcctataatggggctcctgcgtcattaacattgtatactgatatagttttctgaccatacaaactctaccacagcatcacagtggagtcactatctgcttctattgctgttagctggattagtcttatcataattatgtctttgccatagctgctctggcttccctatctctttcttgtttatctcagttaaaatatataaaagtgtattaacatttcgatacactgaattctctggagcgttgtgccctatattaaattttagtttcctaactatagagaaagagtggagggacttggaacatttctgatactgagcttttattatattgtgagcttttattacattctgagctttaaggatccgtctttctcggtatgggtagaagtgggcaaactgaaagggaaattgttttctgcattctctataatggtttttatttaagaatgataaagcaatactcactaagcccagatcagttccacaacagacagtactgaaaatcccagtggaaatgcagtgatgtttctgtattgggaggaaataaacttcaaaatgttatttggtgtataaagttattataaatatattgaagacagcattgcctagtgtaaaaagactcaacttggagttaggttagccatgcttaacccttatgtgtctatttgcttctattctgaaaccatatagagacactattaggaggacaaacatagactacagggttcaaggtctcactctacctcttaagcaggtcaattagcactttacacatccttttcctcttatataaaatgggaataataatagtacttacttcatatgccttggtttaaataaattagttgtcatcttttaggtacctagagagctatataatgtaagactcaatacatgtcagctattattattgtatttatcattaaggacacagctagtatagggaaagagaattaaacttgactgacttttctgccataaagttatttgaatttgggaacatcaactgcttatctcgtctacattttctccactgaaaactgaccagactcagcccactacccatctgggaaaacactcccaagatcaagttgctctatagttttagtcttttcaaagttattttttacttgaattttgccctatagacaaacacacgaagggtagttttgaaaattgatgccatctattatattattgtttaatgattcctaattttcagattggaagtaattgacttcatatctcgatttctaatctggttctaattgacttattccatcaatcatctagtcactaatacaatttttggagtgttgacaaaaccctttcagcgatcaaataaatcttgattgatatcttgagtgataagatttcctaccctttgttgagttagaaggggagaccaatcctttgttgtcagcaacttgatcagaactgggaatgtcatctaccagtgctagattttggcttgtttatttttgtatattttgcatacgtgcttagctactgtttgttagaatttgctatccgacattacttgacctccactttccagtgccattccttccctcaatttttttaaatcggttttcctgcttgttctatgacctaaggaaaatttttttacatcagtaagccttaatatcatcatctgtaaaatgaagataatgattctacctatctcgtggtgttggcaggaagatcatgtaagttaaagcatgtgtagtgcttaaaagttaatgaatgttaaatgcaagtgtagtgtctggcacatactaagtacaaaatatctgctagttactattattattagcagcagtagcaccagtggtaataatggtggtactgcttcctgatatagcaaaatactgagcatattctgaaaatagaaaaaaagaacaccaattgcaaaagtttttataaaggctttcaggcagtttgtcacatacataggttctgtgttttggtacctgttaccttaatttgtatagacaaaaattacctgaaactatgtcttggagtgatgcaaaagatgccatagacaactggatatccacacacaaaagaataaagttggaccccctacctcacactgtatacaaaaattaccttaaagtatcaaagtcctaaatggaaaagctaaaactataacattattagacaaaaccatagggataaatcttcatgaccttgtgttaggcaatggtttcttagctacggtgccaaaagcacagtaatgcaagaaaaaaatggataaattggacatcctaaaaattaaaacttttatgctttaaaggacatgattgaaataataaaactaacccacaaaatggaagaagtgttttgcaaatcatatatctgataagaaacttggagatagaatatgaatataaaaagaattcttacaaatcaataataaaaagacaaatagcccagttaaaatggggcaaataggtctgaatagacatttctccaaagaagatatgcaaatggctaataagcccatgaaaagatgctcaacatcattagccatcagggaagtgcaaatcaaaaccattacgagataccacatcacacccactaagacggttattagcaaaaagacagataagtttgggcgcgttggctcatgcctgtaatcccagcactttgggaggctgaggcgggaagatcacttgaggccaggagtttgagaccagcctggccaacatggtgaaaccccatctcaactaaaatgacaaaaattagccaggcatggtggggcgtgcctgtaatcccagctactcatgaggctaaggcagcagaactgcttgaacctgggaggtggtggttgcagtgagtcaagattgcatcactgcactccagcctgggtgacaggctgtctcaaaaaaaaaaaaaacaaaaaaaaaaaacagacagttaatagtaactattagcaaggatgtggagaaattagaactctgttacactgccattggtaagtaaatggtgcagctactttggaaaacagtttgaaaatgtcctaaaagttaaacatatgtatgacccagaaattccacacttaggtagctattcaaggggaatgaaatcatatgtgcataaaaaaattgtatgcaaatgttcatagtagcactattcatagtagccaaaaagtagaaacaatacaaagttccatttactgatgaatggataaatgaaatgtggtatatccatgcaatgaaatattattcagcaataaaaataaatgtagtgctgatacatgttacatcatggaggaaccttgaaaacattttggtaagtgaaagaagccactcacaaaagaccacatatcatatgaccaattgtgaagtgtcaaaaataggtaaatccatagcggcagaaactctagtggttgcctagctgggtggttgggagaaaatgggtagtgactgtaaatggatatagggtttctttgtggggtgatgaaaatgtcctaaaattgattgtggtcgtggttgcacgactctatgaatataaatcttgaa

SEQ ID NO: 96313 - DNA, 29238 bp, Homo sapiens
gggggaaaggcaaagatgacaacagggacgccagttaagaggccaagtagtccacgagagagaagtgtagctttggctagggtgagagtagtgaagatggagaggaatggacagatttggatgttttgtagatagagggaaggacctgctgataatggggaaggagttgaaagagaactcaagaataagtttttgacctgagcaaccaggtgttatgatcccgtttactgagttgtgtgtgcagcgtcttaagttggatgaataaacaggaaaataaggcatttgcataatttgtcagcatatgctatggtggaggttttcttttcttccacagctcatgggccgaatcaccactaaccctgacgtttgatccagctctccctaatggtactccgtgcagcagatggagatgaaacactcattttctccttaaatgccacataggtcgtctctagaaggacctagaagagtgacatctgtctctatttttggaatgcttacatgtccacaaaattcaggaggtttcaaattccaccaaatccaacagccttgcagaaatgtgcaacagagtatcagtgtcactacatagctgggagaaggaagggtttgattgctggtctatattgacttttctgtccaaacattggtctcttgggggaaaggtttttttttttttgttattatacaatttatttttcctctgccacagaaattgacacaagataattcatatactccaaggatccagatataatgcatatcacattactgcaatagtcttcagtttcttttttcttttcttctttttttaaataagtactggagaaatttaattgagtcatatttggcttcttgttggggttttctattgcccagtgatagaagaaactgtaactatacaggactaaattcccagataatatccactgatgttctctactggccagcttagaagaatcctagggctgaatgtttgaacagtttgcacatattctaactccagctgaatagaatgatgatgattgggttcttgtgtttacaataaatacaagtagccaagcgtggtggtttgcacctataatcccagctactccagaagctgaggtgggaggatcacttgagtccagcagttcaagaccagcctggacaacacagtgagacccctgtctctaataaataaaataaataaataatacagttcttccttttaccctttacaaatggttctgggtctaagattaaagcacaagaacaaccagtattgagttaaaagaatttaaaacatttttatcatactaatggctgcacatcagtacagagaatagtcacctatcccaaaccttcctaccatccagaatgggaggtggggttggcaggggccaaactgtttacagatttcccattaatccctctttttatccctatagctcttttcttttctttctttccttttttttttttttttgtcagagatagggtctcactatgttgtccacgctggatttcaacttctggccttaagtgatcctcccacctcagcctcccaagtagctgggactacaggcccacaccactgtgcctggctggtgtttcagagtccccagtctctgaggtctgcaggacagatcagtccccttctctctgtatctcagtctagattttagcagaggcaaaccctaagggtttgggagaggtgatggagtgaagcagagagaatacagaactatgttctagttcctgccctgctcctgacttgaccttgggaaagccatgtcacctctctgggccttttccccccatctggcctaacaagactcctggcctcggtgacagaagcgtcccatcctctcacccacccctaagcagagcagctgggacttttcagaaatgagccacaagactccttatggcagaaagccttggggacccagaagaacatagaaggcttccaggagggagatatgctgtgcagcctgaagtcataaacagccattctgcagctgttaaagggccatgaacatggcatgctctattgtgatggatggcaggccttggccagaagaggctgaatccagatgggaccacgggcaaagctgtggaagggactgtgtgatcactcttctctttaaggagtatcttcagcctgacaataaacacactgtctccctaggggttaggtttcgtgggccaagagcatggtggacgcaccacacatgtacctggggtttctggggttagagaagacacaagaaactaaatccagagttagcagcttgcgcccgggctcaaatctcagtttgtttcatggattggttccctttgagctgactcagaaatgcgattattgattagtgcagaaagtttattagagagcctttgagaatcaagtcctatggggaaagggaagcaggggtgggaagagggagaagtcagtctgtgctgcagtcatgggaggctttggcagacccccaggggagttctgaaactaggatagctgctgagttggcctgagttggagtaaatgggccaagtcttttcatccctgcactgacctgccatggagcttggagggcagctctctttagacaaagacaattcctcaagagggctgacagctgagatctgtcaacctaccacccacccggtaggcggggaatagtccttcagtcctgaccgaggcagtgtagtgcagcatttgcaatagtgcccacatggtgctgtgcctctcatttgctacttaagtttggagagcagcactttcaggaccctggggaatcttttcctgtgggaaacatatagaggagggttagtgggaactacagctcctgccgccgctacagctcatctagaggcataacgaacatacccttcagtcccctcttctatccatcctagaaacctcttcccttctgccagcacctcagatgatctaggtggcctgcgtgatggggtggtctagacctccatccttagagagcctgagcacctagttgctgtgcacttctcaggcagtggttgctgcatttgtccatttactgtccaaatagggcaaaggagtactaagagacacctaaatagatcacgtgggtgcccaatgttcctccctgccctgatgtgaagtctcagcctgattccttcccggtaattgaatactcttgtctgctttctccccctggtataccatcccatttactgcctgtaaaaaattagccatcttagagtttccctctgccagaggctagctatgctcctcctgtaccagggatgggcacctcattattacctgggtattaggtgatccatcctagcatctactctttggaagaaggaataaagcagggtccgggcgtggtggctcatgcctgtaatcccagcactttgggaggctgaggcgggcagattacctgaggtcaggagtttgagaccagcctggtcaacatggtgaaacccctgtctgtactaaaaatacaaaaattagctgggcatggtggtgggtgcctgtaatcccagctactcaggaggctgaggcacgagaattgcttgaacctgggcagtggaggttgcagtaagccgagatcactccactgcactccatcctaggcaacagagtgagactctctctgaaaaaaaaaaaaaaaaaaaaggaatgaagcaggacagggcagagggaaaagtaaggctgcagtggaccacgtggggagttctgaacctgggatggccctgcattgaccagtcaccagatgctagttaatctaggaaggtgagatcttgggcaaggcgttctttccagccagtagtagtagtgagggtgggaagtgtaagtctttcagccctgaagggggatctgggcagcacagcacccaggacagtttgtatcctgcagttccaccaatcagtgtgaccttggcttacttggcttggtggagtgtagagacctccgctttaaagacactttttagcctggggtggagggaagactaaggggaggccaggcactgatatgctccatcacagaaccatatatgctgatgggctctattcccacaaactcttacccttcccctgctggtaggaagatggaggaaaaagatgtattttatgatagaattaagttggtatctatgtagacccctgccagactgtttggaagaggaaaggtgacctgtcacaagaagtcacccacaggagacttgaggtggagaatagccctttgtactggtctctacgacacaggttttatctaatgagaaatctgtcctggcgctcacgcctgtaatcccagcactttgggaggccaaggcgggtggatcaccctgagctcaggagttggagaccagtctggccaacatggcaaaaccctgtctctactaaaaatacaaaaattagctgggcgtggtgacacaggcttgtggtcccagctactctggtggctgaggtggaaggatcgcttgggcctggaaggcggaggttgcagtgagctgagattttgtcactgcactccagcctgggtgacagaatgagaccccatctcaaaaaaaaaaaaaaaaaaaaggaacctaaagaggaatctgccctggcttattgtctgtgtagagccacagaaacaacagaataagcttggacataaccagatctaccatggaaatctttgcacagtgcctgacacctaataggtggttaatgactgtttgttgaagggatggggcaaggtgcttagcctctcagtttcatcagaccggggataacaccagggcctacctcattaggttttctctttcttctagaatttactaactcatttattcatttttattttttgagacaggatcttgctccatcacccaggctggaaggtggtgactcaatcatagctcactgcagccttgaatcctgggctcaagtgatcctcccatctcagcctcctgagtagctaggactacagatgtgcaccaccatgcccagctaatttttaaattttttttatagagaaagggtctcactatgttgcccaggctgatctcaaactcctgggctcaagcagtcctcctgcctcagtctcctgagtacctaggattacaggtgttagacaccacacctggcctagaatttatttttaataatttatattttcctaaaattgtccacttcatctgttttttaagtacaggtttcaagaggatagagcctgtgtttctgtgtttgtcttgcttactgttgtgtccccagtatcagtaaatgacagaacagctccctgtaaatacttgttgtatgagtgaatgtgtgtgggaggaagaattatcttggaaaaaagaaggaagcattaatagtgcctctcctaatagtgactcatttttttttaggccaccctggggccttttcttattcaaaacattcatgaaaaaaagtgcagttccaaagcattggagctactgatgtaacaatttttttaaaataccattattagaagtgcagcgggggattctctgatcttctaggtattctgtgatctcctgtgatcttctggctgtgatcttcctctgcagaccacctcacatctttgagacaccctcctctgtgccttctccccctccctatttcttaggttcaccaagaatgaatgaagaagccaagcgcggtggctcatgcctgtaatcccagcactttgggaggctgaggcgggcagatcgcttgagcccatagtgcaacagttgtgttgagcctgagcaacatagtgagacccccaccccctgcccgtctcttaaaaaaagaaaaagaaaagaaggaatgaagaaaccaccgtgggtcaggcacggtgctaacctctgcagaagtttccatacagtacaatggtgtgcaatgcccacgccacgttttgcagggtccacgggaagccttgcggcgacctcactgccgcccaatttctgggcagtggcggcgcagcgccccctggcggccatcccgagggcagtgcccgcgggcaaggttcgaaactgttggcattgggactgactccagcctctgctccgggaggccctcccgggctgcctgacctcccrggaccatgcagaaggcctcccacaaaaacaaaaaaggtaactggggagaaggaagcgggtgaagaagccctggggaccaagccttcgtcaatgttcctcctctgtaaaatggcaacggtgcactcttggcctgggagataacctctctccatcgttgttgttatcatcatcatcattatcatcatcatcatcatcatcatcatcatcatcatcatcatcatcatttgagaaggagtcttgctttgtcccccaggctggagtgcagtggcgcgatctcagctsactgcaacctctgcctcccaggctcaagtgattcctctgccttagcctcccgagtagctgggattacaggtgcctgccaccatgcccagctaattttttatttttagtagagatgggatttcaccatgttggccaggctggtctcaaactcctgacctcaagtgatccgcccgccttggccatcgttatttttatcaaggtataatttccatgcagtaagatccccccttttaaaagtacagctaccgttttgacaagctatacccacgttgaaccaccccctccatcaagatagggaacagttccaccactccctaaaattactttgcaatgcccagttgcagccaaaccccaccccactgcagctcctcacacccccatctgttttttacagcgtttttttttttttgccttttccatggagaacatcataaaaatgaaatcacatagtaaggagcctttaaaaaattataccaatgtaaatagggactttggccctttcatttttattaaaagggcacataaatcttaaaatagcatatgggtcactgtattttatttttagagacagagtcttgttctgtcgctcaggctggagtgcagtggtatgctcctggctcactgcagcctccaattcttgggctcaagcaatcctcctgcatcagcctcccatagctgggactgtaggcatgcaccaccacattcagctaattttttttttttttttgagacagagtcttgctctgtgacccaggctagagtgcagcggcatgatcttggcttactgcaacccccgccttccaggcgggttcaagcgattcttgcccctcagcctccagagtagcttggattacaggcgtgaaccaccacgcctggctgatytttgtgttttcagtagcaacggtgtttcaccatgctggccaggctggtctcgaactcctgaccccaagtgatccgcccaccctcrgcctcccaaagtgctgggattacaggtgtgagccaccatgcccagcctaaatagaagagatgaggtgtcactatgttgcccaggctctaatcactttatacttctgctagcccccaggtgggcttactgaaggatgcagactcctgcactgagcaattcttgttctttatggcttttttccgcacagcatcaggatttgataagacttgaggttggcaaagaggctgaactaggcaggcaggtgccagacagccttaggctttttcactgcagggctgttgtcatttggactgcttgtccttgggaaggttgacattgctgtctgactagccttgtagcaaaacctgtaagtctttcatattttagtctggtgcttggggtctggctctccgaggaccatagtgctgcctcctccacctggttgtccccaaacacagcagctcactcttttctgagctcacccttttccagggaggaagcattgaagatctcactttcaacagcagtaggatcatctttgtcagtaccttcgggttccagggtccctgccactgggccctagcgagcactttcctcaggtttcatgtctaatagttcatcctgagcatgcactgtgtgaagagcctttgcctaaaacacataaaataccttttccatcttcagtgttttccttgtcgtggttttcatcctctaatgaaattaattgactcagctcctgcactgttacatctgtgctttcctgctgggtgagcttcttttcttctttctcaactagttttttcagagggttttgtaagtgctttaaagtagtgacttcatatggctgataacctgtgaagctctcatggatggctgccatagtgtgagaagtcttctctccaaaatgaagcagagtggtctggtatgttgctagcatttgagacaggagattgcatgtatttacttgctccaagaaaatctacatccaacttcactttgtcaaggtttttttctctctctttttttttttttttttttttttttgagatggagtcttgctctgtcacccaggcttgtagctgggattacaggcatgcaccaacatgcccagataatttttttttgtttttgagacagagtctcgccctgtcacccaggctggagtacaatggcgccatctcagctcactgcaacctctgcctcctgggttcaagcgattctcgtgcctcagcctcccaagtagctgggattacaggcccgcgccaccatgcccagctaattttttgtaacttagagacaggtttcgccatgttggccaggctggtctcgaactcctgatctcgtgatctacccgccttggcctcctaaagtgctgggattacaggcgtgagctaccgtgccttgcacaaagttttttttgtttttttttcaagatgtacttgtgtttcttgccttcccgaacttctgcatttgcttatagaggtctggatcaaactcctgagacatgtccttcttctgtaaggagccttttgagtctggcttcttttacttaaccctgctgacttttaaaagtgggctcctggtagcttaccttataagcatattgaatttacaaactgagataggaaccactggaccttgcccaagatgtgacttctctgtttgctcaggaaccagaggctcaggcagggcgtatcctgcccccagttgctcccagaaccctgaaaggtctctgaagatggtatcttgtttatattatgctattttattttcccaaacagagagcatctgtggtttgggggaaggtgaggttggagatgggcaaggacatttgctttagaggaaagggccatgaacccctccagctccccacagccagaggtagggagctgggggagcctctccctcagcagtggccctgaaaacaccacagtcacatggacttggcaagcttgtgtgtcacctgtccttatggaaaggagttgtgtgtgaaatgctggaaaagtgtgctgaaaacagatctccccaggagcttcctgtgtaccgaaaaggagtttcctagcaacttcctcttgggaaattaacttgttgttttgaatgtccttttagtccctgaaatttttcttgtgagatttggttctgtagaaaacatatttcaacctctcccactaccccttgtctccaaggccttcggattttcccccatgtgctttttggatccatccactgctcatttccgctgtcactgccatgacatgtgccaggaccctgtcattttcatgtcatttcatttcatctaaccatgtccagctttactcacttcggagccttttcactaaggaagtctgagaagcagcctctgtctggttggtcctcgctcctcctgcctccccctcctctgacagggactgttccttcctttctcagaccttaacacaatttgctccggatccacctttctttgcctaaatatttcctattggtccttttggccttaattcaaattttagccctgctggaagcttgacccgccatccccagatgagactttggccctctgttactcattctcagagccctccgtccttttctttcatagcatgagttacagtttgttatccaacatatatttacatgactgattgatatctgtcccctccactaggctgtaaaattcatgaggacaagaaacacatgtgggccaggcacggtggctcacacctgtaatgccagcactttgggaggctgaggtgggaggattgcttgagtccaggagttcaagactagcctggccaatatagtgagaccctgtctctacaaaaacaataaaaattagccgtgtatagtagcacatgccagtagtcccagctacttaggaggctgaggtgggaggagcccttgagcccaggagatcgaggctgcagtgagccctgataatgctgctgcactccagcctgggcaacagagtgagacattgtctgttaaaaccaaaaaacccaacacatctgttttgctcaccatggtaaacccagggcctagcacactgtatcaataaatatttgttaagtgaacagataatactaactaatattgattaagcactcacaatatgccagactctgcaaaagccctttaatgcacccatttaattttcagaagagctctccaaggtgaacatttttatcctcattttactgacaaggaatctgaggaacagggattaaataactgtcccagggatctggcttcagaaccccagtaggtatggccatgcttctgtcttggtgaaggactgaaataagttcccctcttttggttagaaagaggagtcagcaacaaggtcaaaacatctgtacacaacttgagcaaaacacagcagaccaaactcactgtgggtagcctgggattaggcctcatcatcatccagcatggaccctacctccagatcacccacctcatcaggaagggggctgcagccaacgacgggaaactccagccaggtgattgccctttcgccatgcttcccaaccacccatcctgcccatctgcctgcagggtgactcgggtcaccgggtttcagtgtaactataaggatatgacgggcatgctggctcatgcctgtaatcccagcactttgggaggccaaggcggggtggatcacttaaggtcaggagtttgagaccagcctggccaacatggtaaaactttgtctctactaaaaatacaaaaactggctgggagcagtggctcatgcctgtaatcccagcactttgggaggctgaggtgggtggatcctgaggtagggagttcgagaccagcctggccaacatggtgaaaccctgtctctattaaaaatacaaaaattagccaggcgtggtggcacatgcctgtaatgccagctacttgagaggctgaggcaggagaatcgcttgtacccaggaagtggaggttgcagtgagctgagatcgcgccactgcactccagcctgagtgacagagactccgtctcaaaaaataattaaataaataaataaataaaataaatacaaatacaaaaattagctgggcctagtggcgggcgcctgtagtcccagctactcaggaggctcaggcaggagaatctcttgaacccgggaggcggaggttgcagtgagctgagatggcagcactgtactccagcctgggtgacagagtgagactctgtctcaaaaaaaaaggatatgacattagttgagaactttctatgggccagccaatggctatcacttatataactatcactgttgggcatattaattcatttaattctggctgggtacagtggcttacacctgtaattccagcactttgggaagccaaggtgggaggatccgttgatgccaggaattcaaggccagcctgagcaacacagtgagatgctgtctatattagtccgttcttgcactgctataaagaaatacctgaaactgggtcatttataagaaaagaggtttaattggctcatggttctgcaggctgtacaggaagcatggctggggaggcctcaggaaacttacaatcatggcagaaggtgaagaggaaggaggtatgtcttacatggttggagcgggaggaagagagagtagggggaggtgctacacacgtttaaacaaccagatctcataagaactcactcgctatcacgagaacaggaagggggaaatctgcccttgtgatccagtcacctccccccaggcccctcctccaacaccggggactacagttgaacatgagatgtgggcggggacacaaatccaaaccatatcaccatttctacaacaaaacgaaagcagcccggcatggtgcgtgcccgtaatcctagctactcaggaggctgaggtgggaggatcacttgagtgcaggaggccgaggctgtagtgagctatgattgtgccactgcatgccaacctgggtaacagagtgagaccctacctctaaaaaaaaaaaaaaaattaaatttacttaatgagggtcagtgagattgagttccttgtccaggtcacctgtttctcctaagtggggattcagggaccatgttactccagagctatggctctcagtgcgtaaagatattttctttcgtaggcagtattaagcattgctaacacttagctgcacgatctcatttcactctcacaatccctgagctagattctgcatgaaaccaccttgcagacaaggaatcagatgtttagtaactctcccatggtcactctgaggagctgggatttgaaccttctctgtcagacttcagagcctaagggctttaccaatactgccctgctcctcgtgtctttgggtgaatgaattttccatgcagttcaagaggtgttttctcagtgcctggcctgggcctagtactgtgcccaggagttggggaggcagaatgggctggcgccatggtgagaaagaaaaaacattgtgttagctgtcctgattcaggctcagggtctgacactttttagttctgtgaccctgggcaaagccacttaacctttcaggccttagtcacctcatctttgaattgggatattcctgtgtttgtcagaggttgcgcagatttgatgaaataatgcatgtttgtttgatagatggggtatcactctgtcacccatgctggagtgcagtggcttgatcatggctcactgcagccttaaactccttggctcaagtgatcctcctgcttcagcctcctcagtagctgggactcaggcgtgcaccaccatgcccagctaatttttattttattttttatttttttgtagacatgggcaatggaggtggtgggtgggtggtgtctcactatgttgtccaggctggtctcaaactcctggcctcaagcaatcctcccatgtggcctccaaaagtactgggattacaggtgtgagccattgagcccaacctgatgaaataatttttatgaaagtgcttttaaaactgaagtgctacagaaatattggcaatcatctcttaggctgttcttacagattctctagacttttgcatgtgtgtgttttaataaaaaatgatggctgtatgggggtcccagtggattaagccactggtttgcaactctggttacctgttagaatcatctgggaagtttttaaaaccaagatgcctggtccctatctccctacaggtttttgattcaatcgttcttggactgggacagggcagtttatgttttaaaagctcctcaggtgattctaatttgcagctaagggttccaagcaatggattaaagaagaaagcagatacataatggttttatgaaacagtttgctataccttaaaatccaaagcattttccccacacatcactacttggtggtggagaataaacggcggccggtggagagttctggacttaccagaacaaaagaactccaggacaggtcccatggggaagctgctgcttctcagcttcttcaaggtcaggtgacagatgctgggtgatgatccgggtgcatactccagggtgctagagtgggacaggagtatgcttttaggtgggcaacagagaatctcatggcacggctatagttagtgggctctttgaggttagaagcagtcttgaatttcatcttttaaatccaggactcacctactgtattagtgcattcttacactgctgtaaagatactgcctgagactggataatttataaatgaaggaggtttaattgactcacagttccgtacggctggggtggcctcaggaaacttacaatcatagtggaagaggaatcaggcattttcttcacaaggcggcaggagggagtgtgagtgtgtgaaggaggagctgtcaaacactcataaaaccatcagatctcatgagaactcactcactatcatgacagcatgggggaaaccacccccgtgatccaatcacctccctccctccacaggtggggattacaatcggcaatgacatttggatggggacacagaaccaaaccatattgttctgcccctccatctgcaagctgaagagcagggaagccaatagtggctcagtccgagtcccaaaacctcaaaagttgggaagccgacagtgtagcctccagtctgtggctgaaggcctgagaaaccctggcaaaacactggtgtaagtccaagagtccaaaagccaaagaacttgagtctgatgttcgagggcaggaagcatccagcacaggagaaagatgaaggctggaagactcagcaagtctgctcattccacctttttccacctgctttttctagccttgctggtagctgattggatggtgcctacccagattgagggttgggtctgcctctccaagtccattgactcaaatgttaatcttttctggcaacaccttcacagacacacccagaaacaatactttgcatcctttgaaccgatcaagttgacaatattaaccgtcacacctaaagtagtggctcatttgttatgtctttgcttaataaataaataataaatatttgtcctaggcattgtgggagatatttccccatctattatctttttttaactccaatttttaattttatttgaataagagacatggtctcactgtcacacaggctggagtgcaggagtgcagtggcgcaatcatagctcactgcagcctcgaacccctgggctcaagcaatcctcctgcctcagtctcccaaagtgctgggattacaggcatgagccacttcacctggccccacgtgttatctaatttaaagtttgcaacactcctgaaatgtagataatgaaatatagaggcgtagagagatgaaataacttgttcatcttagttacacaactgagtctgtgttcagagctgggatttgaaccgatgtgtgcctagaaagcccatacctttctagtcaattgcctaacaactagaaatgagatttgaatacagaggaagtccagagccccaaatctcttcgtgacaagcctgccagttctcctcggcatcattctaggctttaaaatctgtaactcagtggttttagacaatgatgataagatctcgagagatgataattgtagaaacatgctatttctttgaccccgtttcctcccagccccattatcttttatctatgtgctgaaatttctctcctttggtgtttcaggatagggtttcaccttgatttcctaatttagtttagtgttagtttattctggctaaacttttagttccttttgggcagtatggccttaacagattctgacattctaagtcttgagaaattaatgtaggccgggtgcgatagcacacacctggaatctcagcactttgagaagctgaggcgggcaaattgagctcaggagttcgagaccagctggggcaacatgacaaaaccccatttcaataaaaaatacaaaaactagcccaacatggtgggcatatgcgcttgcagtcccagctcctccaggggctgaggcaggagggttgcttgagccctggaggtcgaggctgcagtgagctgtatttgtatccctgcattccagcctgggtgacaaagtgagaccctgtctcaggagaaaaaaaaaaaaagaaattaatgtagcttcaacagtaaatacaagtcatggactggctactgcctaagcagttcctaaaggcctggtgtgtgcagacacccagctaggcactgggggtgtagtggtgaacggcacagacatggtccttagccttgaggaacttaaggaacttccagcctagttgggagagatgaaaaagataaaatatttttcagtagtggcttggctgctgcaaagttgatttactgtaggtaatcgagacaaagtttatataatgtcatcctatagcccattaaaacagaaaaaaaaaggtgtaatgaggttggtgttcataagtacgaaattggtgtttctgtatgaagggcaatgttaatatctattgctagagtaatcacattcacatgctgacatgtttggtttacagccagaacggtcaggaaattaagctgtttattttctgccctcttgataaaagtcacacttttacaacataattaagcagaatgccaagccatagctttcagctataaacactgcttttaacattaggtaagtaagctcatccggggagggttttgtttttgttttgttttgttttgttttgccattgtaattaacctcagtaggatgagcagctgtttcatattgctcaagctgcaggtagccttgtttcattctgaagtgagcttcagatacatggttgattgtattacccccagctactgcttaagaccaaagtagaaggtttttctccacccttgtaagtatttgttttctggaattctgggaacttttgtttctgataggatctagagctatggacatttgtccttggcatccttagaggcttcttttgggatcagtgtaattcctgattgaagcccagtgcatgcatcagagaaggcacttcttgacccttttcttctttgaggttaggcttcagctgtcttagaatgaggctgattgagggtctccagaaggtcagtactagtaagatctgaagacttaagattttgcccaatgtgagctggtccttaaaaagcaaatcctttgtattcctttctgaagtcttgctgaatgccgttgtagcagccagggttcctcattgcaaaaaacagaaaacacttctgttaatgcactgaatttgggatactgagtctgacagaatctcccaaaaggctggagaagcaggcttggaaaatggtgagagaaccaagagctgtgtgtaactacccctagcaactagaagctcctgtcactcttttgcatctcctcctccaggttcagtgacccaggtgggagtgtcaagtagctggatctcactcacaggtccatgacctagctgctggaggtggggacatgggggaggttggagcaagtgaaaaattggtctttttagcttccttcaatttgggggtttcgggggttagtgctcaagatgtagtcctcttcccacctgccagggactcggaagctgcatggttgcccatcttgtttctttccttatcctgcgttgccctaaggtagggaaacctagctgtcaaatccctttaaaccaacatactcactgcatacacatcttacagttaaagcatgcctaattgcccaatgttttatacagaattatttgctcaactaatactgcacaagggtagagaattaaaatgaaaggctttatgtttaatatggtctattaactgtggagggcactggaaattgccaggcaggtataatagaaagtaggtcatttattcaccacttagtgtaagtggttttttcttttctagtaatagccattcattttatctgaaactaatctatttttagaatcctaacagctggttccgattataaatgttttttagcctctgtcacaccaagaacttcagaaacgtctcaaaaacatcatataatgtctaccaatatactgctattaagaaacatcttgcatacattcttcagtatgcaaaggacattcatatcatggacatgaacatctttattaaataaaggctgggccgggtacggtggctcatgcctgtaatcctagcactttggcaggccgaggtggacagatcacctgaggtcaggagtttgagaccagcctggccaacatggtgaaaccccatctctactaaaaaaaaaaaacaaaattagccaggcttgatggcacatgcccataatcctagctacttgggaggctgaggcaggagaaccacttgaacctgggaggcggagcttgcagtgagctgagatcatgccactgcactccagcatgggtgacagttagacttcatctcaaaaaaaaaaaaaaaaaaaaggctgaagcctggttttggttcaaaaagaatcaacaatatgaacccataaaatgaaatacctcacaataaagccagaaatcaatatagtccctttaaacctctagttttactgatacataattttttccctcttcaggtgatgttctgattagtgttggccatgccaatgtgttaggatatactcttcgagaatttttacagcttttgcaacatatcactattggaacagtgctacaaatcaaggtttaccgagattttattaacattcctgaagaatggcaagaaatatatgatttaatccctgaggccaaattcccagtaacaaggtaaatagttcattttaggaactctttgttataatacagaatcccagggcctgtgaggcatagatggtttaatgtgacmattatcaaatgataaggatcatgacaggaggactggtgacactgtcagagtaatttcctgggyttctggtattagatctgtaggatctaatatgagaaagcacgatgaagtcaacctggagttaaaaaacaagtcatcggttgggaattttgtccccatgcctacctgtatggtgcccctctttcccgagtcagcccttaaaaatgcttcttgtgggccaggtgtggtgaatcatgcctgtaatcccagcactttgggaggctgaggcgggtggatcatgaggtcacgaaatcgagaccatcctggccaacatggtgaaaccccgtctctactagtaaattacaaaaattagctggatgtggtggcgcgtgcctgtaattccagctattcgggaggctgaggcaggagaatcgctcgaatcagggagtcggaggttgcagtgagccgagatcgcaccactgcactccagcctggagatagagcgagactttgtctcaaaaaaaaaaaaaaaaaaaaaaagtgcttcttgcaaatcctattttcttttccgtattcaactttttgttctctgggtccttcccaataacatctaagcctttttaaacttctcccatcttggcaaatcctatcttcagtccactctcctctccctaccctctttagccactggagtcttttgcatccactcccaacttgctaaaagctgtattagacacctctgtttcctcgaaagacgccacttcccagacactcctccacccacttcaatctaggctttgctttcatcccttggctgagtccttttcccagggccacccatagccttcacacttctgatcccactagattcttctgtctttatcttgcttggcttctgagcagcattagacacttaacaatttccacccactctcttcttgaaatagcacttcccaggcttctgtgacaccacactcccctgattttcctgttacctctggccatttcctcttggtgtcctttctcctagccagtttcattgatgcctgtggtttctatgactatccacatgctaattactttcaaactgtattatcaccaaaactgtattttttttttcttggagacgaggttttgctcttgtcacccaggctggagtgtagtggcgtgaccttggctcactgcaacctctgcctctcgggttcaagtgattctcctgcctcagcctccagggtagctgggattacaggcgcatgccaacacacccagctaatttttgtatttttaatagagacgaagtttcaccacgttggccaggctggtttcgaactcctgacctcaggtgatctgcctgcctcggcctctcaaagtgttggattacaggcatgagccaccaagcctggccagaatgatctttttgtaatgcaaatctgatcctggcatgttcctgcaaaaaatctcttaagactttttgttctttggataaatgtcaaaatcctcacattggccaatgatgctctatggggttcagctggcctctgcaaaccattccaacttcaactcatactgctttccccatccttctctagccccctttagcttccagctctctgccttttgttttgcctcagggtctttgcacttgctcttctctgtgtgcaacatgtttgtaactttgctcttcagtagtcacccttgaaggctccagtgtaacttctccaaggggtcttcctagaaacaggtccacctgacatatgctctcacagctcgctccttcacatttatcccaattttaatgaaataatctgtgtaatcagttgttcactgtgtttccctgggagaatgtgaactccatcaaggcagggactgagtctgtcttgttttgctaaaattgccctaggactttcatgtggtcagtggttcacttgtttttaatttttaattttaaaagtcttatttttgagacagggtctcactctgtcactcaggctggagtgtagtagcacgatcacaactcacaatcaaatcctrctcagcgactcctacactggagggcacgactctaaaagcctgggctcatgtgattacataacaactatgttctaagcattttcattacatggaggagttttgagatccagaatattaaattctaaggatggtagactgaccattcaaaagcaaagaaaagatagaacagtacaacttaagtaagaggcgaaaacccacaaacaataccaagcacctgctgattccctttcttaattaggcaaagtacccatatctgaggcattttagtaacttatgtataacrcggcagggaaagaagaaggaaaaagatgctttcacaaagctagtataaacttttccaggagaaaatggcactgggtatacacactggagaaattctccatgtaacgctctgggtaggccaagtggtatagaaagtttgtttctagccaatcctgacctctgcagggttgtggctttattacctaatgacaatttacctgtcctttatggttacctaaccatcagagttgccaaggattccccctgcagtctgaaaaaaaaaagttactaatacttggatttaaaaaaaaaattcatgtgctgttcaggaagacctaggtgtgtctgaaggcaaatcagacaaagaaaatcagtatttaagactagtggctctcagtaaaaattactcattatcaactgtttattactggaagagataaacttttggaaaagccattcaaattattggaagcaaatacaacaggcagactgccaaggttattagtgataacaccagaagtcttaacaggttggcagggaagaaacctatttccttttagcagggcagaatgtaccagagatttgtaatcacaaagatctagttttggttctgctgggcaatagcaccaggatgagggaaagcaggtgacagagcattcattctggaaagttaaagcaagcacaggtactgtaggcattaggaaagttcagagacctggaggtgctagcaggcaagcaccacctagtttcaacaatcaagaaagtcaataattggagaaagttaaaaacaacaacaacaacaacaacaaaaacctggctgggcacagtggctcatgcctgtaatcctagcactttggaggccaaagtaaagattgcttgaggccaggagtttgagacaggcatgggcaacatagggagatcctgttttaaaaataaataaataaataaaaataaataaaaattagccaggtgcggtggcatacagcatacacacctgtagtctcaactactttggaagcagaggccagagggtcacttgagcccaggaattcaaggttgcagtgagctatgattgtaccactgcactccagcaagggtgacagagcaagaccctctctaaaaaaaagactctaagacttactaatgactaggatgttgaagatccttaaggcccactatttcctgacttcctgactcctctggaaatcagtaatgttgtgttaatgccacgtgagccacaagaatagagttctcaggagatggccaggttgaatccgtcactttagctgcagtgaaattaacctaccctttaacacctcctaatattctggtcagtagtctagtataagtctgtgcaaaactttttaaggtatggtgaagtaatttaaggcagaatttgatttccatttagaaatggaaaaagatttcaagacgatttaaaaaagagaaacatttcaatgacacagaaaggtaatgctaaagctaaattgtatcttttatgagtcaaagcaagttataaggcatcttgttaggggaccataaatgtttagacatgaagaatctattttattcactattcttttcatttcagcacaccaaagaaaattgagctggcaaaagatgaatctttcacaagcagtgatgataatgaaaatgtagatttagataaaagacttcaatattatagatatccgtggtcaactgtgcatcaccctgcaaggagaccaatatccatctccagagactggcatggatataagaagaagaaccmtactattagtgtaggaaaagacattaattgtgacgtgatgattcacagagacgacaagaaagaagtgagggccccttctccatactggataatggtgaagcaagacaatgaaagctcttcctcctctacctcctctacctcagatgcattttggctggaagattgtgcccaagttgaagagggtaaagcccaactggtatcaaaggttggttagcaaatctgtggtcatatgagcatttatcttgcagacacccaagttttgtgcctcaccaggcacaagtttgctgtacttatcaaggactgtctgtagactcaccaattctcttctcttatgactgcgttataaagcctttagagatgttcttcaacaggattatctaaagacttccttgggttcttgcaggcctcacaaatcttattttcagaataagaccctcctttttgagaagaatttctttcttttagaaaatgccgtagagaaatccaatatcagaatgtctgaacatagtagagaatgtcactttatgtaaacactacatttttctttaaatatttagtttctctcttttttttggtaaacttcaagtactataattaaaataactaagagacataattctttggctagttattcacattagaattctttttttttcccctttttagcccttcttttactgtaaatgttgaattgagagttaattatttggaagagacaggatagtaacagataagggagagacaggagatgagagaaaaacaaaactctgtcaatgaagataaatcagacataaaaaaatgaatgaatgggaatataggatatgattgataggaaatgtatgttttttggaaataattttattgcaaaaaaggcaaaacaggggtaaaaaccagaccatttagctgttgacacccaaaatgacaaattttgaacttgctttcatcttaaacgccaccaatagtaatctggcactatttaccccgatagccacttagccttaattttaatagtttctgatgcttctatactcaataattatattcctgtctcctttaaagcatctaaaacaaagatatcagcacataataaatacttgttgattaactcattgagaaaaacgtaagaaaaacacttaaacagaatgttttattgactttaggtcagctgggaataattacctgcatttatgccttattttacctcactggaaaaaagacaaatgatatattagagacttctgactttcatgtgtttgctgctctgggctgagagaacgttcagctctctcctgtaatgtgtgcatcagtattacaactcatcaacaaaaggtgtatgtcccaaatttccacttgctgccattgacttctggccagaaacaaacttctttgccgcctttaaagaaacaaacaaaagacaaaattaacaaaaataaaaatatatatcatcaagcaggcgaacttattttgtcatttcaagaatttatggataggacattcttttttttttttttttttttgaggtggagtctcgctctgtcacccagtgtggagtgcagtgctgcgatcttggctcactgcagcctccgcctcccaggttcaagcaattctctgcctcaccctcccaaggagctgggattacaggcatgtatcactatgcccagctaatttttgtatttttagtagagacgggatttcgccatgttggccaggctggtctcaaactcctagcctcaagtgatccactcaccttaacctcccaaagtgctgggattacaggcgtgagccaccaacctggccttcgataggacattctaagccagcaattactataatagctgttgtgaaaattaactaggagatggctggtgctttaatttgggacagtgtgggaggaaaagcttagctgtttctctgaaagtcccattgtatgtgtaatgaaccaagcaagagcaacactggtaagagggtagctgttcaaagagagataaggaaaacaacactgacactgtcaaatagagtagtgtggcttcaggcagggatatactttcctgtttcggtattacaatggcaaatagtctgggtcaataaaaatacattgattgttaacttaaaagtaaaacttgataccctagaggattctttatgccactacttccaagttcaaaggctggttaagtgtagtatcatgagtcaggtgtaggtggagcagcagcccccatattctgtcaggccagcttatcttattactatgaaggagaggtggtggtggaagcagtcgggttgggacgcacataatgataggatataagatgaagacagccatttaaaagagtaccaaatgggctgggcgcgttgattcacacctgtaatcccagcactttggaaggctgaggcgggtggatcacgaggtcaggagatcgagaccatcctggctaacatggtaaaaccccgtctctactaaaaatacaaaaaattagccggccgtggtggtgggcacctgtagtcccagttactaggaaggctgaggcaggaaaatggcgtgaacccgggaggcggaggttgtactgagccgagatcgcgccactgcactccagcctgggcaacagagcaagactccgtctcaaaaaaaaaaaaaagaagagtatgaaatgacgattggggcgaagtgaaatcaagtcagggttactatcttaaaatagccttgtctcttttttatttgagacagggtctcactctgttgcccagcctggagtacagtggcatgatctcggctcgctgcaacctctgcctcccaggctcaagccaccttcccacctcagccccatgagctcctgagtagctgggactacaggcgcatgccaccaagcctagctaatttttgtacttttttgtagagatggggttttgctacattgcccagtctggtattgaactcctgggctcaagcaatctgcccacctcagccttccaaagtgctgggattacaggaatgagccactgcacccagcttagttttttattttttcttatccccactgtccctatacaaggtagacctgttggtgagaagatggccgagacatctacagtagaaagcaagttggcaagtttaatgtagaaaatggggaaaacccacttactttggattaattctgtaggtcatgtgcttgttaggcacagcagggaacacaaagaagtacatgacatagtccttgccctcaaaacagctcaatattgtagggaacaataatatatgtgaaaaaaaaattagcaagaacaagagaatgtcctaggctgagaagagtaaagaaaatcttaagatgctagatggtgaaatattgctaggactgaagaggaaaaatagcaaacttcactatttaggttggatcatatgaaactgctaatatttgactcttctttacttctagtcatctaacataagcccattttataaactaccattagtttaacctaacgtttgatacgttaggtgtattaaatgcacttttgactgccatctcagtggatggcagccctcttactgacatcacagtttaacctaatggtagtttatttgaaggaggaagatacatatactcgagctgacagggaagcttgttgcggatcttatgggaatgagccctcctgcctccacattaagtagatgagcaccaaacatgagaataatacactgcccaaggacgcttatgcatccttctgaaattggatcattaaggttaagttctctgttgttaaatcgttaagttttcatttacttacatttatgatatcagcattagccactgaatcaatctgctgaaggactgtggatggtggcatgtaagaaccagcaactagagcctgggacccgacttcttccaggaaacactcagaagactccactgacattaggtatccagctttcagcttgttcctgtccaataaaaggcagaagtcagttttagagagcaaggcaattattttttttttctgagtggtggcggggggctgtgaacatcaaagctttatttaatggatagagtaacagcgtgtctccctcttcctgaattccccaagaagaatgccactcccttctctggaacatactaaaacagtaagtctgaagggaagaagtctcttcagggttgccaaagtgtccaattgagggcccactttggcctccatttgtgggtccatatgctgctacagatttgagtgagacagctggagagctccctaatgcttcccaaggcctctggatccggttgtgcaatctggatcctctgcatgtcactggccagtcgcagcatgctctttctcctgcccactggcacagtgaggaagatctctctgctgtcagtgagaaggctgtcatccactgagatggcagtcaaaagtgcatttaatacacctaacgtatcgaacatcatagcttggcccaggttatctcatatgtgctcagaacacttacaatagcctgcagctgggcaaaagtcttctaacataagcccattttgtaaggaagcattgattatctcatgtactgcatatcactagcctaggaaaagatcgaaattcaaggtatagtcatgtactacataatgatgtttttggtcaatgatggaccacatatatgatggtggtcccgttaagattattagggagctgaaagattcctattacttactgacaacataatgttgtagtgcaattttaaaaaaataaatttagcgtagcctatgtttacagtgtttaagtatctacagcagtgcacagtaatgtcccagcccttcccatttactcaccactcactcactgactcactcgaaagcaggagctatgccataaaaatggcataccatttttttatcttttgtgctgtatttttactgtacctttcctatgtttagatgcacaaatacttacctttgtgttataactgcctacagtattcagtactatagtacatgctatacaggtttgtagcctaagagcaatagactataccatagagcccatgtgtgtagtaggctataccatctagatttgtctgaacactgaggttcacacagtgatgaaaccacctaacaccacatttctcagaatgtatccccatcgttatgtgacccatgactggaagctgaaattgcgatggttttcctccatagtcaagttgaaaaattataattgatccatggcaagttggggacagtgtatattgtaaacctaccttttggctgctacagtgtgaagaccagggatcttgaagagccttctgtcaaaccagggtgtcaggcctgtacttggtgtcaccacagacaactccacctggcccacagctggggtcacagtgttataaaggtcacagtcttgaccttttccttttgccttttccttgtatgaagtgggttctcttcttggatggaggataccgttcaatgcttgtagtttgaagattctcatgtttattttcttcttatgctatcgtttcacttgtattacctgtgagttttggcaggtttcgggggtgtctgaagagcttctgctgtctgtttatttctgtgatatccacttcagctgttgctgcctcttttagggcctgtttgttttcaccaagggtgaagtagtcaagccagttcctcttacacagtgaaacagggcaattttaaggtatgtgccccgaaactcaacatatttttggtaaacaggcaaactaacaacttacagtgctaatggcctccattctatttcttcagttcaccaagtacgtgaaccgtttacgttactatttggaaagctgtcagtacgaaattatactgaaaactccacagattgctttttgatttgggactagaacttagatctaggtaaaactattttaatgtaaggttttgattagtgaagcaactcctgcctcttgctgagatttgtctgtgagcatagggtatgatggaaaaggcaggtggggaagggcagtacaggtcttgtaagcaacggcagcttaaatatgggcacaaaagcatccacttgaaataaaacaaaatccaattcacaattctcccagaaacttattacttatagacatggtgtttgataagacagtcgagttatttgaacctcaaacgtttatcatcctttaacactctacagaaagacttccatttaaacataattacaatttaatgctgcagttttaccacgttgtcagcttaattaaaaaatgattttacctgcaataaactaccaagaggttattagtgtgtcctttcggcaatgacacctcactttctctctttcactacaggaagaacttacaagaaaaagtatcaactccatcaaaatggcagaaaacatactttgacattaatattcaaaattctactttctgcttattaccataccttgtaagaactgtgttacacttattaagaaaatacgttttcttaaataaattagatttgaaaaacttaggtttttcttaagtaaatccagtgtttcaatgtattctcatcatgttttgtttctggtacaatcaagcagccctgcatcctatcgattcttggttctatgtatacaatatttaataaattgtgttgtacttatacaagagatg

SEQ ID NO: 96314 - DNA, 12348 bp, Homo sapiens
cgactgttgccgctattttaaatgactattttctttcctatctccttatataggttggtatttgagatcactctcagcccttatccccttcattcttctccttcttccccatcttcctaccccattcccaagcacctgcttgcctcagtaccaatccaggtggtgaattgtggtgggctagtaacttgtgatgagatgacagaaagagaggtggagaagagactcagctgttcctttagctgctccttctttaagcttgaatcctgaattatccccagaggccctggagcccactcaccctaaacccttttcccacttcaaggctgcctattcaattcaatgaacattttaattcaacaaacatttttcccttcagttctgcaaacatctcctgtcagcttcctatgaaccactattatttatttattggacataggaaagcccacagctcaggccctaaggtcaataaagaaactcacaaaagcttacagctggcttttttttttttttataaagagaagatgaagatgaatctgatttcatcctttcaaagactttctctaaagatcttgtaccttagtcttccctgatagagtggaaagagaagatagagaagtgtcggggcataaatgagtctttggatccctaattccttcttcaggatgtttactgacagtggtcaatgttcaaatatcacctaacctggttgctcatacaatttgtttctgcttctgccattctccattctactgccttgcattttcttcacccagtacttgtcaccaactgacattttcttgttcatttgtttctgtgtgtgcctccattgcctactagagtgtacattttgtcagagcagaaacactgtcttacttacaagtcatatcttccatgcctagcccacagtaagtgcagagtgaaatatatatttgttgaatgaatgaatgaaccctccttaaaaatctgaaaggattatgcatctttagattttactacactgcattttagggtgggaaattactttttagaaagcatttggagattcgtgaatgtcgcagagtataggcctaataaatagcaaggtctatttaattcctttagagaatatgtgtgttaaatagttgtgtctggactggcctacagacctaactaattcacaggcacagaaccctgtttttgtgtgaaaatacatgtcatattctaaacaaataatatttgaaggatggtaacaatttataattctaaggatagatttacaattgatgaaactgattgaggtggtctaacatgctgaccaaggcagtgaccttgcgggggcagtttttagtgatgagcctgtgtagacacactgccacctagtggtgcttcaaataaccacagactctttactgcgaagaaacttttccttttttgtctgccatatacaaatgcttattatttcacatgttcagtacctgtctaagctaataaaaaaagacattaaattgtcccaacttctgagtgttaatatccaaaaccaattcaatataattaaaaaaaaatcaactcttcttaccatgagaacatcaataaaataagccacctcagcaccaacaacacggagattgtttacagcatggatgtattcccgtgaaccgttgatccaatctaaattaatgcaatttatatcttccagctgtagcaacacctggcacaaagatttatataaatattaaataaataagtgttcaaggaaaccgacgtgtctcaacacttgattccataataagaaattatactagtaggttgatatggttagactttgtgtccccgaccaaatcttatcttgatttgtaatccccataatccccataatctgcacgtctcaaaggagagaccaggtcgaggtaattgattcatgggggtggtttcccccgtgccgttttcgtgatagtgagttcttatgagatctgatggttttataagggattcttcccccttcacttggcacttctccttcctgctgcctagtgaagcggtgccttccgccgtgattgtaagtttcctgaggcctccccagctatgctgaactgtgagtcaattaaacctctttcctttataaattacccagtctagggcagttctttatagcagtatgaaaatggagtaatacttaggtgttaatagagaacctaccacaggctaagctctgtcctaacccatatatatacgtatgtcctaacccatatatatatatatatatatatatatatatatatatatatatgcacacacacatacatacacacacacacacacacacatacacacacacacacacacattagtaattagcacctatgcattagtacctatctcacggagtgagaattaaatttatatatatgtgtttatatatatgtgttatatatataaacacatatgtgttatatatatgtgttatatatataaaacacatatatataaatttaattctcactccgtgagataggtactaatgttatcttcactatatggccttataaatatttaactgcttatgatgttagcagtctattaatcttaagtataggagagaaagattaatttcatggagttaacttggaaattgtttttcttaaattaaatgagaaattgatcataccatttaatctcctgtcaagagaagaatttattcaagagtgattatacaaatttgcttcccttgtaatctgtgcaatttataataaaaataaatgggaaatggataactaatttgaggccccagaacacggataattgtggataactgaatggaagatttccatgaatatacatcaataccttgcaaagtacattcatgttaaacataaagctcgcatgctagtgtaaaaaggagcttattcatgtcatacattgcacatgtctctctgccatttgccatctgttttccatccagctatgttgatacgggtgatcttgtctgttccaaaatatgaggcttggatagttgaagaattaaccgcactgatctcctgtttcaagcagaaagagattaaggaaaaataataattaaaaattatttaatagttagtagacctattctaaagctgctcgaaagcctttcactaaatttgatctttagcaaccttctttaatatatttttactaaatagttatggctacatattataaaagtaccaaaaattattattattattatttagagacagtgtctcactgtgttgcccaggctgaagtgcaatgactccatcataacgcactgcagttgcaaactcctgggctcaagccatctggccgcctcagcctcctgaatagttggattacagacccatgacaccacacatggctaattttaaacaatttttttagagacagggtctcactatgttgcctagggtgatcttgaactcctggcctcaagtgatcttcctacctcagcctcccaagttgctgggattataggcacgagccaccacatctagctcaaaaagttaatgcattataaaatgcagtatacgaattcaacacgaggaaaaaatctttgatttttaaagtaatgtttgcaagacaatgttgggaagtttaaatcatagtttcagtaaatcttatttttgtataacatttctcagtgatcagtgtaattcatgagaattaaaacatgcctagaagcatgccaaaaacatggcaaaatggaggttgtccaccccactttatgagtaaggaattgaggttagaatctcatcacatgaaatacaccagcatattggagataattttatatgattatgtcaaatattcttttgtatttcttgtattttgttggattgccttaataacaaaactctcaaagactttaggagactataaatttaagtgattttgttatttaaaacaataaaaggcacaagtataagcaattctattggaaaaaatgaatacttaaatcagcaaatagcaagtctgacagtggtgaatcctataacctggaagcaacacatttagatatttatgaaattcaaacaaagagcctatttctggctacctgtgtttaatagtaatgcaattaatcatacaatttgctggctaggtaaagtgtctccaagactgtaagctaatggttatgagagtcataagttggcttgctcagtaattataatagctaacactcctatctgtctatttgccaggcattgttctaagcactttatagagtagctcatttaactctcaaaacactgtgaagtaggtactaattttaaaaattagaaaaggggactctgaggggccaagtaacttgccaaaaagtactgcagctaatgaatcctggagccagagttcaaatccacatggcctttgaagttaggtgcttaaccactgggctctcaagcgatgttctgattatagtgttctctgctgatagggcccaaaccagatgtgggatttgctgaagtgagcaataaaatcaatcatcttcaggccttctaggaagcatttttctgctaaataatccaatccaagtacaaaaacatgattccatctatgtctctaagataatccaggtgctcactcatttcaactctcttaggcccagctggagcgcctcaaacacctactatagtcccatttctacatctgaaaaaccttttggagggaatttagtccgaaaaaaattgtttattcttttctcaacatgagaatagcattctgacaggcattgtggggtctgagcatctgttgtcatgctagtgtaaaaaggagtttattcacatcatacattgcacatgtctccctgccatctgccatctgttttccatccaggtatgctgatatgggtgatcttgtctgacatcaatgaggagtttaatcaagtagaataggtagagaaaacactttcacattcactctggcacaaccctctaaagcagcttttcaacataaatgtgggaaactccatacaccatcatgggatcaaaagaagacagcttagattctgctgccacaaggatagaaacgaggaaatgatgtcaatattgtacagaataggttatcgagaggaagggttaattaaagtatcaaggtttatctgggccttttagcattctttgactgagcagacatgaagcataataggtacgagatcaatccattctgatgactacatttccagtgatatcatctctagcaagtaaaaaatagttaccagttaggtatgttctatccttgactaaagctgcagacacagaaactaccggaagtgtgcaacatgtccatcaccaccagtgactgtataagtcactctaggttaaggtgtcatggattcatgggggaagtcggttggttttattcttacagaaaggtaactgtaaagacctgtgacctccagaagaccaagtttatcgtaccacaccacatttacctttgacaattcctcacttggagaagagagtatgttaactgtgtagagttaatttctgatttgtttataaatgagtccaattcatatagcatatgagtcaggcctgtggaaatccttattttaattacacaccttgactcatcctatatcacagttgttagaaaaacactttaacagcaaacaataggcttccatccattacaaaattcagatacatatctggtttaattacacatgattctttccaaatggagggaagtggggaaggtgtgaagaacattatttagggaagtacttagttttccaattttctcttcattggcagtaggacccagcttcacctaaacactgtctttatcaccttccgttttactgaccgtgctccacagaattcaagtgcatggccacttatataaaaggataaaaggatcaatgagcctgatgagtcctaagagtgaagatcagggaatagagttagtcctaagtggataaatatgccctgaacatcctaaaaggcagagaaggtgcccccaaatacttgtattctacatagattctcttcacttaaaaaaaagttgatctactagcgaacaatacagtcaggatggctaaaggtgacccctagaaaccaaacggcaagatgtctgcttatgccttcttcgtgcagacgtgcagagaagaacataagaagaaaaacccagaggtccctgtcaattttgcagaattttccaagaagcgctctgagaggtggaagataatgtccgggaaagagaaatctaaatttgatgaaatggcaaaggtgattaaagtgcgctatgatcgggaaatgaaggattatgaaccagctaagggaggcaagaagaaggatcctaatgcccctaaaaggccaccgtctggattsttcctgttctgttcagaattctgcgcctagatcaaatccacaaaccctggcttctctattggagacgtggcaaaaaagctgggtgagatgtggaataacttaaatggcagcgaaaaagcagccttacatcactaaggtggcaaagctgaaaaagtatgagaaggatgttgctgactataagtcgaaagtaaagtttgatggcgcaaagcgtcctgctaaagttgcccggaaaaaagtggaagaggaggatgaagaagacggggaggaagaataggaggaggaggaggaataaagaaactatttatctgtctccttgtgaatacttagagtaggggagctctgtaattgacacatttcttatctgagaagtgtctgttgccctcattaggtttaattacaaaatttgatcatgatcatattgtagtctctcaaagtgctctagaaatagtcagtggtttacaagaagtggccacgggtgtctggagcaccctgaaactgtatgaaagttgtacgtatttccaaacattttaaaaatgaaaatgcaaaagaagtcaaaatatacataacattaaaatcaacattttaaccattttaaagtgcaaactcagtggcattaagtcattcacattgtcatgcagctatcactaccatctttctccagaactgttttcaccccaaactaaaattctgtacccattaaacaggaactctccattacctgctccagatatctcctataaatgaaaccatagattatttgtccttttgtgtctggcttattagcaaaatgttttgaatggtcatccatgttatattatgtattggcatttcacttctttttaaagctaagtaatattcctctctttacttcttgataattataaaactcaagcttttgaggaatgtttctttataagtgtctctatacccatagtaagaacttttttccttgttctagagacagccacatctacagaattggtcaaactcatataacatatgggtcaggcctgtggaaatccttgttttaagtacataccttgatttatcctatatcttggttgttgaaaaacactttaacagcaaacaatcaggcttctatccattacaaaattcaggtacagatctggtttaactacacatgattctttccaaatggagggaagtggagaaggtgtgaagaacattatttagggaaatactcatctacagatagctggcagatttcagtaaagagtagtgtgtacatatgtatgtgtgtctggtgagtagagagctacaaatcagaccatatttgtacggtaggagtgcataggagaagactgccctggctggcaaggcccagcagtatgtgatgggcctgatggaaagtaagccctgaggttacagattcaggtaaagactggaaatgatcttctctggccccacttttttcctgctccctaaatatagatcctccaaccactcctagtcctgccctcgtttctctgcttctgagatttcatgtactctttgggtttcaatttgcaaccccagccagaagacttttgaatctttttctccagctctgggctgcctgcttcgctgttagactaacatctccaacagcctgctcaagcctcacctatccagaatctaactccttctcttttatcctcaatttttctgataagagggttatcattttcccaatcatttacgtgtgaaatctcagactagtttatgatgtctatcatgttgattttctattatcataaccactttcattactgcagttcaggctgtttcccgtgtgtgatccaaactgcactatagctttctatttaacattgtcaaatggacctttctgtgatgacggaaatattctatatctgtaatgtccagtatggtagccactagccacatgtggctattgagcacttgaaatgtggctggtgtggctgatgaattgagtttttaattttatttaattgtaattttaatagtcacatgtggctagtggctactatgttggacagcacagttctaaatggcctcatagtcacctctagtctcttccagcttcagacaagagagcaacagcagccagagtaaatgccctaaagcatctctgaaaagctctcaatggggccccatggcttacaggatgaagtacaaactccacaggaaggaactatacaatttgttcctcaactacttttctaactaaccttacttttgaagactccttctctgcccacagactaacccaacacgtcattcatcagacaggcctgtggtttctctcctttatgttcatgccacttcctttgccattaccctgcttatctctgcttgtgagcactttgcccatcctgcaggatacacctcaaatacatgtcctcctcaaaatgttacctggttccatccctgacctcaaggtgagctcttcttcactttgttcccagagtctttcagttgcatcttacatcacagatcataatttgtgttgcaagaaaggtatttgtttgtacatgtcatttctcccactgcaataaagtcaagactgttctgtttattcaattcaatagacaataggcattgttgcttattcagtcttacagatggaaggttctcagttggtacattgactgaacataatatcaagtttacctgttatgaaataacataagagcaatcttcatatttaaatcagatatatcagaacagataatatagaacagataacatagaaaaaatctgactcataatactgaaaagaaatgtttgcatttaagtcaatagcatatgtcagaataggttactgtatctatgtcttctgtatctataggcaaatcttatattttagaataatccatgtgtgaaggctgcaagttagcttacctgataggcattgggattgtgtatagtgtagagcaggaaacgagtgtttatcttctctggagaccagggtaaacctaccaactctgttgagaaagtcctggtccatggtaaaccatctttgaaacaccctaacctttcatagcaaacttcttttcctgcagcagaaaggtggagtgtcagtatagaggaaccaggcttagagagaggctgtgtttctcactatgagttaaagtagaatttaattttggaaattaaccccttattggatttatggcttgaaaatattttctcctattctatagggttgccttttcattttgttgactagttcctttactgtgcagaagcttttttgtttaatgcaatcccacttgtttatttattttatttcgttgcctgtgcttttgttgtcatattccaaaatgatcattgctaaagccagcaacaaggagatttttcgtatgttttctcataggagttttataatttcaagtcttacatttaagtctttattccaagttaattttgtatatggcataaggtaagggttcaatttcattcttttgtatgtggatatccaatattcccataccatttgttgaacaaacctatcatttcctcattgttatattcttggcacccttgtcaaagactagctgaccatatacacacaggtttataattttgtatatggcgtaagggttcaattttattcttttgaatgtggatatccaattttcccaacaccatttggtgaataagccaatcatttcctcattgcatattcttggcacccttgtcaaagactagttgaccatatacacatgggtgtatttctgcacgctctactctgttccatttgtttatgtgtctgtttttatgtcagtatcacactgtcttgattaatataattttgtagtaaatatagttttgaatcaggaagtgtgctgcttccagctttgttcttctttcttaagattgctttgttatttggagtcttttgtggttccacaacaactttaggattgttttctctatttctgtaaaaaaattacctaaggaactcacacaacttaatagcaaaaagcaaataactaaattttaaaataggcaaagacctggacagacattttccttaagaagcatacaaatggccaacagccatatgaaaagatgctcaacatcgtgaatcactatggaaatgtaaaccaaaaccttaatgagatatcatcccacacttgttaggatggtactggccacattccagcctcagcaaagctcagccagaagggcaggcttgaagccgagagataacagctcaataacccagcgcatcccactcttcactttgtctcacctcttcctccaatgcggtcaatacactgttttgttttttgtttggttggttttttttttttggctcatttattggcttctattataaatttaaacagtaaccttctattttttgatccatacaacatattcattagaacctgactcccagtttcctaagaggaagattttagaggtactgactctccctctcttcctcccttccagcttccaaggtctgtcagcttcataatgttgttttcatactatcaaaattgataatattcagactttgctctataagcaaaattaatccttctatgttttgtctgcatgctgactccaaaaagttgaaaatcaatgaacagaatttatattattataactagataaatatttttggcttcaatcaactcgcatgctataattacatttcctttactgcacttccattgttcagacactcattctcttcaaaggagatgattcaaatgaattgtctttcctaatatttgaattactcaggatcagtgtcatcgtaggttactccatatttggatcatgcctctcttgtactgtttgtgttttcctatattctctggttgcctttttttctcttcctggaagaatgaacatgtgccttcttcaatatattcctattatattgcagcttcttaatatttctcctgcctggaatccattctgatccttttctaatttgaaccagtgacttcatagttggatcatggctttctaaaacagccttctgttttccctagaatgcccagttgcccttattttttgcattctgttgcttttttctccaggtcctcaactacattattcagtctatggattttaaaatgaagatttttataactagtccttattttctatgtttatcgcttaccagggttatctaccactgtgctcttttttccataagaaaatgctcacagagagtgtaaagttaaaggaaaatggatgtgataaagcacagtgagcaatattataaggtattaaagccacttaagaaaagattgaaagattaatagttctgtaaaaataatgtttgctataaagttaatacattgaaattgggtcaataacttaagtggccaataataaaggatatagttttaaaattatggtattgaggaatattatgcagccattaaaaatgtttatagagaatttgtaataatatctgtaatggaaaaaagtaaaattaaaagaaaggtaccaaaatattaatggtgaatcccagtggttttaattttctcatttatacttgtctatgttatcaaattttcagtaataaatatgaattacctttataataataaaaaggtcacaaaaggagagaaagagtacttctttaccaaatgatgcccagtctggttttttctttttgtcttactactgctaataaaaaataccaaaaacagatttagccttatgtgtcatacatgtgaaaaaatgaagacttagaaaaagtgatgatctaagagaaatgtattgctatttgtggcaggaaaataattgaacccttatgccggtcactctatcactaagtggaattgggagatatagcctagcttttgctaggttactttatggtaataaacagcccctcacatctcactggcttacaaaaattaaggtttatttcttgctcatgttatcctttggctgcagtggttttaggttgggcctagctctgatttaccagccttctgcattgcaggatccaagctaaatgagtaggctctgttttgagcctgtgtctgttggggcaaaggaaaatgat

SEQ ID NO: 96315 - DNA, 13350 bp, Homo sapiens
tctcatgctgctataaagaactgtccaaaactgggtaatttataaaggaaagaggtttaattggctcacagtttagcatggctggggaggcctcaggaaccttcaatcatggcggaaggtaaaggggaagcaaggcactttctttgcaaggtggcaggaaggagaagtgccgagtgaggggggaagagcactttataaaaccatcagatctctgagaactcacttgctattatgagaacagcatgggcgaaactgcccccacgattcagttaactccatctggtccctcccttgacacgtggggatgatggcgattacaattcacgatgagatttggatgcagacacagagccaaaccatatcagttgttcttaagaaatcctacactcacctcttggtaattagtgcttaccctatgtcaacagtgtctcttcaaattgctaaaaggtcagaatgtacataaggtattaagatgaacccatctcctgactgagagaaaaggcaggcttaagctaccagtgtttagtggcatatatctcttatgtggaaaggccaagatatttgcttccatcatctttatgctaactccatgaatatctagcagatagtaggtgctttgtcataaatactcttgaggtcagcatccttctttgcttggttgcctggcctcctatgataaaagcaaatgcctgattagttgttgcctgacagccctcagtaaaggatataacttgggataactttttagtactgttctttggctctgagatgttctcgttcctgttttagcttattctcttcttttgctccatgaactctagtctttcttcatagattaatttcatccctcattcagtaatcctaaatattttttcagtgctttactatgtgacaatcactgttattggtgcttgatgtacgttagtaaacaaaacagacaaaaatctcctcacttgtggatcttaaattctagttgggggcaggagacaggcagacaattaaagaaatgcatactaaatatctacattttacaacatattaggaggtaactgctattaaaaaaacccagcagagtaagggggattgggaatgctagggaagacaggggtacagtcacagtttcaataggtcagagtaggtctcagggagaagaagacatgtaagcaaacatatgcagaagaaagggaagctgacaatgtagatattctgggggaaaatggtacaaaggccttatgataaatgtatacctggtttttaagaagaacagagaagcaggccagtattgctgtagttgagggaggtggaggagggtagcaggaggtcatagaggaaatgaaggtcaggtcctgtagggcattttaggccactgtgaacacattggattttactctgagtaaaacaggaaaccaccagatggttttgaatagaggagtgacatggtatgacttctatctttaaaagctcactttggctgttatatacagaataggctatagagagccacatatgaaagcatagagaataattagaaggctgttacagtaatacggcctggggagaatggtagctcacatcagatggtagcagctataggaatgaggtatggtagatttccagatagacagtcatgcatctcataatcacatttcagtcaatgactggaccacatataacaatggtggtcccataagattataatatcatatttttgctttactttttctatgtttagatatgtttagatacacaaatacttatgattgtgctacaatcacctaccgtattcagtacagcaacatgccgtgcaggtttgtagcctaggagcaatgggcgatagcatgtagtcgaggtgtgtagcaggtataccgtctatgtttatgtaaatttactctgtgacatttatataacaacaaaataggctaacagcacatttctcagaacacatccccatccgtaagcaacatgtgactgtaatttaaacatggagccaatagtatttcccaataggaaatgagttgtgtgagaaaggagtcaaggaaaacctcaaggtttctggcctcagcaaccagaaatatgaaattgcagcaattaaaatgaggaagatttcaggtagaataagttcaggtggggcctgggggagtggtgagggaaatcagtaattcagttttgaacatattaatttagaggtgcttgtaagtcatccccatggaaatgttatataaatgttggagtttagaagagaaaattagagataaaaatttgagagtcataagatatacaggtgatatataaagccctgagagtgactaagataaccactggggaaaggcttttgttagagatcaggatcagagtcagcctgggggcattgcaatatttagaagttggggaaagaggaggaaccagcaaaggatacagggagggagtagctgtgagataggaggaaattcaagaagacaacagtatcttccaagcaaaagtggtaagctcatactctttaggatgctttataatttgaccaaacccctctgcttccaagtgaggtcattgcaattttactgaatttcctggtttctcaggagaggaatttctttccatgagctatgagaaagctgatttagagtctctccacctgttctgacagcagcctcagatggctgtctggagttttgagagatgtttgacagaaggccatagactcttgaagtttgtagctagcaacctacaggaaggacagattcatatatcccatagatagcacctgggttagggtcctgatcaacactgtttcagactgtgtaggtcctgaggcacaagattgaaatttctgctggtcttacaagagaatttagggaaattggaataagcatttgttgaactggtaaatgaaatttctgctggtcttacaagagaatttagggaaattggaataagcatttgttgaactggtaaaatataaggttgtatactcaatatgcttctaccattgtgtcaagggtgtgattctcttctgttttctggtccaaaaattagactgaaagaaaggtagactgaatagtccctggaagggtttaccagccccatcctagatcaactgcctttcatgaccttaaaagactgatggatttaaccctcacttctgcccctggcaggcttatagtgccaagttgtggtttgcaaactctaagaccaacacctaaggattgcatccctggccaccagatcaaagtccagagagcaatgccaagtcaaaatctagcactatttgtgtgtgtgcttgggtaaggtgggatctccagggaggtggacaaagttcactatatatacaaagtgagtcaacagttacagaggataaggcatgaagcagcccagaggcatcttacaaatggtttgcttgttgtcttagtcaacttggatacatcttaaaggaagccaatcctttggtacaactttgcctttgttttttcccatttctaaatcaacacctggggaaatgttccccattaattgctagctccatatcattcttgcctgtgtacatacatctcttctccactgctcagaacacaggaagacttaccctggttgtgattctatctcctcgttctaaacagagtcctggaatttgaaaaacacctatccattaggtactgcaggaatctttgtgatcccatgtaacaatgtatagatgtgttgcttaatgatgggagtacgtctgaagaagtctctcattaggtgattttgtcattgtgtgaacattggagagcatatacaaacctagatgggatagcctactacacacctgggctctgtggtatagcctattgcttttaggctactaacctccacaacatgttaccgtactgaacactgtaggcagttgtaactggttaagtctttatgtatctgaacagatctaaacatagaaaaggtaatgcattgcactaagacgttacaatggctaagatgtcactaggtgtaggactttttcagatccattataatattacggtaccaccatcatatatgcagtccatagttgacctaactgttgttacttagcatgtaatcctttgtgacacttatgataggaatatgtactggtggggaaacgtgaaggcctacagttgcccttctattgccaactcgatagtgtgtagccttggattctctttctattttggccctgcttgggtttcagtacatcttggtttgtattggtgaagtcacatatatgatccattttatcccctgctcagacaacacaagcactacagacacaatgtacctctttctttaataaaatgaaaaagtactgtgtcctttttaatagattctagtttactttctgattctagaagaccctctttactactttccaaatcaagacacatttgttcaactataagatcatggtttatttatttttattatgaattgtaatcagtattttacctctgcctcagatatttgtcctataatacttagtctaattggtgtttgcccctcattaagggaattaatgacattagcaggtaggaaaatgaggaatagtccttgagaactctatctctaacctttactgtgttaataagaagataatagattaaaatagcttattttattttgttaatttccttttttaactgacaagtaaaaattgtatataattatggtgtacaacatggtgttctgatataggtatgtgttgtggaatggctaaatcaaactatttttaacatatgcattacctcacatatttattattttggtgaaaatacttaaaatctactctcttagcaattctcaagcataccataggttgttatttactgtagtcaccatgatgtacaataggtctcttgaacttatttctcctaactgaaattttgtgtctttgaccaacatctccccaaactccttccccttacccttggtaaccaccattctactctgtttttgtgagttgaaatttattagattccatatataagttagatcatgtggtatttgtctttctgtgcctggcttgtttcaattaacataacatccttcaggttcttctaagttgttcaaatgacaggattttcttctttataaaggatgaatagcatttccttgtgtgattatataccacattctctatccatttatctactgatggacatttaggttgattcccacatcttagttattgtgaataatgctgcaataaacatgggagtgcagatatctcaacagactgatttcatttcctttggatatgtactcagtagtgggttgctggatcatatggtagatctgttttcaattttttatcataatggctgtgctaatttacattctccccaacagtgtacaaaggttcccttttctccacgtcttcactggatcttgggacggagttttgctcttgtcacccaggctggagtgcaatggcatgatcctggctcactgcagcctctgcctcccaggttcaagtgattctcctccctcagcctcccaaataggtgggattacaggagcaagtcaccacacccagctaatttttgtatttttagtagaaacagggttttgggaagttatctatcaagtcctttgcccgtttttaaattgggttatttgttatcttattattgacttgttggagttccttatgttatgtttcgtatattacactcttatcagatgtgaggtttgcaaagattttcttctatcctataggttgtctctttgttgtttcctttgctgtgcagaaactttttagttgatataatgctatctatttttgcctttgttgcttgtgtttttggagttatatccaaaaaaattattgcccagatcaatgtcatggagcttttccctgttttgttctcgtagttttacagtttcagatcttatttttacatctctaatccattttgagttttttttttttaacctctgaactttttattggcttccagctccccagagagtaccctgcttctgctggcttaatgtctcagaactttggtgtcattgatctcagacaccactttgccatccactgtctggcgggtggtggtcttttggatggtttgcatggagttactgctgtccaaggcatcaccaagactgaagtccttgatgtcttctggcaggcagtgatacatggcaatctcagcctccagcttgaccttaatgttcagcagggcctcctactcctgggcctggtgctgcccctctgcccgggtctgtgtcaactccaactccaggtgcagcaggatcccgttgagttgctccatctgcagggtgtaccaggcctccacctccctcaggctgttctccaagctggccttcagatttctcatggagtccaggtcagtctccgaggactgggctgtatgttacagctcatctgttgagagcatcatctcaacagctccaaccttggccaactgcatggtgaccactgtggtactctccttaatctgctgagaccagtatttgtccagcccttctcagttcttccgagccagctcgtcatattgggcccagatgtctgccatgatcttggcaaggtcctgagatttgggggcatctacctccaagatcaaaccagagctgacaatctgggcttgtaggccttttacttcctcttcatggttcttcttcattaagagcagctcctccttgagagtctcgatctctgtcttcagctgcagctgagtgacactggtgtcatcaatgaccttgcagagcccatagatgtcgctctccacagactggcgcatggccagctctgtgtcatacttgactctaaaggcatcagcagcaagatgggcattgtcgatctgcagaacaatgtggacattgtccacagtatttgtgaagatatgagccctcaggtcctcgatggtcttgaaataatggacccagtctctgacctggggtcctgtcttctccaggtgctcccagattttactctccaccttccagttcttggtctctgggctcctcactctgtccaggtagtaggccaggcggtcttcaggctttgcatggtctccttctcattctggatgcctcccattcctgccagacccctagccatccctccggccaggcccctggaccccaagcagccccggaagctggtggagcaggacatggagatccgggaaccagagcccccagtgcctgcatagacgttggttgkgctgctgaccagccaggtgccatagctgggcacctggatggagcccagggatgggtwggtagttggtggacaaggtggagcgagtggtgaagctcatgctgtctggggaagagagcgggaagagaggactcaggctttgctgataaccttgagttttgtatggtgtgagatgaggctctaattttattcttctgaatgtggatatctagttttctcagcaccactgaagagaatatcctttcctcattgtgtgttcttggcatctttttcaaaaataaattgagcataaacttggactttctattttattccattggtctatgtgtgtgtttttatgccagtaccatgctgttttgtttactcttgctttgtagcagattttaaaatctggtaatgtgatgccttcagctattttttttttccttatgattggtctggctatatgggagtcacttgtggtttcatgcaagttttaagattttttttttctatttctgtttaatatgtcactggaattgttaaaaatctttatttttttaaatttttaattaaaaaaacttttatttaagtttgggggtacacttgaaggtttgttatataggtaaactcatgtcacaggggcttgctgtacagagtattttgtcacccaggtactaagcctagtgcccaatagtgatttttcctgatcctttccctcctcctgccctgctccctcaagtaggccccagtgtctgttgtttctctctttgtgttcttgtgttctcatcatttagctcccacttataagtgagaacgtgcagtatttggttttctgttcttgtgtgctaaggataatggcctccagctccatccatgtttctgcatatgacatggtcttgttttcttatggcttcatagtattccatggaatatatgtgccgcattttctttatccaatctaccaatgatgggcatttaggctgattcagtgtctttgctattgtgaatagtgctgcagtgaacattagtgtgcatgtgtctttatggtggaatgatttatattcctttggtatatcagtagtgaaactgctgggtgtaatggtagttccacttttagctcttcaaggcattgccacactgctttccacaatggttaaactcttttacactctcaccaacagtgtataagcattcctttttttctgcaaccttgccagcatgttatattttaacttttaaataatgtcctttctgactcatgtgaggtggtatctcattgtggttttgatttgcatttctctaatgatcagcactattgacctttttttcatgcttgttgaccacatacatgtcttcttttgaaaagtgtctgttcatatcctttgcccactttttaatgtggttgtttgtttttttcttgtacatttgtttaagtttcttacaggtgctggctattgggcctttgtcagatgcatagtttgcaaatattttctcccactctgtaggttatctgtttactctgttgatagtttcttttgctgtgcagaagctcttaagtttaattagatctcatttgtcagtttttgcttttgttgtgattgcatttggcatcttcatcatgaaatttttggcagtttctatgtccagaatggtattgcctacgttgtcttgcagggtttttatagttttgggttttacacttaattttatatccagctaaactaagcttcttcagtgaaggagaaataagatctttttcagagaagcaaatgctgaggaagtttttttacctccagacctgccttataagagatcctgaaaggagcactaaatatggaaaggaaagaccattaccagctgatgcaaaaacacatttaagtacacagactagtgacactacagggcaaccacacaaacaagttggcataataagcagttaacaacacaatgacaggatcaaatccacacatgtcaacactaaccttgaatgtaaacaggctaaatttcccatttaaaaggcacagaatggcaagctggataaagaaacaagactcaatggtatgctttcttcaagagacccatctaacatgcaacgacatgcataggctcaaaataaagggatggaggaaaacctaccaagcaaatggaaatcggaaaaaagcaggggttgcaatcctatttttagacaaaacaaactttaaaccaacaaagatcaaaaaagacaaagaagggcattacataatggcaaagggctcaattcaataagacctaactattccaaatatatatgcacccaacccaggagcacccagattcataaagcaagtccttagagacctacaaagagacttagactcccacacaatagtagggtaagacttcagcacttcattgccagtattagacagataatcgaggtagaaaattaacaaagatatttaggacctgaaaatgtttaatttttaatttttgggagtacatagtatatatatatatatatatatatatatatatatatatatatttatttatttatttatttatggggtatatgggatatttttatgtaggcatacaatgtgtgataatcacatcagggtaaatggggtatccatcacctcatgcatttatcctttgtgttagaaacaatccaattatacccttttaggtatttttaaatgtataattaaattattattgaaattttgatggtgattgcattaagtctgtagatggctgtgggtagtatgaatatttgaacaatattaattcttttaatccgtgaacataggatatctttctgtttatttgtttcttcaatattttaaatcaatgttttatagttttcagggtacagatctttcacctccattgttaaatttatttctaagtattttatttgttattgtaaatggaatagttttcttgctttcttttttgagtggttcattattagtgtatagaaatgtaactgagtttcgtatgttgattttgtatccacccactttactgaatttattagttttaacaggtttttggtggcatctttagggttttcttttttttttttttttttgagacagagtctcactcttgttgcccaggctggagtgcaatggtgcaatcttggctcactgcaacctctgccacctgggttcaagtgattctcttgccttggcttcctgagtagctgggattacaggtgtgtgccaccatgcctgactaattttgtatttttagtagagatggggtttcaccatgttgaccaggcttgtctcaaactcctgacctcaggtgatctgccttcctcagcctcccaaagtgctgggattacaggcatgagccacagtgcctggtgggtcttctatatataggattatttcatctgcaaacagggacagttaaacttctgcctttccaatttgggtgtattttatttttcatctttttgcctaattgctctgactgggacttttagtacaatattgaatagaagtagtgagagtaggcacccttgtcttgtttcagatcttagaaagaacttttcacttttgagtttgattttagctgtaagcttgtcatatatggcctttattgtgttgaggcacattcctactatacctaatttgttgagagcttttatcatgaaaggatgttgaattttgttccatgccttttctacttctattgagatgatcatatggttcttgtccttcattctgttaatgtggtatatcatattattgttttggttatgttgaaccatcctcgcacctcaaaatctcacttggtcatgatgaatcattcttttaatgtgttgttgaatttagttttctaatattttgtttagaatttgtatatctatattcatcagggatattggcctatagtttcttttcttgtaatgtcttgtctggctttggtatcagagtaatgctggcctcataaatatgtttaaatgtattcccatctcttcaattctttggaagagtttgagaaggattgttattagtacttctttaaaaggttggtagaattcagtagtgaagcaattagatcctgggattttatttgatgggagacattttattacttattcaatgtccttccttgtgattggtctcttcacattttcttttacctcatgattgagtcttagtatgatgtatgtgtctaggaatttattcatttcttctaggtcatccaattttttggcatataactgttcatagtagactcatgatcatttgtatttgagtgctatttgtgtaatacctcctttttcatttctgattttgttgtcttttttttttccctgatctacctaagggtttgttgatcttgttttacctttttaaaaaaccaacttggtttcattgaacttttcttttttgtctagtctctatttatttctgctctgatttttattattttcttcttcctgctatctttttgcctagtttgtttgttttctagttccttgagatgtaacgttaggctgtttatttgagatctttcttcttttttgatggaggcagttattgctaagaactttccttttagaagtgattttgctgcatccgataagtgtcaggatgttgtgtttctatttttgtgtatttcgagatatttttaaatttttcttttaatttcttctttgaccttttggttgtttaagagcatgtgtttaacttcttcacatgtgtgaattttctgaagttcctcctattattgatttttggtttcatattatagtggttggaaaagatgcctgatacaatttcagttttcttaaatttgttaagttgtgttttgtagcctaacatatgatctgtcctggagaatgttccgcttgtgcttgaagagaatatgtattctgctgctgttggatagaacgttttgtacatgtctgttaggtctgtttggtatgaagtgtagttcaagtccggtgtttccttattgactttctgtctggattatctgtccactattgaaagtgaaaatattgaaactctttgttattattctattatagtctatctctcccttcatttgtatcaatatttgctttatatatatatatatatctctggttttggttatatgtatatatatatatttaggtcctctggttttggttttatatgtatattatatatatttacagtagttatatgctcttgaagaattgactgctttatcgttatataatggccttctttgtctcattttacagtttttgacttttaatccattttatctgatataaatatagctacacatactctcttggtttctatttacatggaatatctttttccatgcttttattcttaatttatatgtgtccttataggtgaagtaagtctcttgtaggcagaatatagttgggtcttgtgtttttattcatttagccaatctgtcttttgattggagaagttggttcatttacattcaaggtaattattgataggtttggcctcattagtggcattaaaaattattttctggttgttttgtagattcattttttcctttctcttttatgactttcctttgtaagtggatcattttctctagtggtatttttgatttctcactctctatcttttgtatatctactgtagctttttgttttatgactactatgagacttatataaaacatattatagtcataataggctattttaaggctgataacaagttaactttgattgtattacaaaatcctacacttttgcctcacccatctctctcacattttatacttttgctgttacagtttacatctttttttttgtatatccctcagcaaattattgtagctattatttttaatagttttgtcttttaactttcatactaaaaatttaaaggatttctacaccatcattacattataaaagtatcctgaatttgaggatgtaattacttttatctgtgagtttcatactgtaatttttgttttagttttttgagatggagtcttgctctgttgcccaggctggagtgcagtggtgtgatcttggctcactgaaacctccacctcccaggttcaagcaattcttctgcctcagcctcctgagtagctgggaccacaggcatgtgccaccacgcctggctaattttttctatttttagtagagagggggtttcaccatgttggcc

SEQ ID NO: 96316 - DNA, 12653 bp, Homo sapiens
aatccatcttgaattaatttttgtatatggtgtaaggaagggatccagtttcagctttctacatatggctagtcagttttcccagcaccatttattaaatagggaatcctttcctcatttcttgtttttgtcaggtttgtcaaagatcaggtagttgtagatgtgtggtattatttctgagggctctattctattccattggtctgtatctccattttggtaccagtaccatgctgttttggttactgtagccttgtagtatagtttgaagtcaggtagcatgatgcctccagctttgttcttttggcttcggattgacttggtaatgtgggctcttttttggttccatatgagctttaaagttttttccaattctgtgaagaaagtcattggtagcttgatggggatggcattgaatctataaattaccttgggcagtatgaccattttcaccatattgattgttcctatccatgagcatggaatgttcttccatttgtttgtgtcttcttttgtttcattgagcagtggtttgtagttcttgaagaagtccttcacatccattgtaagttggtttcctgggtattttattctctttgaagcaattgtgactgggagttcactcatgatttggctctctgtttgtctgttattggtgtataggaaagcttgtgatttttgcacattgattttgtatcctgagactttgctgaagttgctttatcagcttaagaagatttttggctgagacgatggggttttctaaatatacaatcatgtcatctgcaaacagggacaatttgacttcctcttttcctaatcgaataccctttatttctttctcttgcctgattgccctggccagaacttccaacactatgttgaataggagtggtgagagagggcatccctgtcttgtgccagttttcaaagggaatgcttccagtttttgcccattcagtatgatattggctgtgggtttgtcataaatagcccttattattttgagatacgtcccaccaatacctaatttattgagagtttttagcatgaaggctgttgaattttgtcaaaggccttttctgcatctattgagataatcatgtgtttttgtcgttgtttctgtttatatgctgtattacgtttattgatttgcgtatgttaaaccagccttgcatcccagggatgaagcccacttgatcatggtggataagctttttgatgtgctgctggattcggtttgccagtattttattgaggatttttgcatcgatgttcatcagggatattggtctaaaattctctttttttgttgtgtctctgccaggctttggtatcaggatgatgctggtctcataaaatgagttagggaggattccctctttttctattgattgtaatagtttcagaaggaatggtaccagctcctccttgtacctctggtagaatttggctgtgaatccgactggtcctggactttttttggttggtaggctattaattattgcctcaatttcagagcctgttattggtctattcagagattcaacttcttcctggtttagtcttgggagggtgtatccgtccaggaatttatccatttcttctagattttctagtttatttgcatagaggtgtttatagcattctctgatggtagtttgtatttctgtgggatcggtggtgatatcccctttatcatttttttattgcgtctatttgattcttctttctttttgaatgaaggcagaaataaagatgttctttgaaaccagtgagaacaaagacacaacataccagaatctctgggacacattcaaagcagtgtgtagagggaaatttatagcactaaatgcccacaagagaaagcaggaaagatccaaaattgacaccttatcatcacaattaaaagaactagaaaagcaagagcaaacatattcaaaagctagcagaaggcaagaaataactaaaatcggagcagaactgaaggaaatagagacacaaaaagcccttcaaaaaattaatgaatccaggagctgggtttttgaaaggatcaacaaaatggatagaccgctagcaagactaataaagaagaaaagagagaagaatcaaatagacacaataaaaatgataaaggggatatcacgaccgatcccgcagaaatacaaactaccatcagagaatactacaaacagctctacacaaataaactagaaagtctagaagaaatggataaattccttgacacatacaccctcccaagactaaaccaggaagaagttgactctctgaatagaccaataacaggctctgaattgtggcaataatcaatagcttaccaaccaaaaagagtccaggaccagatggattcacagctgaattctaccagaggtacaaggaggagctggtaccattccttctgaaactattccaatcaatagaaaaagagggaatcctccctaactcatttcatgaggccagcatcattctgataccaaagccgggcagagacacaaccaaaaaagagaattttagaccaatatccttgatgaacatcgatgcaaaaatcctcaataaaatactggcaaaccgaatccagcagcacatcaaaaagcttatccaccatgatcaagtgggcttcatccctgggatgcaaggctggttcaatatatgcaaatcaataaatgtaatccagcatataaacagaaccaaagacaaaaaccacatgattgtctcaatagatgcagaaaaggcctttgacaaaactcaacaacccttcatgctaaaatctctcaataaattaggtattgatgggacataactcaaaataataagggctatttatgacaaacccacagccaatatcatactgaatgggcaaaaactggaagcattccctttgaaaacgggcacaagacagggatgccctctctcaccactcctattcaacatagtgttggaagttctggccagggcaatcaggcaggagaaggaaataaagggtattcaattaggaaaagaggaagtcaaattgtccctgtttgcagatgacatgattatacatctagaaaatcccatgtctcagcccaaaatctccttaagctgataaagcaacttcagcaaagtctcaggatacaaaatcaatgtgcaaaaatcacaagcattcttatacaccaataacagacaaacagagagccaaatcatgagtgaactcccagtcacaattgcttcaaagagaataaaatacctaggaatccaacttacaagggatgtgaaggacctcttcaaggagaactgcaaaccactgctcaatgaaataaaagaggatacaaacaaatggaagaacattccatcctcatggataggaagaatcaatattgtgaaaatggccatactgcccaaggtaatttatagattcaatgccattcccatcaagctaccaatgactttcttcacagaattggaaaaaactttaaagttcatatggaaccaaaaaagagcccgcatcgccaagtcaaccctaagccaaaagaacaaagctggaggcatcatgctacctgacttcaaactataccacaaggctacaattcttcctcagttctatgggggcgaaatgacttgttccttggtggcattcaaatttttccttcctttcctctgctaagttaattattgcttatcaatctgctttttgtctctccagaacttgctgaaatctcatctattattgttttatttcccactccctttacccccatgggcttttatggttctttttcttttactatcatttagtagagtttgggattgtgttaaagttgcctgtggattgatatttagccatattaaaaacacataaatgtaatgtaactatgaaattgtgactggcacaaactatgctctggcgcctatctggattgtggtcacatcagtgcataatcattttcaaaggaatttagttgtcttagctcatgtgatggactcaaggctgtttttgcagagttctgtttctgttgactataatcattcattttaatgttaaagttgtttactacttgattattggaaggtatctctagactaaaatcattgacataatgaaaagaaatctttaaatcttatttttaaaaagtaatacatgcacatagtaacaaaaatgtcaaatagcacaaaagagtattcactgaaaaataagtctcctttactctccagtcccccagctacccacttcctttccttagaggcaattactgtttctagtttcttgcattctttccgatatattataggtatattcaagcatatatacctttcactgtcactgaaatggcagtattctatgtgtactgacatgtatcttgcttttttcatttaacaatatatcttggcgatattccatttcaatggacataggatcttaccttttttcttctggtggttttacagtattctgttgtattaatacactgcaatttatttaaccagtttcttattgatggacatttaggttgtttccaaccttttctgctacaaatattgctgcagtgaatttcttcaccttttgtacatgtttgagtgtatttgtgatataaattcctataagtacagttgttggttcaaagaatatgtagcttttcttttcttttcttttttttgttttttttagacagagtcttgctctgtcacccaggctggagtgcagtggtgtgatctcggctcactgcaacctctgcctctcccgggttcaagcgattttcctgcctcagcctcccgagtagctgggattacaggcacccgcaaccatgtccagctaatttttggatttgtagtagacacggggtttcactatgttggccaggcaggtcttgaattcctgacctcaagtgatccacccaccttggcctcccaaagcgctgggattacaggcgtgagccaccatgcctgaccaatatatagctttaaaatttgtctttgtctttttgaaatgtcccagagatatttgtgaaagcatccttgctttatgacaataagatgtttgtaggaacattttgctttctttcgtctactgctcaaggaaccctgattccgtttggcagaaaaaaaaagatctgggggattagggggggttttagatttttctacatgactactgttggtagggagaggcaatctgaatgatttaagtaacaaagtgaaagtttttaagggtgcgagttcatgttgatgtttccagtttaacttcaagtcctttcttgcttactgctgttatgagaaatttaaataatttattctttttcttttcatttgtgctaccatctttaatgctcttttatttatcttcttctactaactcaaatatattatgttgcatattgtcataacaaaccatgtatttaaattataatactgttctgggcttgagaaatacctatttcttttctgctccctgacaagataggtttcaaagcatacgagtttagataatcctttatgaccacaccatccaaacacagaactggccgtggaaagaaattttaacctcctgcccatggagtctcagggaattctgagggcatagggcacccagcatcaaaatagagtccccatgcacttaatggaagttaatgggaaggacagctaagcaaacactggcttgtgaggtttttaactaaaaccttcctccagcttttctttcccacgtgccaaaacagtcttggcttttttcctttgagcctcactacttcaacttgtttttttttttttttttcatatttttcttcactgatgctgctgctcatttatttgttataggcagtctgagcactgaacttcaatttttcataggaccttgacttctttgttgacttgaatgacttcaaggttgtcctagtttaaagccatctaagacagtaaaaaaaaaaaaaaaaatcccagaaaatacattatcaagaattgtgagcccacggccacggccactccaggttccacagcaagagcacccagcagaccatgaggaggtgaatcagggtgggcaggtgctgccagatgctggcttcccatcagcgcagaagagagcaatctggactctctggacactgtgcatgctattgacccaatgtagtggcctgtagtgaggacttggcgcctcagtgaatggcactatgggggtctgaccagactccataaagcagaaactgctgccaagaatggtgaggcctaggtaaagatgtagatgtgctcttatgatgtctcaccacctctgatggagccctaccaccccttctatagcagcattagtaaggattgcaggtatacagacctcactgaagatcaactaccctcttgtgagagtctgaaggatactattgcaagagctctggccttttggaatgaagatatagttccccagataaagaagaggaattggatattgattgaagcccatgacaacagccttacaggcattatcaagcatctggagggtctctctgaagtggctatcatggaactgaacctgcttactggtattcccattgcctatgaattggccgagaacttgaaccccatcaagtccatgcagttcttaggggatgaagaggctatgtgtaaagccatggaagctgtggctgcccagggcaaggccaagaagtgaagaccatcaggcagactagtgtcctcagaagcaccctccctgcccatcccttcttctgcccctacttcctgtacgtcacattgaccacatctgtaggcatctgaagttgtagatgcagatggggactgatggctcccattttcatttcagccatttgtctcctgcacccactctcttcaaacaatccagacaggatagcacctctggggcaaggggctcagtccaagcccagggaaatctccacttatccaagagggctgagaggtagtgactcaggtttttaccagggttttgtgtgcaaaggacctgctttagtaagggataggaagaaaacatgctaaggcatggccgatgaggagaagcaagagagcctgtttgcccttaggaggcaatcttgtgttcttctgtagtcaggccacttactggggtactctagtcattccagtggaagatgaacgtaacctgcatggtgatgtaaaataaaaaaatccccaaaccaaacaaaaaaaccctgtttccttcctgaccccagaggagctggctccacttgaagattgagatcaatcctgaattaaatttttgttgcatttacttttacaaaaaaagtatagaaataatatgaaacaaaaaccctcctggggtttctagtggtggttgaaatagtcccacatgtggttatcagaaaataagcccttcctcacaccaatatcagataatctccttgacttgtaagggataggaatacatcctgctgtgtattttggaattcctcccgatatggtttgaatttgtgttactgcccaaatctcatgtggaattgtaaatcccaatgttgtagaaggggcctggtgggaggtaattaaatcatgggggcatatttcccccttgctgttctcatgatagtgagtgagttctcacaagacctggttgtttgaaagtgtatggcaccttccccttttccctcttcctccttctccagccatgtaagatgtgcctacttccaccttcaccttctgccatgattgtaagtttccagaggccttcccagccatgcttcctgtacagcctgcagaaccatgagtcaattaaacctcttttctttataaattacccagtctcaggtagttctttatagaaatttgagaacagattaatacaccccccaccaccttgttttgaggcagtgaaatgcctcttgatcatgtttcagtgtgtttttcatggcctgatttcttttctttctttcttttttatttcaattgtttttgggatacaggtgtttttcggttacatggataagttctttagtggtgatttctgagactttagtacacctgctacccgagcagtgtacactgtaccctatatgtagtcttcccctctgagtccccaaagtccattatgtcattcttatgccttttcattgcctgatttctgaatcatgttctagttgcttggccctgccacatgggcccagtactcattttgggcataaatatactaaatatttttttccagatcagtataataaaggagtgatgtacaattacaaaattgtgatgaaaatgtgccaaataataattttaaaatctacttactaacctcatgtggctcaatttcaataaggtcctataattttcacaacactgggtgtgcttcatgaagaccaattcaaaaaagacaaaagcacaattgaattatccacattatagttacaattttacattcttaatatgcccaggtaactcttgacaccatttcaaataagcttcagtcatatttggcatatactgaggctggcatttttttccacatgaaagcaaatggaaaattgataaaattacagttgtagagaacctcagcaattccaggtttggtgcaaatatccatatttttgctaaatattctagaactgtatccccaactttgcattggggatagatatagaaattattatttgtttaccataggtataaaacctatagttacttttgaagaattaaagccaaccccaaaagatttatgcacctaacaaggttttttttcatactttattagttttgtctaaagaaaaggtttttagtacgaaaatttccagttgtctatgtataaatgtaaatctttaagaatcatttaatataggatatttaccaaagatatgggaactgtgtagccctattctcagcgcagaagcagtgacttctagtgaagatttaaaatgggctcagatgagaggaaaaaactcggaaccctagacttggaaaagaactgttaaaagccccatctctgagcatgttatcacttatggatctttctcttttatctgctattgaagtattatgagtttcagtccagcaaggtcatatttctttaaaagaaaaatcagtgccccaaatatgaaaattacacaacttattgacacactactagctcccatcccagtatggccaaatctttctctgaaaaaaaaaaagtatactaaaatacaaaatttcacaaccttatttctggtaacactttagtttaattgtcacatgattattcaacttcaataacttagatatttatggatcatagcagaactggtagtgcttataactttgtaactttccatgcatagaacccttctaggttaagcacatatatttcaaaaagaagtttcaaaaaacagtttctgaaataatattaggaatgagaaataaataaagggcatccaaataggaagagaggaagtcaaactacccctgtttgtagatgatatgattctatatctagaaaaccccatagtctcagcccaaaggatccttaagctgataaacaacttcagcaaattatcggtatacaaaatcaatatgcaaaaatcactagcactcctatacaacaacattcaagctgaaagccaaatcaggaacgcagtcccattcacaattaccacacacacaaagtaaaatacctatgaatacagataatcaaggaggtgaaagatctctacaagcagaactacaaaacactgctcaaagaaatcagagatgatacaaacaaatggaaaaacattccatagttatggataggaagaatcaatatcattacaatggccatactgcccaaagcaatttatagattcaacactatttctattaaactaccaatgacattcattccagaaacagaagaaggtattttaaaattcatgaggaaccaaaaaggagcccgaataagcaaagcaatcctaagcaaaagaacaaagctggaggcatcacactatctgactttagactatattacagagctatggtaaccaaaacagcatggtactagtacataaacaggcacaaagtcaaatgaaacagaataaagaacccagaaataagaccacacacctacaactattggatctttgacaaagctgacaaaaacaagcaatggggaaaagactccctattcaataaatgatgctgggataactggctagccacaagtagaagactgaaaccagaccccttccttataccacatacaaaaattaactcaagatagattaaaaacttaaatgtaaaacctgaaattataaaaaccctggaaggcaacctaggcaatacaattctggaataggaacaagcaaagatttcatgacaaagacaccaaaagcaattgcaacaaaagcaaaaatggacaaatgggatctaattaaactaaagagcttctgcacagcaaaagaaactattaacatagtgaacagataacttacagaatgggagaaaaattttgcaagctatgcatctgagaaaggtctaatattcagcatccataaggaacttaaacaaatgtacaaggtaaaaacctcaaacaacccaattaaaaagtgggcaaaggacgtgaaaagacacttttaaaaagaagatatgcatgtggccaacaatcatatgaaaaaaagcttaacatcactgatacattagagaaatgcaaatcaaaaccacaatgagatactgtctcatacaagtcagaatggctattatcaaaaagtcaaaaaataacgtgctggtgaggttgcagagaaaaaagaatgcttataaactgtcttcaaccattgtggaagacagtgtggccattcctcaaagatataaaaacagaaataccattcgacctgcagtcccattgctgggtatggaatcaacctaaatggctatcaatgatagactggataaagaaaatgttgtacatatacaccatggaatactatgcagccataaaaaaagaacaagattttgtcctttgtgggaacatggatagagctggaggccattatccttagcaaactaacacaggaacagaaaaccaaataccacatggtctcacttataaatgggagctaaatgatgagaacacatgaacacataatggggaacaacacccactggggcctattggaggagggaggatggaaggagggaaaggataaggaaaaatagctaatgggtactaggcttaatacctgggtgatgaaataatctgtaaaacaaacctccatgacacatgtttacctatataacaaacctgcccatgtacccttgaacttaatagttaaattaaaaaagaatgaaaatgttgtgttctcagttaaatattattaattgtttgcttaagagatgcctttccaagcaaaggattaatgtagatactttgaagcctatgaacactatttttttaacccaattaattagtttcaattgcttttgtacatggcacaaactcaatgtcagaacctcttatatttactcttatacttcgaagatctagatacttgctagcaagcagataaaaattaagaacacacactttaaaaacagagttactctcaataaaatagtgtttataatgagttctagcactcaaaaatagtcacagtttaagaacctagctgcttctttaaagaagggtcagaagagctggaacatcatttattgtttatcctcatcacttccccttaccgttttctatagtttttttaaatatatgtagttctccttgctttgtgggccctatatcatcaacaaatgtcagcgatttcttccacttttcctcgagagtttccttgtaaaaggccagttcatttcccccttatcctcaacacttcatccttggaacaaaattcctaagggtctcttaaaaatatattttttaaaatttccataggtcttgggggaacaggtgatatttggttatgtgagtaagttacttaatggtgatttgtgagattttggtgcacccatcaccaagcagtatacactgaacacaatttgtagtcttttatccctcatccctctctcaccctttcccttgagtccccaaagtccattgtatcattcttatgcctttgcatcctcatagtttagcccccacttatgagtgagaacatacgatatttggttttccattcctgagctacttcactttctttatctatcattgatgggcatttgggttggttccatgtctttgctattgtaaatagtgctgcaataaacatatgtgtgcatgtatctttataatagaatgatttatattcttttgggtatatacccagtaatgggattgctgggtcaaatggtatttctggttctagatctttgaggaatcaccacactgtcttccacaatggttgaactaatttayattcccaccaacagtgtaaaagcattcctatttatccacagtcttgccagcatctgttgtttcttgactttttaataatctctattctaactggcatgaaatggtatgtcattgtggttttgatttgcatttctctaatgatcagtgatattgagctgtttttcatgtttgttggcctgcatgtatgtcttcttttgaaaattgtctgttcatgtcctttgcccactttttaatgggattgtttgtttttttcttatacatttgttttagttccttgtaaattccggatagtaaacatttgtcagatgggtagattgcaaaaattttc

SEQ ID NO: 96317 - DNA, 12457 bp, Homo sapiens
ccctctcttattagttctgtctctctgcagaatgattataacaatactctcatgaagagacaagagagagcttgcttcctctctctctgccctctaccatgtgagggtacaatgagaagatggtcatcttaaaaccagggaaagtgtccttaccagacaccagatctgccagtactttgatcttggactttccagactccagagctgtgcaaaaaaatatgtgtgctctttaggccactcagtgtatgtatttttgttatagcagcctgaattgactaaggcaataggtaaatataaaaattattattaatgtatttttgtaaattttttcttctcctatctgatttaaaaggcattgaataaagctataactataaaactgtgtttttcagcttataatgaataaagatacaatttgggattaaataatagcataaagcaggagtacatagaacaaagctcttttatagcaaatttttgtataatattgactttagttgacattaacgtgaactagattgctttaagttaattgtaatttctactataatctttagaaaaatatatatgtgtgtgtgtgtgtataaacaataaatgtaataaatagtacacttgaaaatatgtatatgtaaccgaagaaaaaacagtaatggaagaatagaagaacaaagaagcaaaagacatgttaaaaataaataatgtacaaattctatcttaccagtaattacattaaaagtcaattaagtaattaagtaaaactccaatgaaaaggaagacattggaagaatggattttataaaaatgatccaatgatattttgtccacaagattcaaagacataataggttgacagtaaaaagacaaaaatgagatatactatacaaacagtaactaagagctgttatcaatattttaaaaaatagattgtaaaacaaaaattgatataaaagcaaaacatatatatattttataatgaaaaaagggtcaattattcagcaatacataacaagtataaatacatgtgaaccacaggaaaaagtctcaaagtacacacagcaaaaactaagaaaactgaaagactaattgataattcagtgataaatattgaagatttcaatgttgcactttcaacaatgaatagaacaactaggcaggagatcatgaagaaaacagaagacttaaacagcactagaaaccacgtataaccataatctatagaatacgcaatcatagcagaatatattaagacatttttgtcaggtactcatgagttccttgataaaccatatgctagtctataaaacatacctcgataaatttaaaaggtattaaattgttcatcatctcttcttgaaacaaaattaaaaacaaaaatcaataacagaagaataattagaaaattgaaacgtatgaaaattaaagaacacacttctaaataaccaatgggtaaaaaaaaaaaaacaaaaaaacaaaacaacaacaaaaacgaaacaaaacmcacacacacacacacacacaaaattacaacataacataattgaaatgaatgaaagtaaaaacccaacacaacaaaccttagccagtcacagtggcccatgtctataatttcagttactcagaggctgaaacagaaggaacaattgagcccaggagttcagggttaggctgggaaacataataaggccctgtctctaataaaacgaacaaacaaaccttttgggatgcagctaaagcattctttaaagggaaatttatgtctgtaaacgccagtataaagcaagaagaatttcaaatcaataacctaaccttccatctaaagaaattaggaaaagtaaaaatgcaaacaacacaaagcaatgagaaagaaggtaataatagtattaagggtagaaattaatgaatagacagtagaaaaaaaaacaataaagaaaactaacaaaaccaaaactttaacaaaattgccagacttttagctagacaaaacaagatgaagtgagagaaaatgtaaattacaaatcaggaatgaagaaagcaacattgttattggccttagagaaatttaaaaaaaaattaagagggaatactatgaactactgtggtcccacaaattagataacctagattaaaaggacaaatttttagatacaacacaaaccaccaaagctgactcaaggataaataaaaaatctggaaagatctataacaagtaaagagattgaaacagtaattaggaaaactacccacaaagaaaagtttgggccctacttcacttcacctgcttcactgatgaactctatcaaacatttaattaataccagtttttaacaaattcttgcaaaaagtagaagaggaaggaacactttcaacttattctgtgtattaccttgataccaaaaccagacaactatcacaagaaaagaaaactatacattaacatctctaataaatacacaaataaaaatcctcaacaaaatactaacaaaccaaatgcagacccatattaaatgaattatactccattaactagtggttactacactaggaatgcaaggttgatataacatccaaaaatcaatcaggataacacatcatattaataaaggacaaaaatcacataagcattttcatagaagtagaaaagtatttgacaaatccatcatccttacatgataagagctttcaagaaaaataagaatagaagggaactcctgaacccgatgaaaagcacctaccaaatagaagagaacttcctaaacttgattatccacagctaatatcacacttaagcaggaaagactacatgctttcaatcttagatcagaaacaggataaggatgtctgctctcacctttttattcaacattgtcctgtagattctaaccaggacaattatgcaagcaaaggaagtaagtattcagattggaaagaggcaaaatcgtgacgactcacagatggcatgctcttgtatatagagaatcctgagaatttcacacaaaaattagaactaataattccagcaagattgcagaattcaaagtcaatatccaaaatcaattggatgtctatacattagtaatgaaaagtctaaaaatgaaatgaagaaaacaattttatttataatagcacaaaaaacaatcacttataaataaatgtaacaaaagttcaataattgtacattgaagactacaaattttgttgaaaaaagttacagaaaatctaaaaaaatgaaaagaactggaagacaatattgttaagatggcaatactctccaatttggtacacggattcaatgcaatgtctaccaaaaaaatcaattacctttttctaaaaaaattgacaagctgatcctaaaatatatatgagaatgtaatggctccagaatagtcaaagtaacacttaaaaagaatatcaaagttggaagattaatacttcctgataatgagatttattacagaactataataatacagtgtgtactacataagaacagacaaataaatagaattgagcatccagaaatatagcttacatttatgatcgtttgattttagatttgaattccaaaaatatttaatggggaaaaaacagtcctttaaaaattgtgtgaaaatagtcttcacaattgccttttcaacccaattatgggttgaaaagaatagtcttttcaaagttcttcaggcaaagaatttatttggaccccctatttcacacaataggcaaaaatgaacctaaattggatttaaatctaagtgtaaaagccaaaattacaaaacttttagaagagagaacatacgggaaactttgcatgacgttttgttaagcaatggttttttagacataacaccaaaagtatgagacaaaaacatctaggaaattgaactttatcaaaattttaaaattagtgtatcaaaggacacataaagaaatgaagaaacaatgcacacaatagaagaatatgcttacaaattatatatttgatacattacttgcactcagaatatattaagatttattacaactcaacaatgaaagaagaaattaaaaaataggcaaaaggctggagtacatatttctcccaagaaagacaaaagactgacaagtacataaaacgatgctcaacatcattattcattaggtaaatataaatcaaaacctcaatgaaatactacctcacacctaatagaataaccaaacttaaaaaaaaaaaaagacaatattggctgggcgtggtggctcactcttgtaatcccagcactttgggaggccaaggcaggtggatcacctgaagttaggagctccagaccagccttgccaaaatggtgaaacccctgtctctactaaaactccaaaaattagccaggcatggtgattggcctgyagtcccagctacttgggagcctgaggcaggagaattgcttgaacccaggaggtggaagttgcagtgagccaagatcgtgccattgcactccagcctgggcaacaagagcgaaactccatctcaaacaaacaaaatatccagtgtagatgaagacatggaaaaaaatgaaaattctcataaatttctggttttaaaatgaagcagccattttgcaaagttgtttggcaggtcctcaaaatattacacattgttttttgtgctatcataaataaaatgattttcttcataccatacactgcagcaatttgactcctaagtatacactcaagtggaataaacatatctgtctttataatcactgacacatcaatgttcatatttgcattattgataatagtcaaaaagtggaaacaatctaaatgtccatcaactgatgaatcaataaacacagatgtgatatatccatataatatttcattattgttatagctcataaaaaggaattaaatattgatacatgctacaaaatgaacaagcctcagaataatataataaaggaaaaaagcaagccacagatgactacatatttaattattctatttatataaaatctccagaacaggcaaatctgaagagaaagaaggtagattactggttaccagaaaactgggagtagggaggaatgggagtgactgctcttgggtgtggggttccttttgggggtgatgaaactattataagattggatagtgatgatggttgcacaattccatcaatattctaaaaaccactgaattgtacactttaatatggtcaatttcatgctaggtgaattatataccaataagcctttcattacaaaaagtaaaaaggaaatagctttaaaggaaataatcatttgtttcatccaaagcataggtcttaacttctttgtccaaaattctgacagaaaataacaaataataaaaagtaagtataatcttcacaggaatttttaaaggtttattccacctcactctattgttttgttacaatgccttcagcaaattgcaggaattcatgaagcttgcctgatagagggcagctgaataaaatttacagttcaaagtatgacaggagcacaaactgttaaaataacattcagatttatcagattatctctttaatttaactgttataaaaataaatttattttcacacagtacaaaatttattctcattatcattctattgcaaaaaggaaaaggaataaacaatctgacaagctgaaaatcagcaaaacaactgaaattactttaaggataagatgttctaaatgtctattgtaataaacaaaacaaaaaaattgaatatgactgtagtagagtgtctcttctctttcgtggtaaattatatggaatatgttttcagatttcaattacatttttaaagctttaaggaaagagtttttctttgtggttctgaaataccattaaaatagattacttatgttaattgatgcatattaaacagtgacaatcgttctttctttccctactaaagtgtacatctttgtacattgaaaacaaggatatataaactagaagttagagaccagagacccaactcaggacctgacaagatggctgggctgcccagcaggatcgtcaaggaaacccagcttttgctggcagaaccagttcctggcctcaaagcagaaccatatgagagcaacatccattattttcatgtggtcattgccagtccctgggattcccactgtgagggagggacttttaaacttggactatttcttccagaagaatacccaatggcagcccctaaagtgcgttttatgaccaaaatttgtcatcctaatgtagacaagttggggagaatacgttaagatattttgaaaggtaagtggtccccagccctgcagatccgcacagttctgctacggatccaggccttgttaagtgctccaaatccagatgatccattagcaaatgatgcagaggagcagtggaaacaccaacgaagcccaagccatataaacagctagagcagggactaggctatatgccatgaataatatttaaattgatccgatcatcaagtatgcatcacttctcctgttctgccaagacttctttcttttggtttacatttaatggacaaggtcttagaaacactacagaataaaagcccagacttcttcagtcctttggtgattaaatgcacattagcaaatctatgttttgttctgattcactgtcaaaaagtatgagcagaggctagaagtatcgtctggactgttgggaaacgtttaaaagcagtggcccctctctgcttttattcatttccccaagcctggtttaagtgtaaagcactgtgaatgaaggtagttgtcaggttagctccaggggcgtgggtgtttttatttattttattttattttattttattttatttttttcaggggggaggtagttttattttaatttatgagctcctttcccacctttttttggtgatctaattgcattgattaaaagcagctaacccgttcttttttttttttttttttttttttgagacggagtctcgctctgtcgcccaggccggactgcggactgcagtggcgcaatctcggctcactgcaagctccgcttcccgggttcacgccattctcctgcctcagcctcccaagtagctgggactacaggcgcccgccaccgtgcccggctaattttttgtattgttagtagagacggggtttcaccttgttagccaggatggtctcgatctcctgacctcatgatccacccgcctcggcctcccaaagtgctgggattacaggcgtgagccaccgcgcccggcctaacctgttctttagaatatgttccctagccaagtctaactttatttagatgctgtagatggacaagcttgattgtttgaaccagaatgggaacattaaacaaacatcacagctctcaataataacactgtgactttgctgtcaagtatagattctccccttcagaaaaagcttgtgaccattttgtatggcttgtctggaaacttctgtaagtcttatgttttagtaaaatgttttttgttataaaaataaatgaaaatgaaaataaactaaaagactaaattctaccagaataatatatatcttagacttattccttctggtgttgaatattgaaaggatttacataaaatcttgaacataaaacacttaataaaattaacttctataatcattttcataaaaataaaatataatcaatctcatccagtttttaatgtacagtctctcaaaaatatatttctcaaaaattttggcttataatggatacatgttataaatcaaggtatatgcactatatttcttcacattgtatattattaataatttatgatattactcagcattaaagttctaggataaaaaaacttctagagtagtaactataaattataataatctttattcatctgaatatatatcaattttttttaaaaaacaacaaaaccaaacatctttctaatttatctcaaagtatggttaattcgaattccatcaaatcactggtatttcaataatcacgtgtttagtttcctgtatttttaagataaatacacaattagtgttatcgaattaattaacattaattttgtgcttaactgtttccagattaaacaagtaatatcttttcaccttcccagcaacctttctgatgctggtaatgttattatatttcatttcctgaacatggaaatagaggctgaagcaaggtcctttttccttgaatcggcttccctgctttcaagcatcagggtctattcctgaggattctactcaggctctggaactgccaagtgttgctttcacacgcaacaaggacttatttaagaactataacttcaatattagaactctgtatcagaatatcatatagcagataactcgggcggctcttttggttaaaggtgactggaaaagtatgatagtcacagtgagaggtgacaacgtgctggcagccctcactcgctcttggtgcctgcttagcggcctcagcatccactctggccatgcttgaggagcccttcagcctgccgctgcactgtggaagcccctctctgggctggccgaggccagagccagctccctctgcttgtggggaggtgtggaggaagaggcatggggggggggatctggtgctgcgtgcagcgctcgcgggccagcgtgaattctgggtgggtgtgggctcagcaggccccgcactcagagcggccagcctgtgcagccagccctgggcagtgaggggcttagcacctgggccagcgtctgcggagggtgcaccaggtaccccagcactgccagcctacccgtgccgcactagaattcttgccaggcctcagctgcctccctgtggggcagggcttgggacctgcagcccaccacgaccgagctcccccacaaccggtgggctcccgtgtggcccgagcctccctgatgggcaccggcccctgctccacggcacccagtcccatcgactgcccaagggctgaggactgcgggcgcactgagtgggactggtgggcagctccgcccgtggccccagcacgggatctgctaggcgaagccagctgggctcctgagtcaggtggggacttggagaacttttatgtctagctaaaggattgtgaacgcaccaatcagcactctgtgtctagctaaaggtttgtaaacacaccaatcagcactctgtatctagctaatctggtggggacctggagaacttttatgtctagctagaggattgtaaatgcatcaatcagcactctgtgtctagctcagggattgtaaacgcaccaatcagcactctgtcaaaacataccaatcagctctctataaaacagaccaactagctctctgtaaaatggaccaatcagctctccgtaaaatggaccaatcaacaggatgtgtttggggccagataagggaataaacgcaggctgcccgagccagcagtggcaacccacttgggtccccttccacactgtggaagctttgttctttcgctcttcacaataaatcttgctgctgctcacccttttggtctgcgctgcctttatgagctgtaacactcaccacgaaggtctccagcttcactcctgaagccagcgagaccatgaacccaacagaaggaagaaacaacacatctgaacatctgaaggaacaaactccagacacaccatctttaagaactgtaatacttatcacgagggtctgcggcttcattcttgaagtcagtgagaccaagaacacaccaattccagatacattttggcaaccacgaagagactattgcctatcgccaagcggtgagacaactgcctgtcaccaagcggtgagaccatcacctatcgccaagcggtgagtaccatcggaccccttttgcttgctattctgtcctattttttcttagaattcaggggctaaataccaggcacagttaaaagcgactagcgtggctgccagactgaagacacaggtgtcaggctttctgagaaagggctgtctaacaacccccgactcttcggagttgggagcgttggtttgcctggaaccagcttccacttttcctgttttcctgggctgagtcgagggtcgacagagaggaaagccattcagctccggggtgccgacaacaagttggttgaccatgcggccatgagcagaactctcaaaggcatgtcacccaagcaagactagcccatctattctatctaccctgacccttgactcctgggtcctaatgcctgccagacaaaacttcctctcacctctcttctctgaggctagtccctcttctaaaaatcactccctgtctctggtgattttctattttctcctgtaagaatgatttctagtataaactccaggattctgttatcttctttaggcacctgggctcactaatcagaaggacacaatttttgcccaaagccctgttgtaggggagactacctggaattttaggatccctcctcagacaagcaggcctaacaaaagctattcctgaaggtaggatatgggtagcctcagaaattgtatccttcctattcatgtaagtgaggacaaagggcatcactcttccaactctggagatcccttccctccctcagggtatggccctccacttcatttttggggcataacatctttataggacacgggtaaagtcccaatactaacaggtgaatgcctaggactctaacaggtttttgagaatgcgttggtaagggccactaaacccgatttttcttggtcctctttgtggtctaggaggacaggcaagagtgcaggttttcaagaatgcatcagtaagggccactaaatctgaccttccttggttctctttgtggtctaaggtgaaaactagtgtttctgctgctgcgtcagtgagtgcaactattccgatcagcagggtccaggraccattgcaggttcttgggtaggggttgtttctgctgctgtgttggtgagtgcaactattctatcagcagggtccagggactgttgtgggttcttgggcaagggtagaaacaaacaaaccaaaactgggggcatttttgtctttcagatgggaaacactcaggcatcaagaggctcacccttgaaatgcatccaaagctattgggaccaatttgacccacaaaccctgagaaagaggcggctcatttttttctgcactatggcttggccccaatattctctctctgatggggaaaaatggccacctaagggaagtacaagttacaacactatcctgcagcttgaccttttctgtaagagggaaggcaaatagagtgaaatgccttatgtccaagctttcttttcattgagggagaatacacaactatgcaaagcttgcaatttacatcccacaggaggacctctcagcttatccccatatcctagcatccctatagctccccttcctattaatgataatcctcctctaatctcccctgcccagaaggaaataagcaaagaaatctccaaaggaccactaaccccccaggctatcggttatgtcctcttcaagctatagggggaggggaatttggcccaacccaggtacatgtccccttctccctctctgatttaaagcagatcaaggcagacctggggaagttttcagatgatcctgataggtacatagatatcctacatggtctagggcaaaccttcaacctcgcttggagagatgtcatgctactgttagatcaaaccctggcctctaatgaaaagaatgcagctttagctgcagcttgagagtttggagatacctggtatcttagtaaagtaaatgatagaatgacagctgaagaaaagaataaattctctactggtcaacaagccatccccagtatggatccccactaagacctcgactcagatcacagggaccggagtcataaacatctgttgacctgtgttctagaaggactaaggagaattaggaaaaagcccatgaattactcaatgatgtctaccataactcagggaaaggaagaaagtccttctgctttcctcgagcagctatgggaggccttaagaaaatatactcccctgtcacccaactcactcaagggtcaattgattctaaaagataagtttattacccaaccagctgcagatatcaggagaaagctccaaaagcaagccctgggccctgaacaaaatttggaggcattattaaacctgtcaacctcggtgttctaaaataggaaccaagaggaacaggcccaaaaggaaaagcgagatcagagaaaggccgcagccttagtcatggccctcagacaaagaaaccttggtggttcagagaggacagaaaatggagcaggctaatcacccagtagggcttgttatcagtgtggtttacaaggacactttaaaaaagattgtccaatgagaaacaagctgccccctcgtccatgtccactatgccgaggcaatcactggaaggtgcactgctccagagaacgaagattctctggatcagaagcccc

SEQ ID NO: 96318 - DNA, 13107 bp, Homo sapiens
aacacagagatggctcctatctacatagagtttcctaattctagtgaacaggaataaacgaattcccaactgaagtcctcatatagactcatgatttatttgagtagcaagatttatgaactatttctcattgaaaagatacattggttcaattttttaaaaggattaagagttaaactaccaaccccagaatccttagaacctggattaagaaacagaaagatcaccgttaaatgaatagtccaagagatggaagtggaaaatggaagctttgttcttaaaaaacgtaaaagagacaaacagtaaaaccatttccatggtcttataatgctgctccaaacacatgcattacttttaaaaaaatttataaaatgaattcagcacatggaaacataaaaatactgttaagcagttcagcaaagaataccaaatggaataaccttcattcttaaggctatgttgagtgccttattttaatcaggtaatttcaagtgttgcctttgaaccattccagtctggcttcacctcttctcactgcctccactcctacgatcatgaacttctttcagggtatcttacaatacattatagtcgcttcagagtttttgaacatactattcctacactccaataacattctctccaaaccccttctgtccctctctgactcaaccttacggtctcaccttatagtctggcacaaatttttcccgagcttctctggattaggttaaatctccctggactatgttccaaaagcaccatgagctttttgctttcttagaacttctaaaatttctaattagaaatttaatgtttcattgaccaggatgtgtggaaatatattcccagagtctgagacagtttctagtacctaatttggagctgagtaaatatttgttaaataaacattaaaataaaatatagatagccatatccttactatttttttttgttccacatattacattgtaataagaactttttttctctggtgtatacatttaacttatcttatacttctcaatactaaataaaaatcctctgacttttctaaattagttcctagatttgatttccttacattttatcctatctcctttttttcaaaaaaaaatccaatatagaaaatatctgacttctgttaagactaatatttataatttataggtgacagcaaaatatagtgaaaaatagcaacttcaaagaaataagaacatagacaagtaaaattaaaataacacaatctatgacatattttatatactccaatcaagagcaatctgaagatatcaactaaaataaccatagtattaaaaagggcggctgagcgcagtggctcacacttgtaatcccagcactttggaggctgaggtgggtggatcacaaggtcaggtgttcaagacaagcctgatcaacatggtgaaaccctgtccctaccaaaaatacaaaaaattagccaggcgtggtggcatgtaactgtagtcccagctacttgggaggctgaggcaggagaatcgcttaaacctgggaggcagaggttgcagtgagccgagatggcaccactgcattccagcctgggcaacagagcaagactccctctcaaaaaataataaacaaataaataaataggctaaatgttgttttcttttgaattctagctcttttgtgaacaaaaggccaaaatgaaaaactgagataatttcttgtaagattatctttctgtccagcctcatgttcctgaaaagaacattaaattccctcataaaacattgtgtcaactttacaaatacaagtagactttattctacttctaaaatcatattcccactgaactagatgagtcaatgagtcaatttaatataatttgaatataagactttgataccctaatgggtacagaaactataattgttgaccagaataattctaattcatactaaaaagattccatgtttttaccaaaagagatttcaggatgagatttccaaattaaaatattaaaatttaattccaatagtcaaaactaagttttgttaaggtccatacagactgccttactatttattttcttcaactcttgagaatgttttcatgagaatagagtaacagacttaaattagatttgactatcactgaagagagtaagaagttacaatttcatctcaattatgctctgtgtccttccctaacttcttaacatcccagatggcattaacattctttttcctcctatgaccacatctctatttggaacatatacacttatcagtattatctgctgcaccaaggcttacccacatccactcctggtaactaaagaagatgcggacattgacagattcagttcatcttttcacaacctgctaaaacaggcttgatttttttctggttgaactgcctgcctatctacctccctcccttcctatctacctgtctatgttatgtgttctctggtaagaaaaaatgtgggaaaataagcaaaggactccaaaaatccatctttactttgctcttggcttcctactcatttaaataaagaatggtggctagaacaactaaagcataatgttgaaaaacagaagctatcctgcacctttcaaaacgtaataatgctacatttcatctgtgcatagcccacagtgaggagatgcaggtatctacacttttccaaagtcaaaccaaataattactactaagacctaaacctaagaccttttcttcacagcatttctaagagatcttgaaaacacaggctctcaccagggttctgtaactaactagcaatgtaaccatgagtaactacatagccaagagtatcctcagtaataagattaagggactggtgtttagattcaagaccaacaaatttgtacgcctgatctacagtaacggaccaatatactgagatagcagggtttgtaacacagaaagaatttaataaccacagggtggctgagaaaggagatgggaggagaccctcaaatccatctcccagaggagttctgggctggggattttaaggagatagtagagggcaaggggctggaaatttggggtcattgattggttggaataagggagatgaaatcatgaagataccgagtgcatttgctgagacagctcaccgtcagaccagctggtgcctgtagtttcactggtatgcaggacctgaaagtgtatctcaaaggtgccaatgtgcctttggaacagttaaaaaaaaaaaaaaaagagtatctcaaagggaaaacttaatgtttcataatgttcaagttgttttctatggagcagttaaggagaattataatctaaggtctttgtgatcgtaggacaataggcaccaaacaactatgaagaagcagaccagagagcaagcctgacctagtgattaacgctgaatgtgctgcaagcttggtttttgtttctccccatcccttcttccctgattaattttataagtttatagggagggtttcatttaaaagatggtccctttaaaataattttttaaacccactctacagattcccatagggtaataggtataagctgttattatttgttgtttgaaagcattaactacaggtgccacaaatttagaaacataatttttcagttgatgatttagatttacaaagtaattaagtacatttgaaaatgtggaataacagacgtgtgagttatattatttttccagtgtttatacaatgcttgggttgcatatgtatccctggatccttataactctactcttctttctctcacaaaaagtccaaggctaccaacctcagaaactctgacctatacagacatgttcccttccatcccctaacactcccaaagtttattatctacgatgttcacctcttccaaagaaaaaaaaaatggaatgaaaagaattacagggaaaagataaacatgatcacctctcagtcatctactgtgacattctctaggggcttagaattcctttacttcctgattaaatcccccaaaactcaattcacgtagtcttcactcctgaagaacatgaatgagacagaatgtgtttgagaaactcagtacctagattgttatctgagactttatgcctgattttgctccctaggtacctacaaacaatttttggatgtactgttatgtcttattatcttaaaaaacacactttaatatggtttcttctacttaagaaccaaaattatctcccaattgtctatcatagaaagcttcagctttgataactgactttcaagattagaataacctgggctccgactatgtatccaaaacaatttaacatataaccttatgacccaaacctgacaaagacagtataaaaaagaaaaagtagagactatttaattccttaataaaaaactctatcaaaatattatcaaatccatcagtgtttgaaaaaaataccagaaagaggcagtttacaaaaaaatagcaaagtaatcgatatgattttttcacaaattagaaagcaaacatcatatgattcaaaaccataagattacatcattagacacagaaaagtatttggtattttcagcagctatttgcattagttacctatggctgctgaaaacaaattactacaaactcaatagcttaaacaaaaagaaatacattccctcacaaagtccaaaatagtttcactgggcagaaaacaaggagtcagcagggctatattccctcttggaaatctgctttttgcctcttcctccttctagctgccagcatttcttgacttgtggccattatcccagtctctaccttagtgatcgtaccaccttctcttatgtatgtctgtgtcaaatctccctctgcctctctcttataaggacatttattattgtgcttatggcctacctagataacccgggatagtctcccaatcttttttccttttaaggtaatgcttacacagtccacagagtagcagtttctatctgtgaggagctgttattctgcctactgcactactactaaaatgggaaggggaaggggaagggaaagggagaaaactgtatgtatcggtttgctagggctgccattaacgaaatgccagactgggtggcttaaacaacagccaccaacaatagcctccagattttcaacaacagcctccagactttcagttctggaagctgaaagtccaagatcaagttgtccgcagggctggtttctcctgtggcttccctccttggcttttagatggtcttgtctcataggttttctctattaaagcagacacctggtagctagtctttttcttacaaagacaccagtcatactggataatagccctatccttatgatctcatttaaccttaattacatcattaaaggccctatctccaaatacagacacattgggagtgacagcttcaacatacaaattttgaggaagcacaattcaatctataacactgtctaaaaatattaatatgggggtagagtcaacgccctattcaaagctaactgggattttccagtgacaaaggaaggaatgtaagttcttttggagcccttactactcgactactattcaggactgtccctaaaatgttctcatagtatttattctttcttctattctgcctcaccaagagaatgcttcttgggaatatggttctactttccttgcttccaagaaaatttgtgtcaaacagggattagggaagctcttaccactaccccatatacctgtcctaagtaaaggactcttggttttatcaagttggataaatttctttagaaaattgcattttgctgtcattaggaagcatccttagaaattgtgtgaggaaaaactatttttaacagtgaaaagtaataaacaacttaaatgtacacaatagtcaatatttataaagaatttactattaagagtggttgatttggagcagtatgaacaagaggcaagaacgacccctggactcaccaaagcccacatgcctctgcatcctacgcccagtgcctatgtcccaccaccatcactgccaccaccatgcccaagagaaaggctgaaggggatgctaaaggagataaagccaaggtaaaggacgaaccacagagaagatctgcaaggttgtccgctaaacctgcttctccaaagccagagcccaggcctaaaaaggcccctgcaaagaagggagagaaggtacccaaagggagaaagggaaaagctgatgctggcaaggaggggaataaccctgcagaaaatggagatgtcaaaacagatcaggcacagaaagctgaaggtgctggaggtgccaagagaagtgtgtgcatttttgataactgtgtacttctggtgactaaacagtttgaaatactatttttaccaagttttataaaaatgcaaaattttgttttactttttttttttgagctatgctgttagcacacagaacacttcattgttgttttgtggggaaggggcatatgtcactaatagggtgtcttcgaagctggattgatgtggggaaaacacttttcccttctagttttgagagacttactcttggctcccaggagggattccgcgactttgacacatatggccaccttgrcacaaaagccttgtggtatggaaaaacaaaatcatttttatctctcttctcccttcccatctatcagcacagacttaactcccttaagcccagacatctgttgggacctgacctccagtcattggttaccagygtgtcaggcaatctggacttttccgggatgccactgagatggcacctgtcaaaagagcagtggttccgtttctagattgtggatcttcagataaattctgccgttttcatttcacttcctgatagtcagggtcagcttgtgaaaagttgttaaacaacatgctaaatgtgacatgtcaaccctcactctaaactttgcctgttcagagcatcagatgmagacttcattgggttttatagtggctttctgattttcggtagtccattgaagaaggtagttaagtttgaaagttgttgtgtactgttaatgactgtctgcccatgttctgcctgaaataccacgactgtttmtggaaagtatctttaataaagctggatacagtttggcttggaaaaaaaaaaaagagtggttgatttgcacagtgggattgcggggacttttttttttcttcttcatacttgtttgtattttccaaatcttccctaaggtcatttattacttttagaatttaaaaattattttataaaaatatgtaaagctctggttttttaatgactatgtaatgactatgtctactcaaaagtatcttcaaaatgacctatttaaaaatctatcccctcaaaacatcctgataaatcctttcatctttttttggactaaaaatacagtgtaataactgaagaacaggttaaaaaatgttaactaaactgtaatttagaattgatatgattaatttatatccactttagaaatttctatgctagggcccggtgcagtggctcacgcctgtaatcccagcactttgggagcctaaggcaggcagatcatgaggtcaagagatagagaccatcctggccaacatggtgaaattccccatctctactaaaaatgcaaaaataagctgggcgtggtggcgcacacctgtagtcccagctactcgggaggctgaggcaggggaactgcttgaacctccgggaggcacaggttgcagtgagccgagatcgcgccactgaactccagcctggtgacagagcaagactccgtctcaaacaaacaaacaacaaaaacaaaaaaagaaatttctatgctagacatgtgtaacatctgctgatgactgtaatgtttgtaatagttctagtgaaaatatgggacttgtacaaaaacataacctattatgaaactatctctatgacaacatcagatttgttttatgcttctactgaaagcacaagaacaaactttctagtccatataagtactgtatacatgctaagtgtgatgagtttttctaccttttgttaacatacatttaaaaactcaatcttcctcaatgagaaattttctgattaatttgcgtctgtcctttttccaataataaagatcttgtgtaatggttaaaaatataaatttaaaaacaggatttccttaatgttaaagatgtaggcaaaaatattggatactggggttcttttaggattaaacctctaatctgtctaattggagaaaattatcaatgtggtaatggtctggattgttttacttcagaacaactgttccctgatatcaaattctataaatgataaggcctttcctttcccacgaatggcaactttagaaatagcttttctattttgacctctatattaagaaggacaaaaaacattattttccttctaggtattcagtatattttccaatattcatctgcaaattttcttcacaacagcaatgttattttttttttaaaagaagactccacattgattacaagtaaacagaacatattaaaagtataaacaaatgagaagaggagaaaatgctatttatttttaaataaagtactatatttatatgaattatatatacatatatatatatatatatatatatatatatatatttctttttttagctggactcccactctgtcgcccaggctggagtgcagtggcctgatctcagctcactgcaacctccgcctcccgggatcaagcgattctcttgcctcagcctcctgagtagctggaactacaggcacacgccaccacgcctggctcatttttgtatttttagtagagacagggtttcaccttgttggcgaggatggtcttgatctcctggcctcatgatccaccagccttggcctcccaaagtggtaaaatatttaatataatattcatgaatttttcaaattttataaaagctagatgtagcagtaatgactccctcactaaatgaatttgaccatactgcatcaatactagctataatacttaaaatattttgaagtattttctttgatataaactttatatacttacatctgtataaaatgttgactatacaactattcatttctttttcttatattccataacacccaaattttttacccatttgccgattcaaacactatttaaaaatgaggctaataccttaaaatgagagataccaaaagtataattattatatatcaataaaatatattttctctcaaaagaaactaaaccaatatgggtaaaaactatattaaggattactttttaggaaaaacaccacaaactattaagaaaaaatgaaaatcctctatttgcatagaaggctggggagaaaagacctccaatatctcaactcatctccagccccataatttgtgactaataagtgggaatgaaagtatagaaaatctgcttcacttagctaacagttaggattataaaagagatcgtatttttccaaaatattatgataaaagcttgctacacactgctttgattataaaaagaagaatcactgcaggaaacaatgtagcagacatttaaatgggtatatttcctatgttaatgtatactgaggcctggagtcccaaaattgaggccataatttaaccgcagataaatgaaaaaatgataatactaatgaaaagatcagagtaaaaagagatttcaatgcaattcaatttaacaaatattaagcacccattaattgcctggttttgaaggtcacatagaacaccttgaagaaacttctacatgttttagtttcctcatcaaaatggcaataccatttaatgcttacagtggttaagatccagtaaggtaatatgtaaaagtgcctgtaacaattaaacatccaatgaatgactgtttattctattatttttattaacataaccaatgtgcttctttctttggtgacagaataaaaaagttttgttttaaaaaatttaatttccacattagcaaaacagcttcacatttgctcattaatgtagttagtaaatttcatgagagtggatactgtaattgtgaaattactgtctactttagaaacattaatgaagacaaaaattatattttctatttcttcccttgttcatttacaactttatggttctactttccaagaagtttgcatcccttaggcaatacaaaggtccagaaagcaacagctaaaggtttaaagacaaagtttgcctctcaagtccaattcagagagaatgaaatatacacaaacacaataatcaaccattgtttaggctaccctacataatatactactattgtctgtaagccacagagtgagggttctgtattttcataaaagcaggatttctaaatatgataattaaaaattcaagccaaagttgttttaaaatattctattccatgaaaaggactgaatgtaaaatacaaaaaaattcctttttgtcccttttaacaacaaatttgggtatataagtaaaatttcataaatcattcacattttatcaagcaccttaacatggtatttgtactaaaatacgaatcacataaagaagaaataacactgtattatgaaaaggtcacaaattttctggaaaattaaaataagactaataaaaaaatatatggtatctaagtttttcctcactaatatgcaattagtgaggaaatgagatggcaaatggtaactcaatgtaaaagacttctgaacaggttataaatccgttggtccttaacctttcatgggttacagacttgaaaatactcatatatccttcacagaaaaaatgtgtatgcacgtatacacaaaatgtggcagacaatttcaggagtttcacagatcttctgaacacagaccctatacaggttaagaatctttacacagatccttaatattcagtgattatttttaccatgacccagaggtccagggtctatgctaatttatcattttgctgagacccacatgtgactcacactaacagaaagctgtaagactgatgtgaagtaacaagaactcaactagcaagggagcctagtattcacatctgtttgagtctggcatctttacaactcatattagtggaaaaattattaagaattgctttagtagtaatcattaatatattcagaaggtctctgaacttctcataattaaaaagggaagactgttttttcataccctagggctccttggcaagttatatcataatggtattctagcagaaagcaggccaataaaatatgacaaaccaatcaaaaaataaagcatattatctttatagataatcattaacatacttattaaatccctaacatattaacttcctatcattgtgtaatttacagagacaaaagatacagacccaatcttctaagagcattcactgttacacaccaggcttatacctgaaaatactgacccaaaaaaccacatgacataaattttattatggataccccagaacaagtaattttaagtgtcagatatatacagaatattccacagtttctataatcattaaaattctaacatacattttctgatagccttcgatgtttgtactaagttatataccactattaagttgaagcaaaccattaaaaatccagctagttttcttaaagttggtctcataaaatgtgatgaattcattatttaacttcaataaaatgtcaatagtaatttcattaaatagtatacagcttacatgcttattttaaaatcagaagttctatacatctatcaccctggcctatctcttcactttacacccacatgaacctatccaacccccctcacattctatacacacacacacacacacacacacacacacacacacacacacacacacacacacagcatttcagtaccttctgtcactggaacctcatttctgatattcattccccttgcaggcctgctctgcaaaaagccccaatcctctgcaaaaagccccaatacagaaggactaccactggcttggatatgtagatatatttacttctattcttcaaaagataaaaggatgcctggagagaggattactacttctacttttataacttcaggagggaaaaatacagttcctggcttatcaaattgtagctgtgactgtattttcccatcaaaccactgctacagatggttatttctatggtattatttatattacgctaagttacattatgaattaaatcaacttttgaaaggaggaacagaaacctaaagaatatttatcaagttgtgttcaggggaaggaattaagaattaaaatacagatggtaatagtttactgtgtatgatgtgtacagggcaccatggcaagtagtttacatatattctcatttaatcaacacaaagaaacaggtattatcattacttgacacataagaaaaccaaggctcagaaagtcagagctggaagtcaaatgtcattctatctgatccaagtctgtgctgttagctatcacacttcattgttttgtatgtatgtttcaagttttaaatatcattgtaaaatataatcttaatatttcatgaacagttgactgcctctgtgagagagtgtgcgtgtgcatgtgtgtgtatgagtgtgtaatgtagctgcaaatagacatttattaaacttgttttgctttttggaatctacttatttaaaatactccatatatttgagaagcaattgaaaatgcatccatgtatgttatttgagcgttactagaaatttatttatacaaatccatattaatgtgctaataagtgacaaatatatatatagtcatgcactgaataatgatgttttggtcaatgatgaactgcacatacaatggtggccccataagattaaaatagaaccaaaatttcctatggcctagtgatgctgtagccatcataatgtggtagtgcaacccattaccttttctatgtttaaatatacaaatacttaccactgttttacaattgcctatagtattcagcacagtaacatgctgtataggtttacagtcttagagtaacaggctatatgatatagcatagctgtgtagtaggctataccatctaggtttgtgtaagtatactctatgatgtttgcacagggatcagattgcctaacaacacattt

SEQ ID NO: 96319 - DNA, 17921 bp, Homo sapiens
gacctcttagcaagaatcctgctaagtcaatactgccaccattgatatctgatcaatttccctcatcccccacccttcttgtttaagtacatgaagctttagcaagaagctccctacccttgatgtcttcttaaatattccatccactgaccccctcaatctgctcattggctataaatctccacctgtctttgttgtatttggaattgaacttggctctttcctctactgtggtagtactgaataaaatctgtcttcatcggccgggcgtggtggctcatgcctgtaatcccagcactttgggaggccaaggtgggcggattacaaggtcaggagttcgagaccagcctggcgaatatggtgaaaccttgtctctactaaaaatacaaaaattagccgggcgtggtggtgtgcgcctgtagtcccagctacttgggaggctgaggcaggagaatcacttgaacccaagaggtggagggttgcagtgagctgagattgtgccactgcactccagcctgggcgacagagcgagactccgtcaaaaaaaaaaatctgtcttcatcatctttaactagtgttggactccatttctcttcaatgatctccagaatattttccttctatcttctaaaattctagtttatagtaccattgcaatagcttcctaaaggttatatggaaatacatgcacacatatgtcaagaaccaagttcctttttcctcctagagagttcagtggttttagcaaaaggagaactccaagatgggcctcaagagctattacaaaacatttgtaggctaggcgcggtggctcatgcctgtaatcccagcactttgggaggccgaggtgggcggatcacgaggtcaggagatcgagaccatcttggctaacatggtgaaaccccgtctctactaaaaatacaaaaaattaactgggcatggtggcgggtgcctgtggtcccagctacttgggaggctgaggcaggagaatggcatgaacccaggaggtggagcttgcagtgagccgagatcgcaccactgccctccagcctgggagacagaatgagactccatctcaaaaaaaaaaaaaaaaaaaaattgtctgctgatggaatgcaaagtccacctgataagccttacaattcaatgttcagataacagccagctattctactttctaagtgtcatgagggctgtttctttttttccttgtttttttttttgagatggagtttctcttttgttgcccaggctagagtgcaatggcgtgatctcagctcactgaaacttccacctcctgggttcaagcgattctcctgcctcagcctcccaagtagctggggttacaggcgttcaccaccatgcccagctaattttttgtacttttaatagagttggggtttcaccatgttggccaggctggtcttgaactcttgacctcaggtgatccacccgcctcggcctcccaaagtgttgggattacagcgtgagccaccacgcccggccatgagggctgtttctaaacaagcttctgtacagaagtgcttacagtcctctgaatgaacaagaacattatctataaactcacataattagctagctggcgaatcccatgaggaaagcgctgagggtctgcctgaagtctgccttctgaatctctttggggagccatccaacagtcatcaatgcagaggtactcataacctgcatccttccagccttctgagaccatgagctctgccatctccatgaagagcttctcactgaaagagaaattccaataatcattacaattcattaaatgaacacttaggtacctcccatttattaggcaccttgggatttcacaattttttccaacccagtaatagtgtggtagtaatcacaagcaatgtaaggtaaaatgaattgtttttccagattttcttttgtctctcttatcccgttaatattcccgccctaaaaaccccaaacaaaataggaatgagaaatatatgatgaaattgaaaagagtattagatctaagaagacagttcagtaaagtcagaaactacaaagttaacataatcaacagatatcaacaataatcctatttggagaaaaagatcccattcacaagaacaactgaacaacctaaaatgcctagagataaatttaagatacgtgcaaggcccatatgttaaaactatgatgctcctaaatgatttgaataaatggagaaatattattttgctcttggataagcatactcaatattaaaaataagttaattttccctgcaatcctttgtatatttaacaaaatccttaacaaagcccaagagtacttaggtttcctttttatctttttttttttttttttttttgagatggagtctccctctgtcacccaggctggagtgcagtggcgccatcttggctcactgcaacctctgcctccccggttcaagcgattcttctacctcagcctcccgagtagctgagattacaggcatgtgccatcgcatccggctaatttttgtatctttagtagagacagggttttgcattttggctaggctagtcttgaactcctggcctcaagtgatccacctgcctcagactcccaaaatgctgggattacaggcgtgggccacctgcccagcttccaaaagggctttttaaggaacttggcacaacattacaaaaagttcacctaaaagattacatacatgtacattcattaaaagatgaaggctgggcgtggtggctcacgcctgtaataacagcattttgggaggccgaggcaggcagatcacctgaggctgggagtttgagaccagcctgaccaacatggagaaaccccatctctactaaaaatacaaaatagctaggcgtggtggcgcatgcctgtaattccagctactcgcgaggatgaggcaggagaattgcttgaacctgggaggcggaggttgcggtgaaccgagatcgtgacattgtactccagcctgggcaacaagagcgaaactccagctcaaaaaaaaaaaaaaaaagaaaaaaaagataaaggaagctagtgtggaactattagcattagaataagaatacacagattaatggaattaaacaaagtttcgaaagaggtccttccagccatctgataccatgggacttattatttattaaatgtggcatttctgatagaagaacaaagttcagatggactaaagatttaaatattttaaaaatccacaaaaatactagtaagaaacgtatatactgtattatcttcaggtaggaaaggactttctcagcatgaccccaaagtcagaaatcagaaaggaaaaactgatgtgtttgattacataaatatcaaaaccaacacataggaagaaccactgtatttgcaaggtatgatagactaaaaaagaaaaaagaggccgggtgcggtggctcacacctgtaatcccagcactctgggaggccaaggcgggcagatcacttgaggccaggagttcgagaccagcttgggcaacatggtgaaacccgtctctactgaaaatacaaaaattagctggccgtggtggtgtgcctgtaatcccagctactcaggagactacgacaggagaactgcttaaacccgggaggtggagtttgcactgagcagagatcgcgccactgcactccaacctgggtgacagagtgagaccccctctcaaaaaaaaaagtaaggctgggcacggtggctcacaccagcactttgggaggctgaggcgggcgaatcacgaggtcaggagattgagaccaccctggctaacatggtgaaaccccgtctgtactaaaaaaaaaaaaaaaaaaaaaaagagccaggcgtggtggcaggcgcctgtagtcccagctactcgggaggctgaggcagaagaatggcgtgaacccaggaggcggagcttgcagtgagccgagatcgtgccactgcactccagcctgggcgacagagcgagaccccgtctcaaaaaaaaaaaaaaaaaaaaagtgtaatttacccaatgtcacagggctaagtaacaatgaggcagaatttgagcccagactgggtgccagggtcttgccattagccaaacatgacataaacatgatccattttttatggaaaataatgaaataaagaaatctatgttttcatttatatagaaaacaattgtaaggttgtatattaacatttaaaccatgattatttctgggtggtggaacggtggggggaaatctttattttcattttgctcttctttatctacattttttgcaatgatcatgcattagttttataatcagatgcaaataccaataaaaaaaaatccgtgatgggcaaaattgccacacatactgtaccacagggtcacatgaaacttacaaggccaatttcttctgtgatgtctgaccaacatcctgactttatctataaagatattcataggaataacttatggacacagaaatgtactgtgactgccaccttttaccaacatctatcagtgattcctaaccttttttaaatcacagagccctttgagaatttgaagaaaggtaaatatcctctctccagaaaaatacacatattcattcagatttgtagatttacattcattttcccattgaacatttgctctgtaagcgcagttgaatggtcaagcgctgtgctatgtactttaaataggttatctccttgaaaactcacctgtgtgagataagaactatttttcagattttttttgtcagctccctgaaattaaaaggttgtaatcccaatttacagataaggattgtgagggtcagatatgttcaatacctatctaatccagcctcaaccctcacgcaaaggtgtaaatgtataaagttcctccatgtcaaccttccagcctgatgccacgctcatgggcgaggtgggagagatctcagcgaccttatggtctctctaactccctcgagatactgccgagaaatccacgaccccaaaaggagaaaaaatggcacgaatcttagttccccattcctcctacccaccctagatgttctaacggttagcacccggcagaggaagagcagaagttcacaagaagggtctgaatagaaccgggcagggctactttgggcacactgcctatggggtggccctgctctgcaaggagcagtgaaaaaagagaaccgggcagggagagagagaaagagagaggaaagaagagaaagagaaagagaaggagaacgagagagagagagagagagaaagaaacaggggccgctggccggactcccatcccaggaaaggtcacacagagaaagtttagggctagtcctgattcgggacagtttgctggggataaaaaagcagcagcagagtcgggtgggggagctctccctcgggctcaactgttcccgttgagactctccagttccccaaacacacccaaacacatggaaaagcaaagggaagggagtacccaatatctgatacctgatgcaggaatctggctcttcctggcagtcaaggttgcacatgaagcgctcccagtgcagccagcccatggtaggcgtccttgccaatccattgtccagtgctctagccccagggatgtcccaggaaacgagggccaggaagcgaagcgcaagcgcgcagcccagatgtagttctgggttcctcagctgcattgtcacggtgaccggacagcataaatttccgcgggtaacctgggcttttaagattaacctcaggggcggaccaatcaccgatgacttattaaataatgacgttattgtttctctggcaactgggacggttatccccagaggtagaccaataatcagtcacgtaagacgttccgctaaccaatcaccctcttcctttcttgatattgacccgccctatttccataccagaaggaagtgcggcaccttagtgatcccgagtttaagccgagagttgctcacgtgaccgagatctcacatgacgtaggcgctcacgtgattactcgcttacgtgagcagaagtagttctggtcgtcgtctaccgtctcgctatagccgtttgagggaagaaggaggaaaattacccggtatcgttagaggttggtgtgtgggtgggaactggggacccaggggtggtgatgatgaagaccagagcggggttcgggggccgcctccgcctctttcgttctctgctttcccctcccccctcgcgctctctccctcctcccccccatctcagtgccgggaagccgcctgtgctgcgcctggtggggaaatggtggacgctcatgactgtgtatgtgtttttgtatatctgtctgtctgggccggtctcgggggacccctaagggtgaccgtaaggcgaaaaacgtttgaaaaccacggccctgagttaagaaaaacagrtactgaaaayagtggtctgagtgctggtctatccattcaggcactsagtctccactgcctgattgtctgtaaggggaggccccaagtgaattttatctgtagagtcacatctaggcaaatgcgtgcttgacaaaggcgcccaataaattactttactgaatagagtatttgaataatgtttatttttctgctgataacaacaatctacatattcaatttcgaacatttgaaaaataacaatatagtataaaatttaaaaatacacataattcaccacccggagacgactgctcaacctgatgtcgttacagttttttaaaaaatgtgtataacacacatataaatacacaaattcttaactcacaaagagtcctggttcccactttagccagcagtcctgatggccttcccaggagacgcagtaatgaagtagaacctctctgcccctacagaagggctcttaaggaatagagcggtgcagggaattaaatgggacgggttatcccagggataaggcaagcaaaaaaaaaaaaaaaaatcctgcaaaatgaaataaaaaaacagcttgtaaatctgtcactgagaccttaggatggttaataggaaaactgttatcactgcagatgcagtgtgctaggcacataatcggcaatcagtaaatgtttgttaaatcgkttcctcagtgtagttttawggccgttattacactttgtactttgtttccaagaggcccagtgctcccagaccatttcagataaaccatccacatacaaaattagaaaattttataaaatttcctataccaaatcccagaaatgcaaacattttaatttgttttatgttactttttttgctgaagtaaaagtaattatttctgtagaaatttaaggctgcataaaaaaattggaaaaataacatggaaaatccataaacctcccactcagagtaaccactaatatgttctttctaacttaaaaagaaaaaatcccagtacagcaaatgtaaagaattaaaactgtatagaagtatatagggtaaaaagcgaaaagcccacttcacccccccacccttcagttctctcaaaaacaagtttgcttccagatcttttatttatttacatacgtatatacatgcatgccaatcttttactataagtaggatcatactatgtatattcttttatttaatgtattttggagatctttctgggtcaaggcagatagattttttttaaatggctgcattgcattccagtttaaggataaagtataattcattcagccattcctctaatgatggctatttaggtttccaattttctgccattactaacagtgctgcaaggaacatttgtaagtatttctgttgactagattcctggaaggattctagcagtgtcaaagggtatgggaacatgtattttgtacacagttgatattgtaaagcagttgtgctcttgggtcacttacaattatagcataagtaatttctcatgttattaaatatttttgtaacttttaaaattaaatgcataatattcgttttcttaataaagtacttttcaaagaatatatagctccataaatctgtctgaatttcagatcatctccttagggcacataactgaaatgtatttgctgtcaaaaggcgtgatacatattatcaaattgctttcaggatatagtggggtttatcaaaaaggaaatagtttatatcaattatcactcttctggtagtgtattagtttgtgaactgcatagcactgatttactgttgctgtttaatttccattatcttgatgggtgaaaaataacgattagttctgattttaacttgctggaagattgattaaatttgaacatttcccagattcctctcctgtatcctcctatacctgtattctctcatacttaatctgttatcaagtcccgcagattccactttttttggtatgtgtagatacatcttttctccattttactcctgttgccttaggcgattcctttaacatatatttatgagacaagttctaactaatctccctagttccacgtcgacccccttctgtttgagtgccacgctgttgccagggtgatctgtctgaaagagttttggtgaagtcaccctacatactccccggtttaaaagtcttaaaaggcgcttagtgtttgtatatcaaagtctttgggatctgatctatgccttgccagtcttttcacttgcttttccctctcctatttgtgcttcatcataattaagaaaaaaaaatgtttatggatccctgggcagattagtctgtttcatttaaccatttggcctccaaccaatagaactgatcaactagtccctctttgatactatgcttacaytccactcagagggtcatggcaagtataatgtatatttgcatttacatctttaataatgacattcggtgctcctgtaggaccataagcccattctggrcttattgattcttgtatgccagagccgaatattggacatggcaactaaaaaatgtttctaaaatgaatgtgtgaattcccaataatgtctttttttcatttatctctggagcccaaatatttccctgattttattgatttgcatacatttttatataatgaagatattatataaagaacttacataacctgtgttttgtttgtgttttaattgttgtttaatcttttgatctagtgaagttttttatgtttatatattcagatatagccatcttttatttgttgacatctcccactgatttgttgctgttaattttttttttttttttttttttttttttgagacggagttttgctctggtcgctgaggctggagtgcagtggcgtgatcttggctcacctccacctcctgggtacataaaagcgattttcctgcctcagcctcccgagtagctgggattacaggcacctgccaccacgcccagccaattttttgtatttttagtagagacggggtttcaccatgttgaccaggctggtctcgaactgctgacctcaggtgatacacccacctcagcctcccaaagtgctgggattacaggcgtgagccaccgcacccggccgattgctgttaatttttaatggtatctaacacgtaataggcattgaataaataactgctaaaaaatgaatgagttaaaaatttggtgaactctctgtttatacagacgtcttacagaaaagctgtcagcataaytgaattttctattaatagtttgcttttttctcttactatatcacgagcatttttccatgacagtagtcttctttttttttttttcagctacaccaaaattgcattgagccaaacttgccaccaagagcccaacaatcaccatgatgctgagcacggaaggcagggaggggttcgtggtgaaggtcaggggcctaccctggtcctgctcagccgatgaagtgatgcgcttcttctctgattgcaagatccaaaatggcacatcaggtattcgtttcatctacaccagagaaggcagaccaagtggtgaagcatttgttgaacttgaatctgaagaggaagtgaaattggctttgaagaaggacagagaaaccatgggacacagatacgttgaagtattcaagtctaacagtgttgaaatggattgggtgttgaagcatacaggtccgaatagccctgatactgccaacgatggcttcgtccggcttagaggactcccatttggctgtagcaaggaagagattgttcagttcttttcagggttggaaattgtgccaaatgggatgacactgccagtggactttcaggggcgaagcacaggggaagcctttgtgcagtttgcttcacaggagatagctgagaaggccttaaagaaacacaaggaaagaatagggcacaggtacattgagatcttcaagagtagccgagctgaagttcgaacccactatgatccccctcgaaagctcatggctatgcagcggccaggtccctatgataggccgggggctggcagagggtataatagcattggcagaggagctgggtttgaaaggatgaggcgtggtgcctatggtggagggtatggaggctatgatgactatggtggctataatgatggatatggctttgggtctgatagatttggaagagacctcaattactgtttttcaggaatgtctgatcatagatacggagatggtgggtccagtttccagagcaccacagggcactgtgtacacatgagggggttaccttacagagccactgagaatgatatttataatttcttctcacctcttaatcccatgagagtacatattgaaattggacccgatggcagagttaccggtgaggcagatgttgaatttgctactcatgaagatgctgtggcagctatggcaaaagacaaagctaatatgcaacacagatatgtggagctcttcttaaattctactgcaggaacaagtgggggtgcttacgatcacagctatgtagaactttttttgaattctacagcaggggcaagtggtggcgcttatggtagccaaatgatgggagggatgggcttatccaaccagtctagttatggaggtcctgctagccagcagctgagtggtggttatggaggtggttatggtggtcagagcagtatgagtggatatgaccaagttctgcaggaaaaytccagtgactatcagtcaaaccttgcttaggtagagaaggagcactaaatagctactccagatataaaagctgtacatttgtgggagttgaatagaatgggagggatgtttagtatatccagtatgattggtaaatgggaaatataattgattctgatcactcttggtcagcttctytttctttatctttytktctccttttttaagaaaacgagttaagtttaacagttttgcattacaggcttgtgattcatgcttactgtaaagtggaagttgagattattttaaaacttcaagctcagtaattttgaacactgaaacattcatctaggacataataacaaagttcagtattgaccataactgttaaaacaatttttagctttcctcaagttagttatgttgtaggagtgtacctaagcagtaagcgtatttaggttaatgcagtttcacttatgttaaatgttgctcttataccacaaatacattgaaaacttcggatgcatgttgagaaacatgcctttctgtaaaactcaaatataggagctgtgtctacgattcaaagtgaaaacatttggcatgtttgttaattctagctttttggtttaatatcctgtaaggcacgtgagtgtacactttttttttttttaaggatacgggacaattttaagatgtaataccaatactttagaagtttggtcgtgtcgtttgtatgaaaatctgaggctttggtttaaatctttccttgtattgtgatttccatttaratgtattgtactaagtgaaacttgttaaataaatcttccttttaaaaactggaaaaaatcttgaactgattgatttttattatgttctgtcatatgggcacactgattgactttacaattccctcaaagttaagatttttaattttaaaattataaatgatatttagcatctttatatgttcattgttgcatatatcattaattatttctaagatatatccctagaaatgggattgctgagtcaaagatatactcatttttaaggcttctgatttgtgttaccagaaagattctggtactttatctttctacttggagtgtgtgttttattttcccccttataccctccttattgatgcacattattctttttgaactttgccagttttttagttgagaaatgatatctcattgctattttaatttgtatttttttgattaatattaaagttgtacattcttttttaaaaaaaacttaccatgtctacaggactattgagctacttttggagactgtacttaccaagatagtattctctaaaatccaaagaagtgaaagcaaataaataatcctttttatttcaccacaaactagaaggcacgtttgtatgtttaaaaagaagtaggcttacaattatgtgttaaaaacaaaacataaaaaagaagcaggtttatgttatggaaataaattgtctcctccatgaattcattagtagattctctataaacactctcaggtgtattttagggcatctaaagcttatcttaaaccagcggttctcaaacattcatgtgcatcagaatcatctgcaggggttgtttaaacattcatttctaggccccatccctagagtttccaattcagtagttttgggatgttgcttgagaatgtgctgatgctgctggtctcaagaccacgttttgagacccatcacagttccccaaacagcaactttaaggagcagcttcctttatgatccctgattgcctcccctttgttcccataacaagtagtttaaattttctgttaaagtccaaaccacatatttacaatacctcgcacctcttaatgaggattttgagctgctgtggcattgtgtgctgatatcttagatttctgtctggatcacagtggtcattaacaattccacccctcaataactttaaggccctgatgtccctcttatcagtaccaactgtaccgtgaactacagatctctgtagtttcactgaccccttggggactggattgctatacttgggctgttcagggcttggggcccagagaaatgagatgggaggcaaataccaagttggtattacctgactccgtttcattcaggaaatgaaaatcaattctagaaaatcattcaagctgaagatgcagtgagacgtgattgagattctttgatgacttctaatttttatcacagctttcaggagagcaagaaatccattttgactcctatcatgttgagccagtccttgcccttcaggaagcctttctcagagggtaaacaagtaggtgtttttgccttcccaggctacttagttaattttccagaagtttctctaagtctgagcaaagattctcaagttagccactagatggcaccaaatcccaggagacaatagagggttctttgtgatcttagatgttcacttactcttcttcgctggctaagaagactcagaagggctctggggagcaaaggagagagaacctggagaaggtcagcggtcagcactagaggtgtgcaaagggacagcagtacagctggtgtgcacacgcgtgcacacccaccaccattcgtgctccaacactcacatctaacactactacccaggaaagtgatgggaggtcgagtgggcagtccacccacaacaccccccaaacactgagtcagaggatttattttcaactgcgtgtgtgagctatttggcaggatcaggcagaaaatttgcagccacagttatcgtggtctaagtatccgatggcttgtgccagtggttctctgggtgtggtacctgatcagtaacagcatgaacctccaccttgtgagatatgcagattctttttgcccccccgccccccgcctcgtccctttcccccaaggactgaatcagaaactgggtgtggagcccaacaagttgtgttttgttttttgtgtttttctgagacagggtctcgctcttgcccaggctggagtgcggtggtgcgatctcagctcactgcagccttgaattccaggctcaagtgatactcccacctcagcctctcgagtagctgggactacaggcgagtgccaccaagcccagttattttttaaaatgatttttatagagacgggatctcactatgttgcctaggctggtctcgaactcctaggctcaagagatcctcctgccttggcctctcaaagtgctgggattacaggtgtgaacctctgtccagccaataagctgtgttttaacaagtgctcagggtggttctgctgcaggaaactactggctgatggatacatggattccattatccacccattcattgattcctgcattcactcatccaaccctaaaggaggtaaccaaaacagagacaatcccatgtgtaagcatgacatatcttctctgccttctctacccagcaaaatgatacgaaaatgcattgcgaatatgtttataaatcaagctccttttccatcaggtagaattcctagtgctgtcagctaaaatgaagatttctccaagatgggcctccagggctattgcaaaacagctgctgatggaaggaaattccacttgctgtgccttataccaggctgggagtgtcacaagaaccctttacaagctgctcccacaatgaccaaaactgtcttctcatgagtgcaaagcaggcatgcccaaggggcccaggttagcatggtgcaggactccgctgggaaggtgaggggttatcgtcgcgggggagtgtcgactaactgggctggtggtgcaggggtaaaataatttaccaagacagttggaggtaaaggcagatttattagagaaagtaggaaaatacgtttcgagaaggcaacgggcagcctgcaagagaggagccgactgaaaagaaacaaaggcttgctggagattttataggatggtttttgggctgattgagaaaaccaaggcagtagggagctagcttgcattcttctgttagctggggtgtttgataaattgaggcgtttgatagtgagcaggaagtttgtgagttatgtatgttatctgcgcaagaagccacatgtcctgggccataaagaaaagcagacctatagcttatctgattcctctttttgtttatatgttctggaccatgaagaaagacaaacttatagcttatttgctttctccctttgccttcccctgctccagccagcctaactccttttttctaattaggattccacagttatgttgtccctgtgcctgcagcctgtgaatggacgccccaccacctccgtcacagcagtggtcagcacagataaatgcacacaacacacatcgatctggccctctgagaagagaatgttaggcttctgaaagaagagataaatagtgagagataacatctaagaatcaaaataatatattcagtaattattttctgaacctatcctaatgctctgaccgatacattctttagaacatctacccgtacattccaaggaccctttttccacggccctttttctccctgtatccctcttcctgctccccttcttttgcacagggcatgtttcacatatacaagatgttcttacgtgtcatcccactttagagatgaggaaattgagtctcagggaaggcaaacatcaactttgtcttggggaaagggcaggaagctggaagggaggaggaaatgagctctggcgaaggaaagaggacatggctgggatccttatggggtggtgtacgagtacccgtgccccccccgatctgtgggctgagggtggcggtgactagcgctgggaccagctccttctctctcgctcccaagcccacaagaattcggggagaaagggtgaggtagggggctccgggagagcggagagagtttggaaagaatccatccctccttctccccggcggctttctcgagaccctcacacagcgccccgccccgccccagtacatttcctttcagggaaagggacagggaagaggctgtcgggaaatggcggccgcggccgggctggggcttcagcgggaggcagcagaggggaagtggtcagcgtggcgaatgacggaaggtggcgagggagaggaagaggggtcgggtgtccgcggagctccaagagggaagacaatcgctttgccaaacacggcagggcatctggaaaggcctgggaacctcacccgccctcccaggcccttcgggctcttttcggtcccattaggaggagggggagggcggcaggtgggaccgggcacaggcctagtcgtgcgacaggagaagggaaggaagggccggccccagctgggtcctccttgcgtctggcctgtgccggacgcccccgactccgagtgatctcgggccggtccccgggggagtccagcttctcgcgccaggggagttctcagccccagggcagtccagggattaggcggaagggggcacgcagccacctggccggggcagggggagctgcgaggagccttttttttttttttttttcctgcgcagagccccttgcgtgacacacagtaggcgctcaatacatgtttattttcagttgagtgttgcttcagcttttatggcttgtgataaatccttatccttctgttctagaaactcgcattgtctactggatcaaggacagacagctcaccaaccgtgacagcaccatactggaacttcaaaaagttctgaaaacatgttggttcgtttgttggagtatttttcaacttaaattccttttccttttttttttttttgctcactttttcctctgcagaaaaaccttaaaatgttctaccttttccttgaaacctcctcccactccttagttcacattgacttgtctttaaatgtttttgagaaaataatcagaaatgcacaattagtgcttggtggttctcaaattatttcacgcgtggtagttttgatttttgcttttccagtgaggctgtacctttcatccttaggcaaatatgatggctttcaaaagcagctatggggtgggaactgggagtggctgcaaatgggcatggagcgtcttttagagataacgaaaatgtcccaacttagattgtggtgatagttcgcacaactctataaattactaaaaactattgaatttgcacttgaaaagggggagaactttatgaaatataaattataactcaaagaagctcttaaaatgcctatggaataataagtaaagagtagtggggatatgatctattttgtggggagactagcagcaaagtaagacataaagataaagaaacatacactggcctgaggaagtaacaaagtctctttgagcaaactttggacaggctcctctcagctttcttttcaactacaccttgtccttgggccctgtcctcggcctgcctagcccagttttagcaagagtcctgctgagtaactccctcacccttgatacctgatcaccttgtcctgccttgagcgagaatcctgtttagtcagttgagcaagaatccccctacccttgatatctctctccccttaggaattttctttctactgactccctcactctgctgcttgactgtaaatccacacttgtcctagttgtctttggattgagcttagttctatactgaagtctcttttcctctattataatagtactcaaaatatggctttactgcttttgactagtatctggctctgtttcccattggcggaaggcactctcagacagtgcttctagtagtatatattagcatgacctgccagggtacaattctttttaaaaagaccaccaattggctggatgcagtggctcacgcctgtaatcccagcactctgggaggccgaggcgggtggatca

SEQ ID NO: 96320 - DNA, 25980 bp, Homo sapiens
  misc_feature (1)...(25980): n = A,T,C or G
aatcatccacatgaactatttcaagtccttagcacacacacatatttgggatttgccattctgaacatacagagtgacatgtatatactgtaagagggtttttgtaactagaaaagtcctagtgtttctcctttaaaagacaacagggcagtgtctcagtagaggatttaaattacaggggtgttttattctttcaagtctagaaaacttaaaagatatatgtttcttgacttttcagctataatgccaaccagcattaggaagacattacccaatcccagacttgtcttgctgcctcaaatccaaccattctgaattacaggagacagagattatcacctgaaaaggtgatatagcacagacatgatgaataggggcctaattgtgaggtgggcagccagtgtgatttgtatctattctggaaatccctctatggatctcagaacaggtgaagatcatccaggtacagctccgacttctggtcatcagtcaccagaaatctcggaaactcagtggcatacggcctgggctgcttgtcccagttggaggtacactttaatctgcagtttatctgatattgtcatttaactagatctgtatgttagctcacttagataagcaacttgagtacaggactgtattctttgcctctgtaatgctgtgtattttagaaggcaactaacagatactggtttgatgaaatggactagagaatcacacaaggctgtatcaaaataaaaattctacaaatcatttatcagaaaaaattcttgaaattcaaaatgtttggatcatttttaaaaaatagatgcatgcataaccattacaaaatagtctagaaaattggatattaagtgcctacataaagagatccccaaatttacttaaggttacagccacccataaaactgagtacttaaaaaagttggtggcaaaaaagtcagtggcatttgaaataaaaaagactctatgataataaagaaaaggaaaactagttacaaggtaaactgctacaggacagacacatctttggagtcttccaaggtgcattcagagatacagctgaaaagggctgtgtgaaaacaaattctgtttatgttccagtttttaaaattgtgtagtttatatatttttaggtagtaatatgcaaacgagctcaaactcagttgaaagcaacaccaacatggttgataggtttctctcctctaaaaatgaggttctacattgcctccaaaatacccccaaacttcaggtttctgagtctataaactccactgcatcatatagctgtgtgcttttttccagataaaatgaccttctgtgaactgtcaggtagattctcctagctcattgtcacagattcactcccactataattacggtgccagctgctgctgttttctttgcactccaggctccagatgagagctgtgcattttctgtgaagtcctagaaatgaaacacaggagctttctaactttggaaaatcacatgttctctttattagaattctgctgaggctaatgtgatgggagacaagagtggagtatttaaactctgtagctattaatacccctaatcaaagagttttagcttgcctatagggcacttctctgttactgatgcctcctgttttagcaactgagacagaagatgcctagaagcaaaaagtctgacctgagcaccaaaaggatgtcataattaaaaaaaaaaattctttgcagagatgcggtatcgccatgttgcccatggctggtctcaaaactcctgaactcaactgatccgcctgcctccgtttcccaaagtgcagggattacaggcatgagccaccgcgctcggcctggttgtcataaaattaatgttatattgcctcctcttccacacctggtaataactgcaaatgtttatcatcttttatctctttccaatattctatcaaaagattactggaagtaaggctgggtgcggtggctcaagcctgtaatcccagcactttgggaggccaaggtgggtggatcacttgaggtcaggagttcaagaccagtctggtcaacatggtgaaaccccatctctactaaaaatacaaaaattagtgggacacagtggtacatgcctgtaatcccagctacttgggaggctgaggcaggagaatcgcttaaacctgggaggcagaagttgtagtgagccgagatcgcgccactgcactccagcctgggcaacagagcaagactccatcttccaaaaaaaaaaaaaagagagagacaccccccaccctccgcccaagcagctcaactgtcctcttccccaccatttttttgggtggctgagcaacttatcacctgagttttaggcttatggatttgaagcatgtactcctgcatttgagtattagttctcctgtcccaccttcccagaaaaacattatcttttatagagtatgttaatcacagtccacaaaaccaaatatgtcaagttgcctgccaccactgaggccaccattgtttttgtaggctcctgtggttctccacaccatcccagcctcctcaacccccaaattattgctggactacagaaatcttgaatctttggcagggttgggaacccatgggcctctaaagcagactccctggaggcaccaatataacccttcccttttggtgtcatagttttcccccactaggacccgaatcatctctattttaggggcaaacaattctttctgcttctctcaagcattcggcctcttccttcaaatattttttcttttttttcaggttgagattctttattctggaggtaggaagggggtcagcatgctcaggtagggagggtccagcccagctcctccagccccccagtgcttgcccagccccaataagttacccagttaatcagctgccctccctcctgggtccgtctgtccttctgttccaccctagacagggccaacctggctcaatacaagggctgcttgtccccagcctgtgggcagtgccacatggcaggctgggggagagatgaagcagcaggaccatgccctgggtctggaggggcagaggggccacttctggcttcaagcggtcaggacttggaaaaccacatgctgggcaggcctggggcccagtcccacaaggtctgtgcctgaaaagaggtggtagttggggtggggccgccatcacacctcaattgctgggtctgagccctggccctgccgctgcagctgctccttctgcttcatcttgggcttcgctgtccgtgtatgtcacaccagtacccgagtgcagttggcagcccgtggctccaggtccttgggatccacaaggtggcttagaagactgctctccaggtggctccggggagcagtggaatcaaactgggcattgggcttagctaacagcaagggcagggccacagcaaatccggccatatccacagggaagggcccgttgggctcccatgctgtgtggaagcccactacccggctgtcctgtacctgagggcccttgactcgcaggccacccaccagccccacaggccacactgagacaccacgggtccagcgcatctcctcaaacagctcccagctgtaggtgttgccactgtcagcaaagtacacgactccttgggtccctggtggtgatgggtccttcttcccacccacagcactccctctgccccggagccagtccagggccttgttccgctgctcgacaccatggggatgaacccagccaggcttgccctcccgaagccgctgggctttgggcgtgaggaccaccaggtgtgtgaagaggaggccagaggcagccagcagccctgagaccagcggggtgggaccctcagcatcctccaccagcagtcaatgcagccggggcaccaggctcagtgtctgggacagccgtaccaactctgccttctgtaccagcctggcataggtgggggtaacaacatagatagtaggcagggcctcgggttcagggggctgggcaggggcagggggtggccgtcggagttccgcttgcagctgggaaatcctcagatccttctgccgtagctgctcagctgctgcccgcaggggaggaaggcagtcacatggctggccagcgcgtagaggaggccggcgatcgacaccaggaagtaggcgagaaacacgttcttcaccttcagcttcatggccacgccgctgccgcctgcgccccagcaggcggggtctctcaaatattatttttctccatgggctcaggctttttgggaaacaacagccagtaagtctagtgtgaggttcttcagttttcttgctacatacataaccgttttgaggtaagaaagcacagaggggaaaacaggtgaaaaacattaaagctcagaaacattttcagccatattaattcaattccagaagcaattaaactttgtttaaagacaataatttaatagaaatatagtacatttactgctatggaaaaataattcataatacgttgggtttttttgtttgtttttgagacagggtctcactcagctgcccaggctggagtgcagtggtgtgatcataactcactgtggccctgatttcctgggctcaagcaatcttcctgcctcagtcttccaagtagctgggactacaggtgtgagccaccactccggctaattattttattttttgtagagctgggttctcactttgtggcccagactgctctcaaattcccgggctcaagcagttcttccactttggcctcccaaagtgctggaattacacacatgagccaccacgcctgtcccacatgttgttttgacaggaagttacaaagatgtctatcaggatgactccaatgtttaatagaaaatgtacataaagtcaaaacgaatatttaccaccatgaaacagtagctaccactacaattcacacttcataagcaaccttttaaggagctgaattggtgaagctatctgagattgactaaggcctaatattgccttactttctgctttatatctttaatattttctgtaatttactgaataaaagcctaggacctggatgtactgcaatgtgcagtatatagagctcatagcttttttttttttctggaatgcagtggtgccattttggctcactgcaacctccgcctcccgggttcaagcgattctcctgccccagcctcccaactagctggaatgacaggtgcctgccaccatgcccggctaatttttgtatttttagtagagacggggtttcaccatgttggccaggctggtctcgaactcctgacctcaggtgatccacctgccttggcctccagaaagtgctgggattacaggcctgggccactgcacctggcctagagcccatatctttatttagcacattagtaaacaaaatgactttatagttattggaagttaaataattcaaacttaaagctgttggaactttattccgagccttgggaggaatgtggctacagcctgagtcaagcagcaggcatctgcaacgtctgccttttgtttctataaataattaaaataggaggaccaaaccataccagagatacaaccccctgagatcactaccccccctcatggagtaacaaaatactttttcttggaatgtagtaatctgtaacctaccaaatagctgtaagtatgcactggtctcttaggggaaatgaaatcctgttaaaatttgtctctggccacctaggcgaaaccctaacttcttcactttggaatgctaaccccatttggagctggtgtctcctgggtggctaccctcaagccttacgctggaataaactctatccttaatcatatttccagaacctcactatttaaggttgacaggagagggaagcggtgatgtcttgagataaagctgaataaagtttctcaagaaaaaaagggaaaggaacctctaagctgtacgttgttttctaactctagggagttagaggtgaagtaggaacttgaagttggaagtgttgagttggacagccctcatctctaggcaatactttcataaagtggaaaaacgggggaagaggacgaaggctagggagagacgcagggatcyacccaacccagtcctgagtttcccactcgctcttggagttgagtacaaagagcgctccaaagccccttctcctgtgctcagcccagtgctccggtgggtcaggtctccggaatgcgtaaacaaaagcaaacagctgagcggcggagggcgcaggcgacagatgtgggtgttccctgagaatgtgtggcgacttcccggagcagcgggtctgtgaggcaacgatggaagacactgcgctccacagcatagcaggaggccccgccccgtgtggcgccaagtaaaagataattcctcagaagccgtcggccaccggcgcttcgcctcgtcccgcgccaggcccagcctctcccccagaccaccggtgccatgcggattccccaggcgggaccccagctcacgaggcccactggccgaagctccccacaggatagagagccgctcctgcgaggccaagcttccgagaggcggcctgcgcctagcacgcaggcgcggaaagctgggcgccagccttaaactgactcccgccacctgcctcgggccgcgccgtccaccgtttactttcgaacgagcccagcaatagttcccattggccgatgccttgcagttgaatgttgcctgcagactgcgcctgcgctrcgaggctccgcgaggccccgcccggtctgggcacctgaagcccttcggggcagaggagggcggggactcggggcggctctcagcatccgcctggagctcgtggcgctgtgtttccgtgctgtggagttgcctggtccgcttcctccccgcggtgagtctaaggacctttacggatgcggagaaggtggttctgagtcctttttcttttcctgtagcacagtctggtgtgcctagtgtgttgggcggggagtcctgggggcgcgacgatggagggagtggcttgggacctgcactcattccctcttgtcccatactggagtttggggagccactttcccgtccctccactgtggagctgcgttcctgtgagggaggaggycctctgtggtggcgagggtgagctgagcggacgccgccgagtcggtcagtcccgcggggttggggacgggcgggtgccgaggyggaggcgcgttaggagggaggcctgggagagtggagctttgagaaggggaagggaagagtactgccattttgagcccctttgtgggaggtgctcgcaggacttaagtgaggtaggtgcagttacccattttacagatgtgaagcctcacttttgagaggtatttggtaatactgacccaggtcccacagcattgaaatggcagaacagagagatgagcaaactatactaaatcagttataatttagagctggcaaggtattttactcccatggatgcttttgtcttgcagttaattttaagcactctaaaatgaccgtgaatgttttttctgccatcaccattgttgggtaatattgtcgagagctcataagctacttgacgttgtgaaaagaggtcctttgtgacagtctgtttggtcagagttaggattttcaaggaacaagcgatacctctactgcagctccagcaactgtgttggtgtttgtggcttttctgaaaacacgatgaagcatcgtgaagataaatatcaaagacagtgaactaacaaccatttttatgacatgagacaataaattgaaaacattaargataacattattttaattttagaataagaataaaagattctggaggagttggagaagagtgtattcagcccccaaaccacgagatcaacaaagtaggtaatctgggagattaaataaatatgaaaaacaattaagtttttacagagtgtatgatttaaactacaaagtgaaatttagaagtcttttgaaaaaacattgtgttggcggtgtataaaactccaaccattttatcgaaggagcggagcataaagtgaaaaataaacaactcccttctctgatctgtaccttaaaagtagtcacttaactcttttgtacatccttctagaaattttacaagaatgtgtacatctcaaaacacatgcaaagttgttattttatacatacagatctgcagaactacacaaaactgcaaattaagttacctggatactttttcactatgcattcatgtattggtctttttaaatgagtaagtagctatttaatctggcaaggtgaaattttgattttaggtgatgttagttttgacattgcctttcactaaacacgttgatgaatatttcccaccagatatatttttactttgaaaagtacagcaaaagcaattaaagccttaatttctcaagtcaattccggttaaattgaattaatagtctttttttgttttgtttctagtttttatttttattttttagtttagggaaacaggttgatatcaaaatgaaagaaaatagtacagatggacaaagagatttaaaatcagctgaccataggatttttttaatttgaaaaagttaaggtgatctctcactatttttgtatatttatatgtgacagaattatttttaaaaatcttgtttctcagactttctgcgataatgttaaaaaaatcttatatatgtttataaatggtgcagttgtagttatttcttaagtaagtcttgacttgcatgaaatgtatttcttctttatcagttaggtccacaaagatgtgagccccagtttgggtggtggcaccacttgaattttcccatacttaaagctgactcactagaagtcttgggacaagtcatcgaattctataatgtaataaatatattttcctttcagaggttgtgaaatgtaatgaacgttttacaactgttcatgtttagagttgaaaggcaggaaagcattagtgaattaaaacttaaaaactggtttacacaggagaatgggtaatgatattttcggtgctatttaatcatctattatactgtctattacctaatatgccagttagacatcagggaggctcactagtgaattggccctctggagaaagacttaataaaaagtttggaaattcagaaatgtatttgttttgacacttaaacacactagacattagtgaaataatttgtaagtagagtgatttagcctcaggtttctttctgagaagattcatttttttatattaatatttctcggttttaaaagagaagcaggaaatcttgaacttggtttttacatgagcttagtactcactagaggaaaatacattttacatggattattttacttttttgctttttaaaaacatacagtagtataaattgattcaaattcatttagcaaaaggaagactggataataggcaagacgcttgaaaattttttaaagttttttttttattgtgtaaaatatgctaaacataaaatttaccattttaatctttttaagtatgcagtttggtggtattaaatacattcaaattgttttgtaattatcaccatcaactatctccgttaactttttcatcttcccaaactgaaactgtgtacccattaaaccagcagtcctcaacctttttggcaccagggaccggtcttgtggaaggcaatttttctgtggacgggtgggggtgggtggtgcatggttttgggataaaactgttctaccgcacatcatcaggcattagttagattctcacagtgagccacaacctagatccctcgcgtgcgcagttcacagtagggttcacgctgttatgagaatctaatgctgacactggcaggaggcggagctcaggtgggctcgaggcggagctcaggtgggcttgcccgccaccatggtgggggcgcagggtgggtaggaagggttgaggacccctgcattaaatgataactctacatcttccctgctctcaagccctggcaactaccattctactttctgtctttgaggactgcttattggttttgatattatatatattatatgcttttttcacatataatgtgaatgtaaattttttttccattgaactaattgactgaattatattaatagatttttcgttattgaattaactttgtatttctggaaagaaccttatttagtcatggtacagtgttttttttaatgtactcctgtgtttgtttttgctaacattgtatttagaattttacatcagtgtccatttttgaaattagtccatttttagtttgtattgtctcaggttttggaatcatgttatactgtcttcaaaatatttagcaaacttttcatatttgtattctggaacagttgagtagggcctagtccacactcaagggagaggagatttcaagagtatccagaaagtgtaggtcattgggggccattttagaggctacctatcacagatagctaatggcttgtttatttacttaaagaaccaattcttagactggtcatggtggctcacagctgtaatctcagcactttgggaggctgaggggggaaggatgtcttgaggctaggggtttgagaccagcctgggcaacgtagtgagaccctatctctacaaagcataaaaacattaggcatgtgtgttaacatgcacctatcagctacttgggaggctgagctgggaggattgtttgagcctgggaagttgaggctgcagtgagccatggtcacaccactgcattccagccctggtgacagagcaagactcagtctcaaaaagagccatctcttgggtttatcannnnnnnnnnnnnnnnnnnnccgcccccacccccaaccgccccacaaaactccccccccttcactcaccccccctaccccctccactcacccccccctcccccacaccttcctaaatccccacccccatctcacacccaccctagaccattcccgcaaatggtccttaacccccccctaaccgcgcccccgatacacccccccacccccccgccgtacaccccacacccctcccccgacctgtctccctccctcacccacaccctctcaccttcccccctctcaccctaccccccctccccacccgatccaccgctccgcctaccaacccgccaaaccccaccaccgccatatataccactataacccccagcccctaccactactacgcccaaacccctcgaaccatcccaacccactctatcccccccaatcacgccccccttaaacacctaccctccctccacctctttcccctcctctccatccccataatcccctcaatccccccattcccccctactctccatccactcaactcccccatcccccctacttccgccccttctcaacccccacccaatacccccccccccctaataaccaccaccaccccccccccccctcccccccccgcctcctcccccaaaaaaactccccccttcccccgcccctcccttcccaccgccaccccttcctacccccccccactccaccccatccgcaccatactaatccccatccaataccagcttcccacgcctaaacgcttctcctgcctcagcctcccgagtagctgggattataggcgtctgtcaccctgcccagctaatttttgtatttttagtagagatggggttttgtcatgttggctaggctggtcttgaactcctgacttcaggtggtccgcctgtactcggcctcccaaggtgctgggatgcaggggtgaccacagtgcccagccagttctagcaatttaagttttctagttcattatcatcttccatttatctttattctttttttattttttgagacaaagtgtggctctgtagtctaggctggaatgcagtggaacgaccgtggctcatggctcattgcagcctggacctcccaggctcaagcaatcctccctcctcagcctcctgagtagctgggactaacaggcgtgcgccaccatacttagctaagttttttattttttgtagagatggggtttcactgtgttgccagggctggtctcgaattgctgggctcaagtgatcctcccaccttggccttccacagtgctgggattacaggtatgagccattacaccaggccaatttttattcttttttttccacttttcctcttttttttttttagttgaattattttatattccttttggtttggtaagtaaagtgtatggtgtcagctctgcccatgtaatttttttttagctctgtagattttactgaagagtatttctgttgtttcacatgaataaattatgtcgtggctgtgtacagaattctcagctcatatccctttccttctagtctttgtggacattgctacattctgttctagcattccttgttgctggtgatgttctggttatttcctgctgtgtaacaaacatctgaaagcttggctggccagatattcaagatgtctttttcactcatgtgtctggaaactccttgcccttctatttggcctgtctcttcagcaaagtagcctggacttcttacatagcagtttgtggctccgaggcagcaacctgccaaactagttaagggctatacctagaactcaccacatcacttatactgtatcctattggtcagaacagtcacatggcccacacatattctaatgggggagaatagatttcatctccatgtgcagggagtagcagcaaagtcacattataggacagctcatgtgggagataattattgtggccattccaattttggaaattccagtctcccagaggaggattctgagacctttggtttagttttccttttttcatccttcttttctgtgtggatacttgtagaattgttcttatttctttaaaattgtattatatttttaattgcttaatagttaaaagcgaaaccatgatttataatgaaaaacagattctttccctctagaagccatcacttttatctgctttaacatttcttttggtattttcttttatatttctagatatttattttttgtgggttattttttaagtatgtattgactttcttataaggaaaaattaagatttagttcttaaactgtttccttcccttattttccccctcaatataattttgttactctttggtaaaatcagtatttgatatttacaatattatgactgttacagtgacagctgagccatatactataatattaatatttcctctcttttcatgattctatcacgttttttccctaaatttagttacctctcaatatgtttcatatacatgaagcatttctgtcagttccatttatttacttaaagatctgtcttctgcatgcctgaaatcacagcactttgggaggtcgaggcaggtggatcatgaggtcaggagattgagaccaacctggctatcatggtgaaaccccatctctactaaaaatacaaaaaaattagctgggcgtggtggcgggcgcctgtagtcctagctgctcgggaagctgaggcaggagaatggcatgaacccaggaggcggagcttgcagtgagaggagatagcggccactgcactccagcctgggcgacagagcgagactctgtttcaaaaaaaaaaagatctgtcttttggatctttcttcctcttctagagtgactcttccctaggctttcacagttgtcctggacttcatttcgccattatgctggcgaacattcttgcttttcttttctccctgcagtagcttctttagaaagagttggaagaaggttgttcatttttgagatcttatattgtccaactgtctttatataaaaatggattattttttttctaggtatagagttttaatttccatttcagaagccattttttttcccctgagaatatcaaaggcattactccattgtcttattgtttccagtgttactgatgtttttactgtttggaaacctacatacagcatagctaaatccaagatgttcatcctagaaaatatacataggttaattttttgttctttttcttcctttcagaagcctagactggttgtggaaaatttctgctgcataaaatttcatattggtttctgaaagaactagcctgtaagcatggtagccacctgtatcttttttttttctaaaaaaggcagggtcttgctctgttgcctaggctggagtgcagtggcacagtcgtggctcactgcagcctcaacttcttgggctcaagtgatcctcctgcctcagctccccgcgtagctgggattataggcgtgtatcactgtgcctgactaatgtttaattttttgtagagaatgggggtctcttggtgttgcccaggttggtcttgaactcctggcttcaagtgatcttcccaccttggcctcccaaagtgctggaattacaggtgtgaaccactgcacctggcccacctatatagtttacttctcaggcagcaaccagagtcagaaagttcctgaccttacaaagttatttttcagttctagtttctcttgaatttgttgcctaaaattagtttttaatcaataaatcagtgagaaaagggtagtctgagaatagattttgacttctgtgaacttcaagttatccacaaatttttgtctaaaaagtattattaaaaattttacatatgatagcagtaactttgagaccaaccacgatttttgcttcctattttttttttttcctttttttgagacagagtcttgctctgttgccctggctggagtgcagttgcgccatttcatgcctcagcttcccgagtagctgggattatagggattacaggtgtgcgccaccatgcctggctaatttttgtatttttagtagatacagggtttcaccatgttggccaggctggtctcaaactccttgcctcaagtgatccacctgctttggcctgcttccattttatataagcttaggatatgctttacaatgtcatgaatattctcattctaaagaaagttgagcttttgggcccctaagtgcattctcagagttgttccctagttttctgcaagcatagaataggggtttggatagaaaagttagattctgttttaggactagttttgctacttaaacaattgaatagctccagtaatattraatctagattaaatgtacgtcgactgctcaaattttatttcctacaaagtgttattctgtttattccttcaatgtgaattctgacatcactgaaatactctgaaaaacacatttgtttttcttgggtggtttctgtatgacttcatagctttctgtaggtgtagggtaaagttgtaaagtcttgccagcatgcactcacttgaatttatctgcagtgaatgtcatcttctttactgttgctcaattactttaatttgctggaatgctctacagttcaagcttagtctctgtgtgacacactttggctcattcgggatctgaatattgtcagtttgaatggagtgctttttttcttttttctttttttttttttttttttgagatggagtctcactctgttgcccaggctggtgtgcagtggtgtgaacttggctcactgcaagctctgcctcccgggttgacgccattctcctgccttagcctcccaagtggctgggactacaggcgcccaccaccacacctggctaatttttttgtatttttagtagagacggggtttcaccctgttaggcaggatggtctcaatcacctgacctcatgattcacccacctcggcctcccaaagtgcggagattacaggcgtgagcccccgcacctggcctgaatggagtattttctgatagattttcgttttacaccttttcctaagcagagattttgctattaaaaaaacaaaaaacaaaaaaccccaaaacaaaaatctgtattaacacaggtctctgaaaaggcatttgttcattgaagcagtaacaagtgaatgcctgcagtgttaaaatttgtgcctaaattgcaggaatataaccattgtttagacacaattcctgcccttataggaggcctacattctaatgtatacagaaaagttacaaaattcttaaataaaatcttgttaaagtgctatgaagtaaaaatgcagtgtttaatgagaataacaggggacctaatctggggaaaaggcaggctcaagttgagccttgaaggaagagttaagagtttgacagatcgtaaagataaggagccaagtttgcattttattaaaaatgcagttagttacttttagttgctgttttcacagatttttaatcttaaaagttagttttatagcatgtgatttggtaacctttatattttacgtgaatggcacttgggtgtttattttttttgagacggagtttcgctcttgttgtccagatgagtgcggtggtgtaatcttggctcactgcaaccgccacctactgagttcaagcaattctcctgtctcagcctcccaagtagctgggattacacgcatttgacaccacactgggctaattttgtatttttagtagagatggagtttctccatgttggtcaggctggtctcaaactcccaacctcaggtgatccgcccgcctcggcctcccaaagtgctgggattatatgcgtgaaccactgcgcctggccatggcacttgggtttttaagttttgcctaaggtactttcaacagtggtataacttgatttttctctatcaaggggtaagctagtctttagaattgtggctgatgcattgagggtaggtataaaggaaagcagtaggaggtggtagggtgcaaaatggtcaggcttctgttactggaaatatcagtagtagcttgccaagaggtcaagttacttgtgtcagagatggtctctgaactatcgctacgtttctttttctgtctcagagaaatacggatcgagagactttcatgaaggaaagatgactaatggtcttctttttgttctttaccatttagtgctctagtttttcacttaaaaattaattcacagttactatagtcaactcttatctttcaaactgatttttattataagaattaattcaaaatttttctgtcttctaaatctgcaagttaaaattattgctttagagaattatactatgctgatcctggggtttaagcgttcttgtattctaatttgagaagctaaaaaatttatggtagtaacagttactgtggagaaatttgatagcttgctttagaaaccattattgagccaactgggacatgtttcctccttttgtgttaaagaatatacttttgctaagcctaacttgttgtaatagaaatagtcttgtctactcattatatgtgcttggttttgattttatcatcttaaatgttaaaatgttgcacaaaatagttgtaatcactaagtagactttaacagaacactttgaattttagtctttattatgtagtgtattagtctgttttcatgctgctgataaagacatacctgagactgggtaatttataaggaaaaagaggtttaatggactcacagttccacatggctggggagacctcacaatcatggcagaaggtgaaaggcacgtctcacatggcggcagacaagaaaagagaatgagtgaagcaaaaggggtttcctcttacaaaaccatcagatctcgtgatactacaagaacagtatgggggaactgcccccatgactaaagttatctaccgctgagtccctcccacaacatgtgggaattatgggagctacaattcaagatgagatttgggtggagacacagccaaaccatatcacatagcaacaaatttaaataacttaaatttgaagcattttactacaaattaatgataattgctttgtttgggatgattttggtccctaaggaataaactcttaattgtgatcagttattcactatatatactaggaaatgaattactcagaaaacttcattttaaaaataccttgttctcttttaaatgacaagcagtatggtaacaatttggaggttaatgcctagaatgttaaataatatgtacaggtgtctctatgtaaacttaaaatacatttttctcttgacaggaaatgcacaattttgaggaagarttaacttgtcccatatgttatagtatttttgaagatcctcgtgtactgccatgctctcatacattttgtagaaattgtttggaaaacattcttcaggcatctggtaacttttatatatggagacctttacgaattccactcaagtgccctaattgcagaagtattactgaaattgctccaactggcattgaatctttacctgttaattttgcactaagggctattattgaaaagtaccagcamgaagaccatccagatattgtcacctgccctgaacattacaggcaaccattaaatgtttactgtctattagataaaaaattagtttgtggtcattgccttaccataggtcaacatcatggtcatcctatagatgaccttcaaagtgcctatttgaaagaaaaggacactcctcaaaaactgcttgaacagttgactgacacacactggacagatcttacccatcttattgaaaagctgaaagaacaaaaatctcattctgagaaaatgatccaaggcgataaggaagctgttctccagtattttaaggagcttaatgatacattagaacagaaaaaaaaaagtttcctaacggctctctgtgatgttggcaatctaattaatcaagaatayactccacaaattgaaagaaygaaggaaatacgagagcagcagcttgaattaatggcactgacaatatctttacaagaagagtctccacttaaatttcttgaaaaagttgatgatgtacgccagcatgtacagatcttgaaacaaagaccacttcctgaggttcaacccgttgaaatttatcctcgagtaagcaaaatattgaaagaagaatggagcagaacagaaattggacaaattaagaacgttctcattcccaaaatgaaaatttctccaaaaaggatgtcatgttcctggcctggtaaggatgaaaaggaagttgaatttttaaaaattttaaacattgttgtagttacattaatttcagtaatactgatgtcgatactctttttcaaccaacacatcataacctttttaagtgaaatcactttaatatggttttctgaagcctctctatctgtttaccaaagtttatctaacagtctgcataaggtaaagaatatactgtgtcacattttctatttgttgaaggaatttgtgtggaaaatagtttcccattgaaaatgtcaacctgaattgtttaaatgggcttattctgtacattgctaaacaaaaaatggggtagcatggataaagagcaaactaagctttattagtgctgcaactaatataaacaaatgtttatatttgttgcttcttttggttagcaatgatatgtcaaagttatatctgaaatagtcaaatctttgggaaacagaatctagtaacaatttgaaaagtaatacactatcccatttttattggctttatgatggttgacataatgttgctgtgacatttaaacattcttgtaccaatattgtcttttaccattattatatactgcagttaattggctttacagttctttatatatatagcaaaatcctgaaagaacatatacctttattttgatgtggcttgaagcttttgaatgggtgaataaggatgatagaaaggtttcaaaatcaagcaacaaagtcttaaagtgataaggcatggcttaaagatcttttgatcaaacatacctgtgtttgagatagatttaagagccctaaatgcttatcaccattcactccaaataaaactattgcttttggataactgttagagtaaagtggctttttaaaagaaatttttgagactgggtctcaccttgttgcccaggctggagtgtagttgtctggtcatgactcactgcagtttcgaccacccaggctcaatcgatcctcccgcctctgcctctggagcagctgggacaaggcacacacccccatgcctggctaattaaaaaaattgttttttgtagaaacgaggttttgccatattgcccaggttggtctcaaacttctgggctcaagagatctgcccaccttggcctcccaaagtgctgggattacagacgttagccacactgtgcctgggggccagcattttctaatacttgtcatattctatagtttgtgcaaatttaagattgtttttttttctgctcgtcagtcaaatcagttcttggattaaaaactcattcttattagaacagaatcatgttggtaacttggtctgcaacaggttttgatggcatcatgtggactttattcatcttaactcatttaaattttctaccacattcccttaagctaatgcaaaagtaccaacaacttaatcttttttttttttttttttttttttttttgagacggagtcttgctctgtcgcccaggctggagtgcagtggcgtgatctcggctcattgcaagccccgcctcccgggttcacaccattctcctgcctcagcctcccgagtagctgggactacaggcatctgctaccacgcccagctaattttctgtatttttagtagagatggggtttcactgtgttagccaggatggtctctatctcctgacctcatgatccactcgcctcagcctcccaaaatgctgggattataggcgtgagccgccacgcccggcccaacaacttaatcttttattagctttgcttaagagggccaattaaatcaaagccctttagttccctttaacagggactggagttatgatgcatgtgttacgacttttggcccactgtccatgcaactctaagtgcaggttgatttgctttccagaaatcccaaaggggctgctcttggatcaccgaagagccttacctatatcaaatcaaaaagacattctgggtcagattagactatgctcctggccctacagattgcacataaactatcataaatacagctttttcagggaactagttctaaaactcttacctgctgagaataagtcttaacactaagatgactgtattatatcaatttattattagaatcagacttatacctagcacaattaactattgtgtgggcaaagaacatttaaagggcatagtagaggtaaggagagacacatactcagctagagataaaaatactaagttgcactgattacttaaaatactagtcacaccataaaagtgccctgtagtttcaaaaacacgtaagcaatgaaatgttagccattatgtgttaaactacttaatctcatttctgtgatgtgaatatttttaaccccctttttgtagatgagggaactgacaagtgacttgtccaaggccatatagctgtgagaaaacccatgcattctcttttcagagttcatgctatcactcaactttaaagtaggccaagattaatgttggtaagggtttgtaatctgtaagaatgctaaaaacgtaagtatatatatcattttagatttgacattttgtatcttgccagtttttaggagaacttttcattttgttaagtatgcatgaatatagttgagtatatgagtaactggttcttatgctgctgttttgtatttttaccagcaggaagattgcaaaagttgatgtatgtaaatcttgaaatatttctaagttttatgtataacaaaatatgtattttaataaacttcttttgatattttatttgcactgtcttaatgagacttccatactcaggagtggtagctatgggattttcacatgggttctgggtacttctaattctttgaaacttagtactgcaggctgggtgcagtggctcatgcctatagtccagcactttgggaggctgaggcaggcagatcacttgaggccaggagtttgagaccagcttggccaacatggcaaaaccctgtctaccaaaaacacaaaaattagctgggcactgtggtgtgcacctgtagtcccagctactcatgtggctgaggcacttgaatcgcttgaacccgtgaggcagggttgcagtgagccaagatcttgccacagcactccaccctgggtgatgcagtgagactttcaaaaaaaaaaaaaaaatctgagctctactgcattggttattaaaatataataaaagtattaaattctattttcgcaccaaatgaaaacacttgattatcattatagcactttaaacttacttttcccttatatattcttgatttagaacaaattaccgtacttgaatttccgatcttgctttctttaaatctttatttaaaagtccatgctaataatgtgtttacatttttacagttacattatgatagaaactgttggattttttaaatatctaaaacaatggcccactgaagaaaggaacaattaactctttaattaattccttaggataaatacccagaaatttaacagctagggcagacttctaatacaataccgaaagtccttccaaaaaccaagtggttgccaacttatgtcccttagcattataacattcttgagccaatagtgtaaaaatacgctgacaattttataggcaaacattactcaaggtatcttactttccacttattactaaagtaattaacccctaaatagatgctcctcaacagtgggactacatcctggtaaacctatcataagttgaaactatcaagttgaaatgcatttagtacccggataaacctatcataaagttgaaaatttgtaaattgaaccagtgtaaatcagaggccatcttacttcatactcatgaagcaactatagtgggatatttttcaacttacgagatagcctaggcttgttgaaacactgtcctaatttactggctctctggtaattaagtcataaatggtcaaacatcaaattctagaaaagcatatatttaaattctcatcactataattcagaatgactggtttacaaaaatatgttcatagtatttgggtaataactgtggtgattgtctcaactggcaagctaagtggaatgccttaaagaatctatccaagattagttggcaggcatttccagtgttggtaaatcaaaggcccacgaaggtatgctgagccttgatagcacaaccttgcttaggactttgcctcaactaacatactttttagtttggcaagttacctgaccctccaggtaactcatttttctccatagtctgctacttacaagattgtcatatttttgtaatctagaagcaattatagagaatattttattagactttacaaatgacaactgcataaaacagaaaccagtttcatgatctagtttagggagtatgtattttatacaactcataatcctttacaaatagaaaaaaatcagtaatacactgaatcaacttgaagaatcttcagcataaagttcaacaaagtcccttagatgcaatttcttttggatttacagcaacactttttgttatgttgtatgtcttgtaaattccaataagtctatccgaaatctcaaacatattatttcgaagagaaattattatgaactgtgcattttttgtttgttcctaaagagaaacaaagaaaagtcaaacattaagtaataacaggtaaatcacacaaacatgtaacctcaaatattttttggacaataaacattacattgataacatgtaaaggaatgatggcaggaataattcataaaacagtatttgagtgtgaaaggaatttggttattttgacttctagtggaaaagatctaggaagatgacctaggattctagctgtgattctgctactaatttgcatttttaatttatattttactcctccaaaatggaaatatttggttcaaataaaaaataatttggtctccactgataccagaggagatggagatggagttattagacaataaagaaaaagctcaattgtaagaaataaagaattccatgtgtaatgtttaggatacccctaaaagtttctggaatgaaaatcccaaaatgattacttacatatatataaaatgcaacaatggacacatttttaaaatcaagggctgcatcaatctcatccatgaagtaaaggggagtgggcttgtagtggtgaagagcaaatactaaagccaatgaactaagtgttttctctcctcccgaaaggttgaagatctttttccaacttttcttaggtggtcgaacactgaaatgattaagaaaatcatagtcaaattacctgtaaagctaaagttaagactttgtgatttgctttccataattgagttctactatcttttttaggaatctgtaacttgcttttcacaaatatgaattctcttttctgttattttataaaaacgttattggaggatgcatacataggagcacataccaaagttttaagatttaaagagcaagctaagtattatacttcttgctattctttctccttatcaaatacaatttctcaatcctcatgttaaaaatgccttgaaaatttaagaaaagatgaactagacaaatattttgtaaatactggctgtctgcccctgtaaactgcaagcataaatagcatgcaagcaaattagtatttactagtaaatgaaacaagttgtacatcttgccttcacatcctacctccaagaaatactgagtttggagaatatgtagaaaaaggtaacagtgggattataaactcagcataattacacacctgaacatgattccttcagagaaaggatccaagctgtctacaagctcgagttcggcgtcccctcccaaagtaagcatttggtaattttcctttaatttatttgttattatataaaaacctgccataaattcattaagcctttgtttccgaagatcttcatatgcctgtctaaaactgtctctttcataagtaattttgtccaattctgctacccgttgcaaatacaattcttcctgtgaaaagattatgatagggaaaatctattcagataaatttgatatgataattagcattgttaattattactttgttttgagacgtagtcttgccctgacgcccaggctggagtgcaatggcgcgatctcggctcacggcaacctccacctcccaggttcaagcgattctcctgcctcagcctcccgagtacccgggattacaggcacgtgccacaacgcctggctaattttttgtatctttaatagagatgaggtttcactatgttggcccagctggtctcgaactcctgaccttgtgatccacccgcctttggcctcccaaagtgctgggattacaggcgtgagccaccacgcccggccaacagcattgttaattatacaaaactaaagatcagaatttaggctaaggactaaaaagaactccaactagtatacatacacagttcattcataccttctttttatactctgcgatggcaccgaggtttggtttcatttcatgacaccgggcttccaaaagtgcaatttgatttgttatagaatctggattcttgatcgcttcaagatcctctgggcttagaaccgaaatctcttcaataggattatcttctataggatgcagtgatatttttgaaatctaaaagttcaatttaggggagagttagagaaggcataatattacatacaattcattgtttaaaaaaaaatatgacaaattacacagctatgaaaacaacaggagttgtgactgatttatcaattatttttcaaaggacttcaagaaaaatagttgtaacactcaaaagtgtccatgtaatcttttcttaaatgtccagatcagccctagggtgaaagggtagttgtctaattctaatcgttactcagacttttctgtatataacaatttatattgttatgtcccctataaaccttagaagtgatcacagaattaaaaatcacaatgtagctcacaaacaaaatttaagaaccccaaccccctaaaacaatcctccccaaaccctccttttt

SEQ ID NO: 96321 - DNA, 14232 bp, Homo sapiens
  misc_feature (1)...(14232): n = A,T,C or G
cttcgactcacaatttgtgttgacaataataaagacaagtaacattaatctactttaatctccaaattcaacaaatataactagcaagactaaaattaggttaagtgaggtattaagagatgttccaaacactggaaagcagcaaacattatacaactgaacacagattactagcttataaaaatatgtggacattagaataattttttacgatgtaaccagcttttgtattacccacagcccaggctagaatacaactagattcttctgttttcttacagctgcattagtgtacagtgatttatggaaaccccacatgcaaagtcctaacttattacataacttgagatgattataaactcacaatagagtaattttattaaaagacttcccatatgcattggaaagaggtaaatttatcaaatactttggaaccaccattacttagtaaagcaaagtataaattactaactattcaattcactttaatatttcttttaaaagtaatttatatatttaaatctattacatattaaaacgataaatctagtttctaccacttattcatcacaaggaaataagtcaaattattgaactattttaggagctaaaagaaacccttgagtccaacctcaacgtgtaaggcttagagctcaataggaaagcaaagctggaacacaagccatgcttataacaacaaatatgaacaaatagcacatatataaaacatggaaaaccctaattggaagtactctgagacaaataacagaatatattgacaaggatatatacatatatacataaacagatcttcaagggaaaagaagaaagataatatataaattaaaatcttataggttaaagaagtttgccaagaggaagtttcctcaggcagaggaaatatggtagattggatacaatatgtaaaaatgaatgcaatgcttgaaaaagcatgagtttgaagaaaacaagaatttaggaaataaagcagagttcagatcatggaaaaactctgcaaactaaagaatctggactcaagtagatgacagtagagctacgaacaagtttttgttagtgaagtaagatttgcactttataaagctacctgatagcaatgtagaagatggagaaaggaagaaagaggttgagaaaaggagatctatcagagcagttgaaaagaaacaattttttaaaagtgacctatggcaatcagagtaattatgtaaatatagtgacagaatgatacagggaatggttatcaacaggagcaaaggagacacagagaaaaactccaaaggctgtgacttgggtggttaaccatatgaatgttccttggatacctgaatgtaacactgccaaaactgaatgcagtatcataaatcctacaaacctatcattctatgataccatcacctaccaatttagttaaacaccaggctctcgtgcttaggagagagggcaagcctaaacattttatcaatgtacaggtactaacatcagtacagatatgatcatccaagtgtgagtgtgtacagaaagtaaaggtaacaaggtcagaactgaggaactacatttaagaaagacgagtaagaagggaaataattgtgggaactaacaaagaacagctatgaagtgaggaagaaaagagggtaatatcttagaagtcaagagaagaaaaactttctaagtttaaaaaaaaaaatgtccattatattccaatggcttagagtaggtgttggcaaatttgttttttgagacagggtcccgttctgtcacccaggctggagtgcaatggtgtgatctcagctcactgcaacctctgccacccaggttcaagcgattctcccacttcagcctctcaggtagctgggactacaggtgtgtgccaccacgccaggctagttttgtgtttttagtacagacaggatttcaccacgttggtcaggctggtctggaactcctgacctcaagtgatccaccacccacctcagcctcccagagtgctgggattacatgcatgagccaacacacctggccagcaaactgtttcttaacaggtcagatactaataacttaggtccagtctctgttgtaactaataaactcagccactgtagctagaaagcgaaatgaaaaatatttattctgttcaacaaattacaaggtcatcggaaactgtgccatgtcacataagtcccatgataggaggtgattaaaattattagcagggagggatcatcactgaaaggaaggataaaaagatggacacatacacgagcattaatcatagaatctagatggtaggaatatgggtgttcactatgtaattcttttgactttatgtgtttgaaaatactcatgttaggaaaacagcatctatatccaattaaactaggatgttaaaagtctattttcactattacacctgacaaaataatcctaccacaagaaagaaaaccatttcaaaatttagtttcaatagagtatgctcatgtgttaatgtgcaaatcactgaagtggctagagactcatacataatataagaaagtctttcaaaagcggccatcttacctgatttgctactacagcatcctgtggatcatctggctctgcagctgccaatagtgcttgcaatgacaataataccgtgcggagagtcattgcagctgccctaaaatgcaaaacatgaaaatatcccaattaagagggctctgcaggcaaaagcaaagtattttcttaataaaaattaaaaaattgtagagctaaaagttacttagatctttatcttaattatatagttaagtcatagacatttataattatgtatctgcctatcatatattttcttccttactttacaatttgcctatttcttttttctttttttcccccgagacggagtctggctctgtcgcccaggctggagtgcagtggtatagtctcggttcactgcaagctccgcctcccgggttcacgccattctcctgcctcagccttcagagtagctgagactacaggggcccgccttaacgcccagctaattttttgtatttttttttttagtagagacggggtttcacagtgttagccaggatggtctcgatctcctgacctcgtaatccgcccgccttggcctcccaatgtgctgggattacaggcatgaaaaaccacctgcgcccggccttttttcttttttttaatgacagtgtcttgctctgccgctcaggctggagtgggcagtggcactatcttgtctcactgcaacctccgcctcctgggctcaagcgattctcctgcctcagcctcacgagtagctgggactacaggcacacaccaccacacccagcattttttttgtttttccttttttcgtaaagacggggttttgccatgttgcctaggctggtatcgaacttctgagctcaggtgatccatccaccttggcctcccaaaggttagggttacaggtgtgagctactacactcggccagcttttctatttcttaagacaactcgaattctgaactgtccttgtttttcttgttgccaagatccttcttgttagtttagtttagtttagttttgaggcggagtctcactctgtcacccaggctggagtgcagtggcgcgatctcggctccctgcaagctccgcctcccgggttcatgctattctcctgcctcagcctcccgagtagctgggacaacaggcgcccgccaccacgcccggctaattttttgtatttttagtagagacggggtttcactgtgttagccaggatggtctcgatctcctgacctcgtgatccgcccgcctcggcctcccaaagtgctgggattacaggcgtgagccaccgcgcccagccaccttcttgttagttttatccactcacttatttttctatccatttctctaaacaaagttaaagtgataaatcattagtactaatagcatgtgaggctttctttcaatggcactctaaaaacaagatactatgaaacaaatatattttcttttttcttttcttttattttcttgagatggagtctcactctgccgccgaggctggagtgcagtggcgcgatctcggctcaccggaacctccacctccctggttcaagcaattctcctgcctcagcctcacaagtagctgggactacaggcacatgccaccatgcccggctaattttttgtagttttagtagaacagggtttcaccgtgagacacaggatggtcttgatctcctgaccttgtgatccgcccgccttggcctcccaaaatgctgggattacaggcttgagccaccgcgcccggccatattttcaagaaaatatgaaatcattccataacattctgaaacaggacaagttttttggattaaactacatcacttaatttatgattctaaatgtatttataaggaaaatatctttataaagctaatatttgtctaaaaaatagtatctacctgtctagcaataattcttggcatttctgttaaaaaagttgtctcactggctgggcgcggtggctcacgcctgtaatcccagcactttgggagnnnnnnnnnnnnnnnnnnnnnnnnnnnnnnnnnnnnnnnnnnnnnnnnnnnnnnnnnnnnnnnnnnnnnnnnnnnnnnnnnnnnnnnnnnnnnnnnnnnnnnnnnnnnnnnnnnnnnnnnnnnaggagaatcgcttgagctcgggaggcggaggttgccgtgagccaaaatcatgccattgcactctagcctgggcgacagagcgagactccatctcaaaaaaaaaaaaaagttgctttatcaattaatagaggtatgtataaatatgtggacatattaaaaatgttacatgtaaagagaatgcccatttttaccatgtaaattagatcattcttctttttttctttttttgagatagggtctcacgctgcctaggctaaagtgcagtggtacaatcaaggctcactgtagccttgacctctttggctcaggtgattctcatacctcagcctcctgagtagctgggactacaggtgcacaccaccacgcccagctaattaaaaacaatttttttttttttttttttggtagagacagggtttcaccatgttacccaggctggtcttgaactcctgagctcaagcagtcctcccacctcagcccccgaaagtgatgggattataggtgtgagccacgacaactagccaattactctaaaccagcctttttcaactgggttcctgatttgaaccacaaaatagaaaaaattagtgactgttttctcaattttcccaagtttggtacataaatagtacttccctagatgcctacgataaaagttaatttaggctgggtgcagtggctgacgcctgtaatcccagcatttaggaaggccgaggcaggcagatcacttgaggccaggagtttgagaccagcctgggcaacatggcgaaacactgtctgctaaaaatacaaaaattagccagatgtggtggcacatgcttgtaatcccagttacttgaggggctgaggcaggaatcgctcgaacctgggaggcgaaggttatagtgagtccagatggcgccaccgcactccagcctgagggagacagccagactgtctcctacacctccacccctagccaaaaagttaagttattgccaacaaccaacaatggatgtcttaaagcaatgatctcagtgttgttcatccaaccagcagcatcagcatcccttgggaagttttctctatcccagagctactgaatcagaaactccagggtttgagtcctagccgacgccgtcgccgcgcgcgcgaggcctggaacacaccgcacgagccgctcccgcccctacccctttacgcccacgtggagccggccccgccagcgcgagcgcgccccatacaccctcccgccctgcgcctacatgctgccctggctctgcccgtgtgtggggggcgcttccggccccgcgggggtggggaaaataggggattaaaaaaaaacagcgcgcggaaccgggccagggttgcccacccccgccacaatggcctctggggtgaagtcctgcgcttccagctgcccggccactaggccgctacgctacggaacatgaacaagctccgggcagaggagtggttctgcgacgtgaccattgtggccgacagcctcaagtttcgaggccacaaggtcatcttagccgcctgctcaccgttcctgcgggaccagttcctgcttaaccccagctcggagctgcaggtctccctgatgcacagtgcacgcatcgtggccgacctgcttctctcctgctacacgggcaccctggaattcgctgttagggacatcgtcaactatcttacagccacctcctacctgcagatggagcacgtggtggagaaatgccagaatgccctcagccagttcactgagcccaaaataggcctcaaagaggatggggtccgtgaggctagccttgtgagcagcgtcagcgccaacaagtccctcctccctccagccaggaccccaaagccagccccgaagcccccaccccccacctcctctatcccctccactcctgcggccagtgaagctggagttcccactggatgaggacttggagctgaaagccgaggaagaggatgaggatgaggacgtatctgacatctgcatcgtcaaggtggagtcggccctggacatcgcacaccggctcaagccccctggaggcctgggagggggcctgggcattggaggctccgtgggtggccaccttggggagctggcccagagcagcgtgccccccagcactgtggccccaccgcagggtgtggtgaaggcctgctatagcctgtcggagaacgcagaaggggagagcctgctgttgactccgggaggccgggccagcgtgggggccacctcgggcctggtggaagcagcagcggcggccatggttgcccggggggcggggggcagccagggacccctgcctgggagcttctcaggtggaaaccccttaaagaacatcaagtgcaccaagtgcccggaagtgttccagggcgtggagaagctggtcttccacatgcggcagcagcacttcatcttcatgtgccctcgctgtggcaaggagttcaaccacagcaacaacctcaaccaccacaggaacgtgcatcgtggtgtcaagtcacactcgtgcggcatctgcggcaagtgcttcacacagaagtccaccctgcacgaccacctcaacctgcactcgggagcgcagccctaccgctgctcctactgcgacatgcgcttcgcccacaagcctgccattaggcggcatctcaaggagcaacacggcaagaccaccgccgagaacgtgctggagaccagtgtggccgagattaatgtcctcatccgctagccgcgcaggcgtggaggcccggaggctggggtccctgggctaggtggggaaagggctctttggcccaggagaattggtgggtggggggtctggggcagaaaggtaagagtgggaggctgagcagatgcacacatcctgagagagggaagatgattccttggagagaagactgttgttgctcttgagagtgcaagaagctggagcgggggacagggttcttggagtaggccaggggaatacggggtcccagagaaagatttccttctcttagaggcgcatgtgtatgtggagggagggaaaagggtcctatagaacgagggaagacaaaaatgttttattcctggctaagcctgcccaggggaaggttctgacatttctcgagataagaagggtkggggggtgggtgggaacagggagggaatttggcaggaggacatgctcctgcttataatatakgcctggggtgagggagtggtaaggggaaaagattattgagtcccagaaaaggaagggggagacagttcttgcatgctggcgaaatgagactgcaagtatgaggcttgctgaaatttgagggagaaaaaagtaagacgccaggtaagagaacatggggtgcacatcctggatagatattgggaagtgggggcacaatagcaagaacaatggatagtcatgggggtgggggggtaaggcacttagaaaagaacacaagaagggctgttgggagggagggagaggagtagagacatacagtattttttaagaaaaaacattttttaggattttttctggagtttggggttttagtttttctacttttgttttccacaaaataaaaaacaaaaaacaaaacgaaaaaaaaaaaaaacaaaaagaaactccagggttgttttaacaggtcctccaggtgattctgatgcacattaaaatttgacaaatactgttaattagggtgggcatggtggctcatgtctgtaatcccaatactttggaaggctgaggtgggcagatcacctgaacttgaggtcaggagctcgagacctacctgggcaacatggcgaaaccccatctctactaaatacacaaaaattttctggccgtgatagtgcacacctctaatcccagctatttgggaggctgaggttgcagtgagctgagatcatgccactgcactctagcctgggtgacagagtgatactccatcaaaaatagataaataaaaaacaaaccaaaatgagatatcacctagcactcgttagaacggctactataaaaacaatgaacaagtgttggtgatgatgtaaaggaaaggaaaccctcgcacactgctggtgggaatacaaattagtacaaccattatggaaaaacagtatggagtttcctcaaaaaattaaaaataggaccaggcacggtggttcatgcctgtaatctctgtactttgagaggctgaggcaggaagatcgcttgaacccaggggtttgagaccagcctgggcaagatggtgaaacctcatctcttttaaatgcacaatattcttttaagacatgagtcaaaacaaaaagccaaactcagtcctcaaatgttcattcttgtctttctactcaccattttttacatttttttttttttttttttggaaacgaagtctcactctgtcccccaggctggagtgcagtggtgcaatcttggctcactgcaacctttgcctcccaggttcaagcaattcttctgcctcagagcctcctgggtggctgggattacaggcgcctgctaccatgcctggctgattttttttttttttttttttggtagagacggggttttaccgtgttggccaggctggtctcaaactcctgacctcaggtgaaccgtccacttctgcctcccaaagtgctgggattacaggtgtaagacaccgcaatggcccgtctttctagtctcacaataacaaggggaaattctttctctaatttcatttgatagtttgagtaatttcaaagagaatgtttaaaggcacatacatatcaaaagctacctagatgttatcagcataaagctgacttaaaccaccaaaaataacataaggaacacaaagacaaaatataaccaatgaaatatacaacacttaagtgcactatttaattttccaatggactttctaagcaatctaattttaaaatccatggtgtcacctgaaacaaaatcttatgtaatttttaataaaattatttatttaaaggaaatttacctgaatagcaaagaaaaattttcactcaaaggaagtatttaatactaaggcaactattaaactcataatatttattttaatttgaaagaaaaacataaaggcatgtaaaataaaagcatctaaatcttgcaagtccttcatactatcacataggtagtctaacatatatctcaacaaggcaatgaacacttttcttgaaaactgataatcctgggccgggcgcagtggctcatgcctgtaatcccaacactttgggaggccgaggtgggtgaatcacaaggtcaggagatcgagaccatcctggcaaacatggtgaaactccgtctctactaaaatacaaaaaaattagccgggcgtggtggcaggcgcctgtagtcccagctactctggaggctgaggcaggagaatggcgtgaatccgggaggcagagcttgaaatgagtcaagatcactgcactccagcctgggcgacagagccagactccatctcaaaaaacaaacaaacaaacaaacaaaacacacacacaaaaaaaaaaaaaaacagaaaaaaagaaaactgataatctctcaaattagtgaagctggacccttacattataccatatataaaaattaactcaaaatggatcaaagacctaaatgtaagagctagaaagcaaaaacataagggagaaaacttcatgacactgaatttggcaatgattccttggatatgacatcaaaggtacaggaaaccaaagcaaaaaatacgagaatatgcacgacaattttatcaaagttaaaaactcctggccgcatgcagtggctcacacctgtaatcccagcactctgggaagctgaggcaggtggatcacctgaggtcaggagttcgagaccagcctggccaacatggtaaaacaccatctctattaaaaacacaaaattagccaggcatggtggtgcatgtttgtaatcccagctacgtgggaagctgaggcaggagaactgcttgaacacccaggaggcagaggctgcagtaagccgagattgtgtcactgcaatccagcctgggcgacagagcgagactctgtctcgaaaaaaagaaagaaagaaaataataaaaattagaaataaaaataaacactcctgtgaagctggtgtggtggcacacacctgtagtcccagctacttgggaggctgaggtgggaggatcacctgagcccaagagttcgatgccagcttgggcaacacagcaagaccccactacttaaaacaaaaaaacttctgtgttgcaggagaaaatatttccaaatcatttatctggtgagggcttaatatccataatacataaagaactcctacaactcaataacaaaaaaaaaaaacctggttaaaaaatcgacaagggatgtgaacagacgtttctccaaagaagatatataaagtgtcaataaacacataaaaagatgctcaacaccactaatcattagggaaatgcaaattggaaccacaatgacctatcacttcatatccattagaatggctaccataaaaaaaatggtaattgttagccaggttgtggagaaatggaactcttgtgcactacttgtgggaatgtaaaatggtgaaaactctatgggaaacagtatggcagtccctcaaaaaaaaacaaaaaacaaaaacacacacagacaaaaacacacacaaaaaacacagagttactatataatccagtgattccacttatgggtatacatccaaaagaactgaaagcagtaactggagtattaatatataaatgttcataacaatattattcacaatagccagaaggtagaagcaacttaaggtttccatggatggatgaatggatcaacaaaatgtttggcttttgtgtatgtgtatgtgtatgtgtgtgtgtgtatgtatgtatgtatgtatgtatgtatgtatgtatatatatatcctgacttcaggtgatccatccgcctcggcctcccaaagtgctggggttacaggcaagagccaccacgcccagcctacttacttatttatttgagatggagtctccctctgttgcccaggctggagtgcagtggcacaatcttggctcactgcaacctctgcctcccaggttcaagcgattctccctagtagctgggactacagtcgcatgctaccagacttggctaacgtttttgtatttttggtaaagacaggatttcaccatattggtcaggctggtctggaactcctgacctcaggtgatccatccatctcggcctcccaaagtgctgggattatacgcgtgagccactgcgcctggccctgcttatttgagacagggtctcacggtcacttaggctggaatgcagtggtgtgatcacagatccctgtagcttcaacctcaacctcctgagcttaagcgatcctccaacctcagcctcccaagtagctgggactacagactcacgccaccatgcctggctaatttttgtattttttgtagagatggagtttcaccatgttgcccaggctggtcttgaactcctgggctcaagcgatccacccaccttggcctcccaaagtgctgggattacagcaggcatgagccacgatgcctggcctagtaaattttatgctgtgtactttacaaaaattttcttaaaaagttttaagtaggccagacacagtggctcacgcctataatcctagcgctttgggaggccaaggcgggcggatcacgaggtcaggagattgagaccatcctggctaacacagtgaaaccctatctctactaaaaatacaaaaaattagcctggagtggtggcaggtgcctgtagtcacagctgctcaggaggctgaggtaggagaatggctgaggccaggaggcggagcttacagtcagccgagatcgcgccactgcactccagcctgggccacagagtgagactcttgtctcgaaaaaaaaaaaaaattaataagttcttagagattcaaaaatccttattataaatactgtctatttcctctatttgcactgtcttcctattgtgacgacacaatctactacagactctagattaccatttcaagaatcagaaacttgaatgaagaggaggttaaagaaaaagaaatcagccgggggcagtggctcatgcctataatcctagcactttgggaagtcaaaacaggggtattgcttgagtaccagccagcatgggcaacatggcaagacccatctctacaaaaagtaattttaaaaaattagccaggcatggtggtgtgcacctgtgataggctgaggtgggaagaatgcttggggcctggaaggtcaaggctgcagtgagctgtgatcgttgtcactgcactccagcctaggcgacagagaaaaaccatgtctggcaggggcaaaagaaaaaaagagaaaagaaaaaaaaaaaaaggcagtttgctctcaaaaccctcaaaattgaaaaaaaatctagagctgcaaatttagatacaattcataacaatgtcaaagagaaaacgttgtcacttttctgcctgattgaattttcacagaatgtgtgaacacggctcactgcagccctgactttcaaggctcaagtgattttctcaccttagactacaggcacgcaacaccatgcccagctaattttaaaattttttgtacagacagggtcttgccatgttgccagtgctggtctcaaacacctgggctcaagcaatcctcctgccttggcctcccaaatgctaggattacaggtttgagtcactgcacacagccagttttaataattaattgtaagaaaattagttcaataattgaggtcaggcacgatggctcacgcctgcagtctcagcactttgggaggctgaagcaggtagatcgcttgagcccaggagtttaagaccagcctgggcaatgaggtgaaactctgtctctacaaaaaattagccaagtgtggtagcacgtgactgtagttacagttactcagaaggctgaggtgggaagaccaattgagcctggaaggttgaggctgcagtgagccacagcactctagtctgggtggcagagtgagattctgtctcaaaaaataaaaataaaaataaatatccaaacaaaacctattgatatagtttggatatttgtcctctccaaatctcatgctgcaatgtaattcccagtgttggcggtggagcctggggagaggtgtttggatcctgggggcaaatcgctcatgaatggcttagtgccaccccattggtgatgactgagttcatgtgagagctggttgttttaagtgttttggctgggcgtggtggctcatgcctgtaatcccagcactttgggaggtcaggtgcacagatgatccgaggttgggagttcgagaccagcctgaccaacatggagaaaccccgtctctactaaaattacaaaattagctgggtgtggtggcacatgcctgtaatcccagctacttgggaggctgaggcaggagaatcacttgcacccgggaggtggaggttgcagtgagccaacatcgtgacattgcactccagcccgggtaacaagagcgaaactctgtctcaaa

SEQ ID NO: 96322 - DNA, 13174 bp, Homo sapiens
ggattacgacgtcaggagatcaagaccatcctggccaacatggtgaaaccctgtctctactaaaaatacaaaaattagctgggcgtggtggcacgcagcctgtagtcccagctacttgggaggctgaggcaggagaatcacttgaaccccggaggtaggggcaggagaatcacttgaacctgggaggcggagtttgcagtgagtcaagatcgcactactgcactccagcctggatgacagaccgagactccatctcaaaaaacaaaaaaagaaataaaataagaaataatgaagttttctctagttttgttaaagtagtatataaaaattagattattagaaaatacacttaattgctagcttagaagtcttttaaattctactgtcagccgggcacagtgtctcacccctgtatttccaacactttaggaggccaaggtgggaggatcacttgggcccaggagttcaagaccagcctctgtaacatagggagaccctgtctacaaaaaattaaaacaattagccaggtatgatggcaagcacctgtcatcctaggtactcaggaggctgaggtgggaggaccacttgagactgaaagattgaggctgcagtgagtcttgattgcaccactgtactccaacctgggcgacagagtgagactctatatcaaaaaaaaaaaaacaaattctgtcagtcaatcaactaatattcaagtatttaatatagtaggcttcctgctaagtttcaacaattgtctccatttcttcccactaaattttttaatgtatagtcaagaaggaagagctatctgatgtctagagtgacattctagtgttgggaaatgctagataagatgttcacattttcagatttcccagccacatttaagctcaaaaaatatgaatacttgtccccatgactttcctgaaggtctaaaagatatttctgtctccatcccttcaaaaccaagatacctgattgtgaggagtagaagacccctatatggtccagtgtatgttctcttcaatctcaaagcgtgtttagagtattgccattgctatcagaaatgtgaactttcccctcagatcctagattttcagattaagctaatcttagaacatgggctttcctccttccttatcagaggccactgtggtaaaatattatagaaagtaattgttggccagtcgcagtggcttatgcctgtagtcccaacactctgggaggctgaggcgggcagatcatttgaggtctggagtttgagaccaccctggccaacatggtgaaaccctgtctctactaaaaatacaaaaattagccgggtgtcatggccggcgtttgtggtcccagctactcgggaagctgaggcaggagaatcacttgaacccaggaggtggaggctgccaagatctcgccactgcactccagcttgcgtgacagagtgagactctgtctcaaaaaaagtaataataataattgctaatacctaatgttgcgctttacagctcacatagaacatttacttatattatctaaaatgaggtattaaaatagatgaacaaactgatatctgggctgggagggagttgttgcttcttttatttctttggggtactactagcacagcctgtcagtacattaaaaatagagactttttggcattactttgttttttccaagattaactagcacaacacaaatttcttgtgcctaggtgtaaccagtgttgagacttcacataccacacacaattaatgacatcaaccttgcagtactgacagcgatatcatgcccagtttgtatatggtgtctgggtcatctgaggaagttaaaatagtattgtgatctgtgaacaggccaagtctagcaggtgccatttgcatagactagaatataaatagtatcctctaaagctatatgatgtaatgtccctaaaatgaattatctcccatcttctttcattctcagaaacaaaaatactgattcttgtattgtttgatggaaaactattagttgttcaacataaccagcaaagtataaagacttgacacctaatggcttctgttttctctgagagttagaattagtatgtagcttaagaagagctgtaggcatttagaatgatatttggggtggtggtggggaaatggaggcatcagctagggatagtttagaaccagttctaaattgagtggaattgccaaaattcggtatggtattggataacaaatatggcctattttgacacagggtcttaattttttttttaataggcttgtgccattcttcttaatctaataggcattggcaatccctaattacggagaactggtttgtctagtgacatcccaaacataggaagaatgtttccttctttaaaattttttgatagacacttgagtcaaatgaagaaatcccagatgaaaaattttagaaaggacattctactctcctgtagaatgggaaaattgtcccattcagctagttgtaagccaaaggagaaaacttaaggggttgtattatgcagctacatttttgaactgataacagttacccttccctgtcctttcctgcctaaacagatcctgatgctgcaaaccaacatttctttctttttttttatcactgttgatgaaggttatttaaaacagaatcagtgatatgttagcaaatattttatgactggctttcaggaaaaaagaacatagattcatagcaattgtgtcatggtttaaatactcccaccatcaatgtgaggtcactgaatgtagatttgagaagagctttgtatatgcagaattaattctcattagccaatctgagcaggctccagcacaccactgacagttaaaagaggtggatgactgatgtgagtaaccacatgaatgaatgtcaaaaacattatgctaaaaaaaatgtgctgaggtaagaagccagatataaaagaacatatactgtatgattacatttatttgaatttagaacaggcactattaatttacagtgatagaaatcagatcagtagctttttggtttttgttttattgagaaggaatttggctatgaagggatatgaaggaactttctttctttctttttttttttttttgagacagagtatagatcttgtcactatgctagtagcgccatcttggctcaactgcaacctctgcctcctcagttcaagcaattctcctgcctcagcctcccgagtacctgggattacaggtgcccaccaccacgcccaactaatatttttgtatttttagtggagacagggttccaccatgttggccaggctggtctcgaactcttgacctcaggtgatccacccaccttggcctcccaaagtgctgagataacaggtatgagccagcacacctggccaggaactttcttagatgaaaatattcatagcagcattacccaatagaactttctacagaactatcaacataacaattgtattttcaatctctgcttaggaaaaataaccaaacagcaatttaaagatagcctgtaggccaggtgtggtggctcatacctgtaatcccagcattttgggaggccaaggtgggcagatcacttgaggtctggagttcaagaccagcctggccaacatggtgaaactccgtctctgctcaaaatcaaaaattagccggctgtagtggtgggcgcctataatccaagctacttgggaggctgaggcaggagaatcacttgaacctgggaggcagaggttgcagtgaactgagatcgcaccactgcactccagcctgggcgatacggcgagacttagtatcaaaaagaaaaaaaaaaagcctaatagtaagatggaacccagtatgctagtatatatttaacagtcagctcatagcaaaccaagccctagtttgttgtgttttctaatttctatggtgtaaatactctcaccatgactcaccattcaaactaccaagatgaaggcattgaatggtgagttggaaagagaaatgtacgatcaattcataagctggtgtgaactcagtttctgaactgcttctacccgtcactattattgacggactgaattttcttggttttagtttagttctttagattattcaatctttcccagagctgtgtctttgcccagagactttattgaacctcagagatgtctggctaggctgtagctcaactttagatcctttaacagaaggaagaacacgagggctgagtgcggtggctcaggcctgtaatcctagcactttgggaggctgaggtgggcagatcacttgaggtcaggagttcaagaccagcctggccaacatgatgaaaccctatatctactaaaaatacaaaaactagttgggcttggtggtgggcacttttaatcccagctacacgggagggtaaggcaggagaattgcttgaacccaggaggcagaggttgcagtgagccgagatcatgccattgctgtccagcctgggtgacagagcaagactccatctcaaaaataataataataaggaataacatgcgtatgatccttaaaatatttctgcaactttttttttcccctggtgctgcagcttctattcgtaaagaatggtgaggaacacaaccaagctttaaaatcagtgtacttgagaggttttgttgttgttgtttttacaggtaattaaccatatgttacacattttaatctgcttttaagtgcaagagagattggcaaatgacttaataaagaaatgacttctgcttaaattggataaaatggttgtttactggtgtttattgctgtattccaagtagacaagtaatctgtgaatccagtttagtttattggacaataaatggtactcagaacttttatcagtgtttgattgtcaggatgcccattgaaattgacttcatacttagggaactttaattttattgtacagtatgcactgttaaaaaaaatatccttgtctttcagtataaacctatgacattgccttgtggcattatcatccctgagatgctttcttgctctaagatttcttctatgtcataaagaaaaaaggaacttttggttccttcatatctaatgcagttttttcttttgtaaactctaaatattttccattgccaccatcaacaattcaaataacaatcttactgatggaaagtccatgattagaaatagctgcttcttcaaaaataaagaactttgtatgtacctatccattttgaaaatcttaaccattgtgctcagaaggagagatatgattttaagaagggtcacatttagaataccaataatgtcctactcctgaaataattgggaccaggccgctaaaaagaaagcacctgatgtttggcctttcagtattttctataactatgacgccttggtccaaattatctaataaatgcttcttcctattctcccgccctaagagtccatggtctctttataaagaagaatcatatacatacagatattacttgaatttatatggcatcctcatgaggtgaatcccacctatgtcacttaggattcatttgattgccctggtttgatccaattcaagtattaattcaggccaggtgcaatggcacatgcctataatcccagcactttgggaggccgaggtgggcagatcacttcagttcaggagttcgaggctagcctggccaacatggggaaacccccgtctctactaaagatacaaaaattagccgggtgtggtggcaggcacctgtagttccagcaacttgggaggctgaggcaggaggattgcttgaacccgggaggcagaggttgcagtgagtaagccaagattgtgccactgcactccagcctgggtgacaagagtgagaccctgtctcaatagaaaaaaaaaaaaaaggccaatatgggcccagggcctgccattcagacttccgcttgtggcagagaccaagggatggcagcaggttagtcgcaggtgaagtcataacaagcggtgtggagccgcacctgggcaacatgtcggaaggaaatgcagtgagcgaacccagcactctgcaagggccccgacccctcctgactggggcccaggagctcagcaggcagcgactggcaccccttcaccccgggccgccttcccttcatccgctctgggaaccttaccctgggggttgaggttgggggtcaagaagaaaaccttcaccccaaatatcatcagtcagaagaacccaaggaagaagtaaccgtcaagaaggagaaacatgaaagggacagagatggacagagacaggtgcatggacagggatgaggccacccagaagtgatccagtctcactccatctttgagaagggcccagctgaaatgatgaagaaaaaaggaactggaataagaaagtgaatgtgtcagacatgggaccttctcatatcgtccacatcaaaaaagagaagaaagagttggacgaagacacgaaacatctcaccatgctgtagaaggacgatttcattgatgaccctgggctgaggaatgacactcgcaacatgcctgtgcagctgccactggctcactcagggtggctttttaaggaagaaaacaatgaaccagatgttaaaccttggctggctggccccaagaaagaggtgggggtacctactgtgaaactgaaagaggagctacaagatgaggaggaggccaagataaaggctccttccagagcagccaggaagacccccgggcctcccgaaggacatatccgtggcagagctgcccagggagctgagcctcaccaaggaggaggaattgctgttcctccagttkccagacaccctccctggccacccacctatccaggacatcaagcccatcaaggcagaggtacagggcaaggacagagaggtggtactcatcaagcaggagaacgaccaggaagccaggctggcaaagaatgcttctaccctagctgacctgacagagggtcaggttggcaagctgcccatctgcaagtccgaaagggtgcaactcctcctgggcaaggtgactctggacgtgaccatgggaaccgcctgctctttcctgcaggagctggtgtctgtgggccttggagagagtaggactggggagatgatagacctgggacatgtgaagcacaaacttctgtgttcccccgattttgaatccctcttggatcacaaacactggtaaaatgatcagatggaggaggatggcggctgctgtctgctccagacattttgttctcgaatctctgcaacccaggagaggccagttgagcccacccactccagcctttggcagccattgtcccagtttcccccagggcccacagggcttcctcccacagcagctgtgaatggcacagttaccttcccacagtgtgaagatggtacatccttgctgctggggacttgtccatgctatttgtttttgtatttatattttgtattttgtcttaatctcttcaactgactgcatcctcccaagggaggagggaggatctgtgggaaggtgcaggcttttggtggctgttgggccgtcaggcagcaagtgtgaggactgcagcttttgctggtgctcccttcttcctcccagaggcagtataggagagagagcaaggattgagtctgagacttaagcatggggtcccaactcatcagttcctggttctgtatccttgcgcaaactacctaacctttctgagcctcctgttcctcatctgacaaaaatggggatgatacctacttcacagggttgacgtgaggattacatgggatattatagatgaaaactccttgcacaaggccagaaccagtagccactcaataaatgttaatttccttttaagtaaataaataaataatcaaatgttaattcaaagtcccacatgagagcgttctgtgttttgtggtgtttgttttgttttgttttagagacagggtctcattctttcacctaggctggggtgcggtggcacaatcacagctcactgcatcctcgaattcctggactcaaaggatcctcctgcctcagcctcctgagtagctggaactatagacatgtgctaccatacctagctagtttttttttttttttaatctgtagactgcctctgtggacagtttttcaaattttttgtagaaacagggccatgctttgttgcccagactggtcttgagctcctggcctcgagtgttcctcccaccttggctgagacgacaggtgtgagccactgcacgtggtcagccttctatctttaaacaggatctgaatctagattcatcaactcataaatatgttctcatttttaaatgatggaatgatggaaagtgaaagcaccaatcaaatcatattttcattatttccagaatgtgttcagcacagttaggtctggaaaggtttttgggaaaggttgtgcaaggttgaatttattcactgttgaaatagcacctctaaatttcaagcaattgtatgatttacttttatacaagtgtcagaaatgctaaattattaaatcccaatggcaggatcactgacaactagaaacttgagtttatttgcttccgtggtttactaaactaagctagagaaatatagtacagttatttactacttaagatcagccagaaaatgtatagtgagttcatactgtactagattctgggagataatcaaatgtaaaacatataccagtctcaaggaagttaaaatctagtaggaataatcactatattcagcaataattgttaattgagcacctactctgtactagatacagtactaagagctgggaataagattaagtcataattcctacctataaggagttcaaagtttagttgagaagacatttgtaaagaagtaattgtaactatgatagataccttcctggaagtatgtgaaggttataagtgatggcataaaagagaataatcagttctgcttggaggccaaggactatagccaagaagacatgccttatttggaactaagagtgaaagacaatttgaaatgtagacttgatacatacacaagaataaaagatcatggcacatttgggacatcatgagtatgaccaaagagtaactgactaaagttactcttttggtcagggaaagataaagtttgaacaataggctggattcatatcctagagttaagagttcattcaatagagaaccattgaagagtttttaacaggggaataacatcagatttgtattcatgaaaaagtactctgtttattcatcatatatttattgagcccctataatataccaggcatagttctggatgctagcaatcatcagaaaaaaatattgccttttctatagctcctcttacctaggcagccaagttttgtgccctgagccctagctcctttcctgtgctcagctgagtgaatcagggttaggaacataaccaaaggtagacagtccatagatggtcagtgagctatgagctaaaacagcagaggaaatcagttttttgtctgtctgtttttgatgtaggatctccctctgtcacccaggctggagtgcagtggtgctatcatggctcactacagccccaacctcctgggctcaagcaatccacccaccttagttagcctcccaagtaactgggactacaggcacgcacccccatgcccggctggcttttaattttttttgtagagacagcttgttgtgcaggctggtctcaaactcctgggctcaagcgattctcctgtctcagcctcccaaggctctgggattacaggcataaatcaccatgcctggctggaaaccagttcttcagataagagagtgcagcatgtaacatttaaagaagtagagaccaggttgacatgaacagctttatagtaagattaaagtgatatgcttcatttagtgaacctattaaagataacagaaacctcgttaattcattatacacacacacacacacacatatatacacgtgcatatatatatgtgtatatatatagtcaggtgcagtggcccacacttgtaatcccagtacttcgggaagccaaggtgggaggatcacttgagcctagaagtttgaaaccagcctaggcaacatagggaggcccatctctataaaaaaaataaaaataaattagctgggcatggtggcgcatgcctgtggtcccagctacttggaaggctgaggcaggaagatcacttcagcccagagctcaaggctgcagtgagctgtgatggcaccactgcaccccagcctgggtgacagagagagatcctgtctctaaaaaatttcttaaatgcagtcacacacactaaacaaaggggaaataaggttttagagcagtaattccatctatcattgttttcttggtcatttttccatggaaaactatttttgtattcaaagtcaacactcattctcttatatgtttacattcagaactgaagaccttaactggaattaacttaaaacatttgtagaaaatcagatgcaaacatgaacaaactaagagattttaccacaaacaatgatgtagaggcaggtagtctgcaaggtcagaaccatgccttcagaagcagcaattttaagtgagacctgaatctcctatactcaaaggtcttgcattagtcaggattctctagagggatagaactaataggatagatatgtatctatataaatgggagtttattaagtagtattaactcacacaatcacaaggtcccacaatagaccacctacaagctaggagcaaggaagacagtccgagtctcaaagctgaagaaagtctgacgttccagggcaggaagcatccagcgcaggagaaagttgtaggctgggagggtaagccagtctggccttctcatgtttttctgcctgctttatattctctggcagctgattagatggtgcccaccaagattaagggtgggtctgccttccccagcccactgactttggcaacaccctcacagacacacccaggatcaatactttgcatccttcaatccaatcaagttgaccctcagtattaaccatcacaagtttcatttcaagattaataatatccttgtccatttaatcataaaaaggaatgcttattatgtgccaacttttccaagtgctttatatgtattaactaatttactcctcagaaaaatcctgtaagtacctgcaaatgctattattgttccttttttctttctttctgagacaacatctggctctatcacccaggctggagtgcagcagcactatctcggctcactgcaatttccgcctcctggactcaaaccatcctcccacctcagcctcccgaatagctggggctacaggaatgcaccaccacacctggctagtttttttgtatttttttgtagagatggagtttcgccatgctacccaggctggtctcgaacttattagctgaaacaatctgcccatctcagcctcccaaaatgctggggttacagacacgagccaccgtgtctagcctcctattttaaatatgagaaaattggcctggcacagtggctcatgcctgtaatcccaacactttgggaggccaagttgggaggattacttgagcctaggagtttgagaccagcctgggcaacatgacgaaaactcttctctacaaagaatcagctgggcatggtggcatgcgcctgtaatcccagctacctgggagtctgagataggaggatcacttgagccagggaagttgaggttgcagtgagccgagattgcaccactgcactccagccagggtgacaaagtgagaccctgtctcaaaaaaaaaaaaaaaaaaaagaggccaggcgcagtggctcatgcctgtaatcccagcactttgggaggccaaggcaggtggatcatgaggtcaggggttcgagaccagcctggccaatatggtgaaaccccatccctactaaaaatacaaaaattagctgggcgtggtggcacgcacctgctgtcccagctactcaggaggctgaggcagaagaatcgcttgaactcaggaggcggaggttgcagtgagctgagattgtgtaactgcactccagcctgggtgacagagcaagactctgtctcaaagaaaaaaaaaaggaaaaaggagaatttaatctgattaccagattgtaaatggcaaatctggaatgtgaacccaagcagtctgacttatgcacttaaccacagttatactccctctactctctatggagaatttatcaacttaatttagtcaaatttggttatcagtaccaggcttaagggaatttaaatgtcagttaactgctgtgtaacaatgaatcaaaatctatttattccatcatcacctttttttcaggaaaatagtagcaacattacttgaatgacaactttgggatcatattttactacttctctttcattcatttgtcccaaattcctgcctttgccatgggactctaggcagttgacaaactctgtgagcctcagagtcatcatttataaaataaggttagtgataccttactcatgtgagaattagatgagataaagtatacaaagcatttgatgcagtgctttttcactcagataactaccgttgcattccattgcctgatgtatcaaatccaaacttttgcgtggctttcaaagtctccctagaaatggctagatcccacccatcttgatttatttcttgccttacttgatatataaactttcttctgtctctattcctcttgggacatacacacctttcttttcctctctttttcattatccacatgtttaagacctagtttaagttcagtcttctccgtgaaagcatctccagttaaactatattgttctttcccttttttgaactcctgttgcagttataatagatgttacattgtgtgatatttcacaaattctttgatatatgctaggtttctctttccatctagattctaagctccttgagaagatagatcatgtcttaatatttttcctgtatctcccccagaggatctaacagagtatcataactattgttctatgagatctaatgagctcacagctattgttcaacaaatacttattacctgattgaagaaaataagctcctaaaaatacctgataatattatataggtctttatattgtcagggtgtttttataacactgttaatacttaatccatataatagtcacagaaaat

SEQ ID NO: 96323 - DNA, 334385 bp, Homo sapiens
ttacaggcgtgagccaccatgcctggccatcagaacttgtaatcaagacagtatgttgagaaattctaacattataaattacaaagctttgactattaaagtttttgtgatctaatgatacagttttgattctatagtaatttgtggcttattttatagtttataatgaatacttatttctagactcatacactggaaggggacccggaaaggtaatgtaactcagtgattttaaaacttgatttttttaactgagaactttttttgccccctgcctgtaggttaagtcttacgtgaaatgccaagataattgctgagcagctttggttacccagggcggggtctgggtctgtctgtactttgcctttactctagatggctcctgagacacaggcaggactcccaagcaccgggttgggatctgccctggtcccggcattccagtataagattgcctcagacctgtgtttttcagactgggtttttgctcttcacatgaaatcaagttagatgacaatgactggtgttgaaaaaaatgaaaaggaaagaatttgtaaagaacagaaaatatatttgagtaagtattgtttggtaaaacttagttacatatgcatatatatttgttaggtatatatgtttatgtgtattctgatgtaaaatatatatatatatatattttattactatagtaccatgggtaatggataaagaagttaaagctactgcttagaatgaagaaggccccaggcttacctgtcccgatctttaaactgtccgaaggaaattcaatagcctgttaagtgaataccttcattcttacttgtatttgggggaatattatgaaatactcaccacttttggtattttatgaaaatgttttcttttcagaagttatggtaatttcaatgtgtttgttgttgggaggggagctgccaaatcagttactaatattactgtgtgacatctatccaacttttttcattattcttcattgccaaatactgaaagacttgtaaatggctttggcaatatgtttgaattctaagaggaaatattttcccataattgtatatcagagaaatatagtgatatacaatttccttgaaaaccaatttctaaataattttcttctctgtaatctaagtgtaaaaaggtttagttttttaataggtttaggtgtttataagcaatagttctctattttctagttgatataagtagaagaattgacaagtgagatggaaatgttaatttataaagggaaagaaaagctaggtgaggttgagttataattaaactgttcaggaaacatcgtaaaggctttaggctccctttttcatttctataccaattaatctcatgggttctagagtggttagttctacgggaattgtttttgtttttgtttttaaagatgctgaaaactactctcaatcaaattagtaccatcatttaagctttgaatacttggcagtaattgcctgggctcgtcaataaatgttagcaaattcttgatgttcctcacttttgtggtttcttttgccattgtggcttcataaacagtgctatttatattcagttatactttatagagttatatcttcaggcagtgcaggaaggaaggagaatgagtagggacttttttttttttttattggtgataagctttctaatggagtaattgtttaaatctagacagcacataaaagaaaattgtctcccttgggacattcttacactgtaatctgtagtgaaaggtacttctcccacagacttgcctacagctgtgtggcttctgtaattatgtgtgtattatgattgcctccttcgggataagccttttctgtaagtttggcctttatgatatctcttaagctctgaattccgcttgagtttttttttttttttttttttaagatacccaggcttttgttatgtaacttttaaggaaggagcagacaattctcatttttggttgtcagagactttgtcagactaggagagaccacaaatgattaggaattaatagaatctgagttgcttaagtcctattttagtattctggtctttgagcttcctttccaccaagaagattttgcaaggggagttctccaggaaaacagggagccttagggctatggatacaaggatttaaatcctttcagctaatgtacagtacatggggtagggtgggggagaagacacacatgccttctgaatcaatctgagaagaggaaatatatgccctctaacttcagattccaaaaacttcaatgtcctattgggcggtcctttctgacttagtacatttccccctgctttttagtagggtgttgatggctagaaataacaagacagcagattgtattttgacttatttggctgtaaatacttggattttcaaatgaaaaggtagaatttatgaggaagataacatttagtacacttacacagagctgaagaacaaaacattttatgatacattttccccaaaatggaaactgggcaagaggaaatttattaaaagggtgctttgcttgttttactccattccatcagcaggtcgtaggggtctgaagaggaagcctgttcatgagctaaaaccaaaagtgtgttcaggtgcagaggagctagattgtgctagaggaacccaaagcagagggagtagggactagagtcctacaggggtgtgtgcacaggtagttcttgataagctgtcagcagaagggaggctgctgtgaatcggcagggccacgggaagccacccaggtccagtgtttcttgtgctttttactctttggatcacttcaagcaaaatcttatgtcataaaaacaaaaaattccgctggggatagggtgctagatagcattttttaggtagtgggtacctctgaaatttggaggtaacatagcctgattggtgtttaggaggatgatctggcaacagaaatgggagagtggagggcaggcagaattgaaaagacaaagattaggtaagaagctagcacagtggaccaagcccccattatcacctcttatcctcatggaatttagaagaccatttccaattccgtagccacagagtgatggttacataatcagatgagataatgctatagggatatattttgtaaatatgtggtggtggtatcattgtagttccttcttagaaagtattttctgtgctcccacttactccaggcttgagtaagaacagcagaccagaaggtggacaatctgggttctagtttggactctaccactatgtaatcttgggaaaatcacttagtcttcttggttttcctcatcagaaaaatacccaattcactttaaaattattacatatatagcttctcagttttttttttttttttttttttgatgtggagtcttgctctgtcacccaggctggagtgtagtggtgtgatctcagctcactgcaacctccgcctcccaggttcaagcgattctcctaccttagcctcctgagtagctggaattataggcgcccgccaccacacctggctaatttttgtatttttagtagagacgggggtttcaccacgttggtcgggctggtcttgaactcctgacctcgtgatcctcccgacttggcctcccaaagggctgggattacaggcgtgagccactgtgcctggccgcttctcagtttctaacagtatttatctgggggtaaggacaaggataataggtggatacaagcaaaataattatgttatatgatccaagtgaatagtagtcagctgtgtaaatcccaccagtatccttttatctatgtgttagtaactttaagggaggaaaagtaagacaggctattattaaagaaagagcccactcttccatgatatttaaatatttatttaagtttaaaaataatcttcatggcaccaatgattttatgctaactacatactgcatatgtagaaaaaagtacattgctttgaaggaaaatgtaacttaagagtttttggcacacagaaggttaacaactatatatttttaaatgtatctaagaaattcacatttgcaggtagtttaccctctactgcttaaagatgcagtatgctattctttagtaagagttttatttcctgatagatgaagctatgaaaaccattgctttttctacaatgagataaactaattttgagagaaaatgagagacatgttagaacacagtataaccaggttaaaaacttgaacaatttttaaaggtggagatataccaaaaaagactagtcaccaatcaaaggaggtttattattcaagcactatttgaaaagcaaactgaaggaaacttttctatccatattttctgggatgagccctggaaaaaaacaaccctaaagtttctgtttacagagcaaaatttagctgttagaaatggcatagactactgtactgttagaactctagacacaaggaacatactaggatatggaatactgcatctgtctctaatgtgaatatgaaaggtcagagttgaggctatcactcactgcatagaaacaccagattctacaaactgaggtaggagcactacactaaaaggtaatcttctatgttgcataagacagtagataccaggtggacaccagccccctgtctcctgacagccttttcatctctgggtctacttttcacgttagtcctgtgctaaataaagcctttgctatgtagatgacaagtggcagtggctagttgattttaactgacccctaatctctactaggatctccttcggtttgtattgtcactcgataaatagatgtttataattctgcctaaattgttgctggtatgaaaatggtcagagaagccctcttcccttcttagattccagctgtgttttagcattccagtatttgatcttgcccatttggcatcagacatctctttgctggttagttgttcaagcaccctttaaacaagcaaccctagtgcctccactgggaagaggtcccagatctttgatacatgtcaggcatggaaacagagctgactgaccctcttctgctaacatactggtaaggatcagttttattgtctagagcaggattggcgtattatggcctgtaggctaaattcagctcactgttttcataaagttttattggaacacagccatgttccttcatttacaaattatctgtggctgtttttgtgctgtgatggcagaattgagcagttgtgacacagtatggcgtgctaaaccaaaatatttactgtgtagcacttgacataagttgattgacctctggtccagatgaaaggatgtctttaaaattatgcaaatctctccctaagaaccccaattattccacagttgtcatattgtaaacatggacatggttctaccatctcgggggacaaaataggggaggtcaagtctacaagtgacttgttctgttctgcgtttggggctgtccaattagggtatcagcagctgctctacttttgtgtgggtccaggaatatgtccattgaccacccttaaataagccctcaagccccagatgacttagaaatctctccctgagatgaaaacaggatcttgtgtgtgattggttttagagttgaagagcttgggcctaggatcccacactcgcccttcatatgcctgtgctgcgtgcttcgaggacttccctctgcaaggatggtgatgctttcctagaacttatgcagaggatgaccctagggggcagcatttctacatctaagtgttggtctctgccacggtcacattctgtgttttgtaggcatctcttagaaatctattttaaaagattcttttcctggtcccttctaaggctgttgatcttggaattctattttctgaagcttttcattctcaggatcagtttctttcttgcatcgtttagttcatcaggctctattttcttaatccataaagtaaaaacaaaatatgaattgttaagaaaataacatttcgttgttaaaatataaattgaaatagtctttgggtcaagggggtgtatataaaataagcactgctatccaaatctcaacagtctctcaggtaacttaactctgctttctcttaactacactttgtccaacatttctgacagaactatctatctctggtaccactgaattcgtttaacgcccctggagcactataaaagtcttgaggttcttcggaaaaaaaaaatcacgttaagtctagtttcattatacaaaactatggtgatgcccactaggctctagactaaggggacagacttaccccacccctgatgctgctgttgctgtagcggtggtcccttcagatgcccactctgctcagatttgaaaaaacaaaaggaaaagaaaatccaactcagaccatcataagaagcaactttccatttaatcattctacatggatgtttacttttttaaaagttctggctggcaaaaaaaacaaacaaaaaactaaacagtccccattgtccagatccctggcctgccctgctgaggctgcagtgatgagtctactggaacccagtggcaccagcaggaaaagctcctgcagaatacagaggacagcagctctctagttttcaactagtgtcccctctgctaggtgatactactgcaataatcagtaatagtaaaataaattatttttatttgatacttcaaaataatatacatctatgaaaaatcaaaattcaaaaccaaaaattatcctgcaaattggaaagatgagaaacagagtcgctgagcctttcttgaaataacttctgaagaaaatgagttttcccagtttgtttagacagggcatgagcctatccctttcttcttctgggaaacaccctcctaggctgcagtggactttgagtcatgagaggaggacttggtatatgtgccgatggttccgcgatgggtcccattgctgggaatgggtagccgggttccttggtccacctggctagtttttgggaggagtcatgccttctcaggtgtcaatgagcaggctcaccactgagcggattttgcaggcaaaccatcgcctgaggggacaaaagtattgatagtggaattgttcaaactcgggggtctggcggatatcacggaaaaaggcaatgtcaaggtcagactcggtaaggatgatcaggaggaggagcaaaacaaagaggagtcccatggtcacaaggagcaaacggaggacacttagaacaaacttattcacctgttcctcctcgggcccgctgtgcccctgacacagggccctcagctctcccccaagggcctccacctctgtagcagttggggtgctggcttcagattccttctcctcctcaatgctgcaggtggctccattgatctgccgggaaagcaacatcagctccaggctgtgctcagccacaggggtgggcagcacgctgtctgcrgggctgtaggcctcgtctgcaatcacagctactcgctcattgctatctgtccggctgcttctcacgtgaggcaggaaggtgtccccatgggaagtggaacgcactggtgtggaatgggcactgtcccgtaaggactctaggcctagaaaggcaaaaggaacatgagtaggctgtgtcccaatgcaccctttgctttccagtagcacccattgtgttttattgggtaccattctgcacacccacatgaccagcagcagtagccactgcactctattttgatatatcgagaagacgacaggccgggtatggtggcttacacctgtcatctcagcactttgggaggccgagatgggtggatcgcttgaggtcaggagttccagaccagcctggccaacgtggtgaaaccccatctcaactaaaaatacaaaaatyagccgggcctggtggcacatgcctgtaatcccagttacttggtgggctgaggcaggagaatcgcttgaacccgggaggcggaggttgcagtgagctgagatcgcactattacactccatcctcggcaacagagtgagtaagattccatcttaaaaaaaagaaaaaggctgggcgtggtgcctcatgcctgtaatcccagcactttgggaggccaaggcgggcggatcatgaggtaargagttcgagaccagcctggccaacatggtgaaaccccgtctgtactaaaaatacaaaaatcagccacgtgtggtggcgggcayctgtaatcccagctactcaggaggggaggcaggagaactgcttgaacttgggaggcagaggttatagttagcagagatcgtgccactgcactccagcctgggtgacagagcaagactctgcctcggggcgaggaggaagccaggtgtggtagtgcatgcctgttgtcccagctactttgtaggggggcagattgcttgagcctgggaggtcaaagctgcagtaaaccaagatcacaccactgcattccaacctgagcaacagagaaagactgtctcaaaaaaaaaaaaaaaatatatatatatatatatatatatatatatgtatgtatgaaacaagagaaggcacagaaatcacagtggccattttagaagagtttttctttgctttttgcttacggttttggcctagtttgtgtgtgttttgagatggagtcttactctgtcgcccaggttggaatgcagtggtgcaatctcagctcactacaacttctgcctcccgggttccagcgattcttgtgtctcagccttctgagtagctgggaatacaggtgtctgccaccacacccagctaatttttttattttgagtagagacggggttttgccattttggccaggctggtctagaactcctggcctcccaaagtgctgggattataggtgtgagccaccgcacccagcccctaatttgttaaagattctgcctttcttgcctttggtgtcctgggcctagtttttttttttttttttttttttctttcagtctttcatatgattttattttcttccttcaaccataataatatgatatccaaattttgtcttaactgctgggtctgtaaacacaggcttatccatcacacttataggcaaggcaaatgctgcttcttgaaatggtcccaccatggaccctctggtcatccaacccaagacgcccccttgcctggctttatcttcactatattgtgtrgccacttcattgaatctcatcccagactttaacttttccatggcttccatgattttgccatgtttttcccatagaatgtgtctgacctttactgcattgccaccacctttgggaccttgagccttcttgtcagcactgtcactcccagaggctgcaccccctttccccgcttttccagaaccactttttcctttgggcggcatcttggaagcttgttgttgaactctgaaytctgggcctggtttttaccccagtttgaaagaatctgaattccaaactacccctgatgcagagctgggaccacggtttgagtctcaagtctgcctgttgggtggagggctttaagaggcaggaatgggccagacacgatggctcccatctgtaatcccagcactttgggaggccaaggcaggtggatcacttgagccaaagggttcaagaccaggctgggcaacatagacactgtaactataaaatttttaataaaagagaggtaggaatggggagaaggggaatatgtcatgcctaactgggtttcatcaaataccgaatatccttgtaaaaacccagcatacagcatcttgagcttataaggtcaatatttttggatttctgcagctgctctcagtctcttcagcctccgttctagctgttctgactttgtggaatgatggggtagaaactctctctgctcttcttgagggggcatgggagtagtccctggccagctccctctcttttcctctgagaaggagctgggtctagaataggctgaaaagctcccctatctttagacacttcagagcacaaaacagtttgagaagatcttgttgcgggggtggatttctcttacatttggtaggaggaaggggtattctatcccctaaaactacccattatctcttctctcttcccaaggttctcacaggactcaagccctggcagggaaaacaggagctggttacactctcaactgaacagcagccacccaggccagaggctttgggcatatagtgagtgagcgcggcccccatcacagtgctcccaaggaaatggcttcttgttttaggctcaatgtctgcattttccactcctggccatcttggtgatgctggtgtggttctctctgcctttgtgacctatgacaagaaaagccagtccccttctgttgccctgaaatagtccctgacaatcccagactgaaccagattcccagctcagtaaaggttttacctaagtcaggttgattagggagttttttggttcagggctagctccagaagcccaaagggtctcttttttccccttcttccaggacatgaagcagtccaaaggtctctcttaaaaaggkgttagtaacctttcagaagcagtgtgtcccatcttccttggctccctcatggcttggccgtttgcacccaggcagcctgcctgaccagccttgtggagcctgtcttggcacaggcacagttaaggattctccagaggaatgagccctggamtctgggttatgaatgagtaggacaatggggagagagggtgggggcaaaggcagggcacctgccatctagttacgctccccattgcgtcacggctcatatatttgccacagctctcaatctctgctttcagaagctcctcatagtcttagctgtattttttgtccctgtgctaaaatcttaaatttgtataatgctttcatctttttaaagcactttgattttatctttcagtaactccacaaggtagtgagggcaagaggttatctgaagtcatgtggttggcagttaatggcaaaaccaaggwtagaatccaagccgctttctagttcatgatcctgctgatcatatctattaagtcctcatgttgtcaacaggttcctggaaaccatgactttaagccaaatgatgttacagcaggtcctccaatgttttcttcagcatcattttgttataatttttttaaagttctttagttttttgagacagtcttactccattgcctagactggagtgcagtggtacaatcacggctcactgcagcctcgacctcccaggctcaggtgatcctcccacctcagcctcctgagtagctgggactacaggcatgtgccaccacgcctagctaattttcgtattttttgtagagacaggtttttgtgctgggattacagatgtgagccaccacgcccagccccattttgttataatgttgatgagaaaaaaaaaagtttaattgtacatcattttgcttaaagttgcagtttctaaagaccctgtcaacgctgttaagtgatgacttaactgtagtcggattccatggaatggaaccatgggccaggacggattaaatcaacagccagcatctaccttagatttaggtcttaattgctcgagaaactgttttgaaataacctgaaattaagagtctctgtcccttgttctagagctcttgctgttcctctgatctctcttccacagtattcctccctgatgtccccatttgcacatgcagcttgaggaatatgtaccttgggacaggttatgggtcactgataaagcagaaaccttaaggccctggttgcagcatattgcttgcttggctcctttcccaggcagtcctcagccccattgcatagggcgcctgccaccctttcaaaggcctgccccttcatgaagacagctctgactgcaggatctttcaaagtatgaaaagcttagcttaacctacgattacacccctcagcttgtggggaaggagaggcagatgctgtgacatcagaagaggaaaatgtcagaggaccacctggagccacatcatactgggagctgttggtgctctcattaaacaagataatggatagataggcatttctttttttttttcttttyttttttttttttttttttgagatggaatctcactccatctcattgcccaggctggagtgcaatggtgcaatctcggctcactgcagcctccgacccccgggttcaagtgattctcccacctcagccctgcgagtagctgggattacaggcgcccaccaccatgcccggctaatttttgtatttttagtagagatggggtttcgccatgttggccaggctggtctgagctcctgacctcaagtgatctgcccatctcagcctcccaaagtgctgggattacaggcatgagccaccacatccaattagatgtgcatttctagtagaatgcctgacaaatacagttgctcagtaaatatcagttggtctcctcccttaacagaagatctcacctgtaaggtgaccctcccacatcaggttagtcctatattagaaactgttttcactgctgtaaaagccaccacctgtcctgccatttcatcgaacctgttattttgggatagatgggatgggtgccgtgggaaggatctgcgctaactggcacagcaaaacaggagagccttttttaccttggaaatgctccagctgattcccttgcccgggggtcacagcagtcaggaccctaccctggagccggggccccatcctcaggatgcgcacacttaggggccgaaagcagtgattagtcagccggagctggacccggactctggtgtgaatcttaatcagactcttccccatggtggcccaggaaggcaaatacttcttcagtggaaaccagctgatctcttcagagaaaccagccaggcagggagagatacagagaggcaaagatggaaagccaactaggaacaaaggatttctgcagatcccacatcatagcagccccttggcagtgcctcgcgtgttgcagggagaaggtcacctccccaagcttcacatcaggctgaactgcagggaaggagcagctctgagaggccaccgttatcaggggactggatttagtcagaagcacttagagccataaaaagtaatgcttccttggcctgcagctctttccctgaggcctggataagggctccaacctctcagagggcaagggacagagggggcagagaacaatcccagagggtaaggggaatcaagaccgtcccagaaaatccaggatgtaaagtgacaaggccattggcctttatccaggccatatatagtccaggcctgccctggtgccagccaagttgcatggtcagcctagctttggggctgggtggctctgaagtgggaggaggtagtctctgtgatactaaatgggccaaatggactatagaaaagaaagtctttggtggagcatgaaccaatttaaatgcctctaaattccttggggtttttgttggttgcgcccttcttctgaggccctcatcgcatccctcgcagcccctccctccctggttggggtgggcagttagttagggtcagcagtgcctgtcaggacctttaaaggcaagccctcctcttgaaagacgttgcacctgaactctcgcctcctggaaactaacccattctttacttccacaggcttggtagcccctgtactgataaagccatttaattgctacaatcttttatttatttccacatccaaacctgatgtccatctccctctcctcaccctgagcctgtgaggttcatttgggccaggtcagttttacctgcgctgtcctgcatctaatgggtcctgggctgggggccatgaccagggccacttgcagccttgggcacagggtgtgagaagcacctggaagtctgctgagctgtaacctaccaagtgtgccattctatgaggctggttttgaggaagtgccctggccctagggggcctatactcctcagcagcctctccccactgtacgtctctttgcatttggcagcaagggggaatagtttggacaaggaacctgctgctgcaatgggaggaggaggctggaggtaaagccagagctgaatggggacctgactcagcctcagcatgtctcaggatcacaaggactgttttccccgcctctgagttgttctactaaccctacttggcagcaactctcagtgagttttgtctctacacagagagcctcagccctccctcttttgggaatgctggtttcctggacattcttccctgttctgggaagtaggcatgcacaaggctcctctcctgttttacatcctgcatggtgctagcttccctagggtgagccttttgtttgggaggacagctgtcccagctctctgtggaggatggggatggaccctctagcttcagcctcagagggatggaaagaaaggccacagaggggagaaagttatgtttcctcagagaatttcattctacttcctgagatgtacaccccaaaagagggacggagagagccaagggacagtgagagccaagctcagttctccgggtcagcctaagatgggaggaaacaccaggaggctgtgtctcatgatggtcatatatccataattccattctttgcataacaattctacttggtagtccacaggcactctcccacacccagctctgttctgcagtgggggaactaggctcagagataaaacaacctgttmcagaaagtgcatggcagagctcctagtcagaccttggcttcctgatcagaactctgcactgtgcttgctgccggcctgtaaacgctttagtctctttcaagtacttccgcacatattagcttccttgcaaccaatggggtgggcaaggaagatgtccctattttacaaatggagcaatgaagatactcaagtaacttgatggtgtttgtctagccggggttctcaacctctagaccatagggagttacatactagacttyggtaacatggaatctcacactcacagtgacacatcctaaaatcctaaacacaaattagatctcagggaaacagcagagtgatagccttcctaacgtgagcaattcattttcattcccaagcagcattcttacagaaaggacaaagggctgtcctgccagcttccacaccattaatcccaggagagagacaggtatgaaccaattctgctgtttcccgctgtgtgagatttctgaggtcctaaaaaaacaccatcttcgggaatgaaagcactcaactttacacctgtatccagcctgcgggtgacctgggccagtgacagcagctagagggcagtattccaagagcgcctcctaacagcattaactacccagagaatagattgttggcctcagctattggggtatctagttcagtggagatacgtagaatttctctctcttcccacctcggcctgctccaaaggaagggagtctggagggagatgggtcgtattgaatttcctgagacagtggtaagatatgcagatagcaacaggacaaatttctttcttttttttttgagatggagtcttactctgttgcccaggctggagtgcagtggcacgatctcagctcactgcaacctccgcctcctgggttcaagcaatcctcttgcctcaaccccccaagtagctgggattacaggcgtgcatcaccacacctggttaatttttgtatttttagtagagacggggtttcaccatgttggccaggctggtctcaaactactgaccttaggtgatccacccacctcagcctcccagagtgctgggactacaggcgtgagccactgcccagccaacgggacagatttctatagctgaagcaaaacatggtggcagctactagaaatgcttcggaaccaagaagtgaaaattcttggttaacagtctcagccatcctgataattttactgtggagattggtcagatttagcaaacaagtggaatcctcttttttttcttgagacagagtctctgtcacccaggctggagtgcagtggtgcaatctgggctcactgcagcctccacctctgccttccgggttcaagcagttctcccacctcagcctccctagtagctgggattacaggctcccacgaccatgccctgctaattttttgtatttttggtagagaaggggtttcaccatgttggccaggctgctctcaaactcctgagacctgaattgaacctcccaaagtgttgggattacaggcgtgagccactgcgccagcccctttttttaaaaaattcttttttttttttggacagtctcctttacccaggctggagagcagtggcacgaactcagctcactgcaacctctgcatcccaggctcaagcgagtctcctacctcagccccccgagtagctgggattagtcatgtgccaccacgcccagctagtttttgtatttttagtagagacagggtttcaccattttggccgggctggtcttgaactcctgacctcaagtgatccacccatctaggcctcccaaagtattgagattacaggtgtgagccaccgcacagggcgtgaaaatcctcttgatggaaagcaatttcagaactgcatggaacctatagatcccacatatgcaagtcccccaaagggctaacccagcaccctcaaatccacaaccctcctgcttagatacccacacccctttaccctgtacccagctaatattcccatccactggataaaacctcctacttgccastggaggcccttttccccaagagacatgctgccatcactaatgcaaattagcctcttttcaaggtcccagatcacaacttggaggaccccagtggtcacctcaagaagctcatgctcaccttccatgatggagatgtgaacagctcttctgcgggtcctggggacgctgctcagccttgggccatgggttatggagggacagctccggctgggaaccatccctgctctgaggttaaagaaaaagaaccttgttaattcagtgcatggacacatttggtaggcacttaagaattgagtactggctactagaattgcctggctrtattaagtcttggtctctctcttttttaaaatctttaataccttctctttgcctttggtctctggattccagtcagagatagtgcttcaaactcctccacctctttgtaaccctagactcatctgaaccttttttttagtgtggcagcagtgccactggtctctggggtgggggcaagactgtcagagagtagagccccaggatgagcagtactcctgaaaatatgcctggaccaatactggcagcctcccctgacttccaatagaggctgctgatgacagggctccatgtgaaggggcaggcagtaatgctccccttcccagaggcaaaggctggttggcaaatcctacccttcttggtcagtcatattctttctgggtcttagattctaggagataggcttctggaaacacaatttgtggatctacatgaagcatggatcctgaaattattttagagccagtgtggcagggctgtgggactatccttggcttcatatgatcgactggttccagaaccactgaaattgtgtgacacatctatgatcagtgtcaagactagggagggcagaagagaaytgccaagtgaagtggcacctggatctgatgtactatctgcagtagcccttcctccctccccagctctcttattaagggtcaaagacttctccccatccctctgagaagtttcttcagccttctgctccattttggactttttggtagccactggagccaggggcttcacagtactcaaactgctggattgagattctgggatctgagctacaactgtttggggggaagcccctggcagcctacctgtgtatttccggtggctcccgtttgatcttagcacttgattccatgacttcctttgcaactcggccactgtaagtagtgtaataaaaacaagcagcaagaaatgagactgtgttgtaggacagctcctctccaagatcttaggtgctttccctgaatcaggaaatggcatctgtgrcccaccctttccctgatgttttggtcatggagaaaggcttgcttggtggggtagacttctaaactgtcatgacagcctatctgagagaactctctccatctctagagtctttaggatcttccattctcatttaggagtaattcctcattttccagcatgttccaattacatcacaaaaaaacacataagaacaacctttagacagtgagacatgaatcactgttatagttcttattttgctattgtaagggaaagagaagatacatatttatttttcattttcttggagacagggtcttgctctgtctcctgggctggagtgcagtggtgcaatcatggctcactgcagcctcgacctcctgagcttaagcaattctcccacctcagcctcccaagtagctgggactacaggtgtgtgccaccacacccagataattttttttgtatttttagtagagatggggtttcatcatgttgcccaggctgatttcaaactcctggcctcaagtgatccacctgcctcagcctcccagagtgctgggattataggcatgagccactatggccggccaatatacatttaaaaccctacagacaaattgctgtagggaaggaaggaaatagtaaaagggtcataagatgggagaattagatggagacctcagacttttctgagtcctccctggtttctctgttctaaaggataaggaccactgagttctccagagaagggtctgaaaatagatccataatggttacttactgtcactatttacctgtatcggaaccggctccctttaaagaataaattgctgctggacactgtgcggacttggcttgacttctccagcctgtagcaaggcaaagtccagtgtgatagacagcctgaactgcctcacacaggttaaggcagcacatccccagcttcttccaaaggctacttgaaacttcaggaaaaaagcccttcatagtccacatttgtctctgactctcatttaggatctgggggctgtgctcacagccagctgctctcctgcctcagtgcccaggactgtcaacatggaaacccattttagtgtcaggagagtgaaggctcccccaaaatgcttcataggttttaccagggggactgagagaatacatgctcgggtggatggtcttggggaataatagaatgcccatctaatctcagccacgtcacttattagcagtgtgacctcgggcaaatttccttctctcttagcctcaccctttttataaaatgatagagctgggactactggaccttaggggtctcctttccagtcccagtatttgattttgtgtctatgtctgggtaattgtgggtggagaagagggtgggggctgtctttcctgttccatctcccttttggagggtcctaaaatacatgaccacagtaaagacagaaatcctgcgatgaagaaactagcttaactttaataaaagtccgtcatgtatttgaatttggagcctttctccctcccccaggatatctattttatatctcgtttgaagctgcagacagccgatgtggagctctgtaatactttctcctgggtgacttcactgagcccattagctctctcagcttgggcacagcagctcagagagaagcctcctaagatgggatccacctgtaacatgcccaggtgcctatggtactgatccaaccagtaacctatgtgagtctgaaacctgtgctatgagcagtgagtaggagctgtttccacaatccatgaacagttcttgggagacaccatccctgcccgtctcagggctccaggacatccgagctgcttactggagcctgggcatgttcttgcatctgactgggctcctgccatggcactaggccaaaggcaggactagggatctgtatgtgagagacactgagggcaaggccaaagcgctgctgccagagacttgacatacctggggatctcacccaggcttttaccgtttgatgagaacattaaggaggcaatggaaaactgaaaaatgacctccatttccagtgtgggtgcaggcagggctgggtgggtagggagatctactcgtgggaagactcagaaactgagtgaggtcacaggttcagaagcaacacttctgtttccgtgacacagatgggaaaaccaagcccttaagaaatgctgctgaaggcatgaaaagacaagaggcaaggagattgcttctgtttgcttcttctctaccctttggtagagagaaagggaaagcttccacatatgccattcccagggcagggatagttcagtgtggagcaggcccctgtcggctagtgccttcctctctctgctgcggagacccgtgggaccccagttcttgggctgctcctcagtcccacaggcaggagcttgcatctcaagttgcttctctctaggttcaggtaactggccaaacctggattacatcctcacaggcaaagggagggtggtagcaaaagaaaataaatgttttcttgactttctatggacagtagggactgaacaggagggaagtgtgaccatgccaaagtctcccgagtatattcaggagaagaaaggctgccgattcagtgaatmcttggttctggtataaacacataatgggaattaagtaattcagaatgcctgtctaagaaacagcttctggggctgtggccctggcaactgggaggacccagttctgccagccagcatcccatagcagccagcaggcagcagaatcttccctggagagaagtatggtgccactcatcccagagcagttctcatctctccaggatccttcaggttactggaactgggacctggccaatcaggggcatttggtgagagcagggctcaccccaggtagaatataccacactctgtcttgccttgacctcattcagatacatcttagtaaagcataaatcattacggtatatttttaaaacaagaccaaagggcttagtgagacatattttacctggcatcatgccctcagtgggccatttcttcactacctaatgcttttataaccactttcttaaccgaagaaaacaacacaaaagccccacattctttacaaaatccctttggtaggcaaagctcttgcctttggcctcaacctggcttctcagtaactgtcaagctcttgcccacttccagctaccccgccccaagttcctgggcacttggcctcctgtcaccgactctctctgactctggctctaagaaagacagtccccatcacatgtatccactcacttgtagaaggcttggttctcgattccacatttccagaggtgcttacacgcttcaggagttggagcaaaatatgtaagaataattttcttttcctgcaaaaaattccacattgatatggctgagtgtggatggagaagcaaagggtgaagtaggcgaggaccctgaccccagagctgttagaggccctggcagctggctagttagaggggagggcctgtgggacccactgaggcagagctcagttaagtgcatcacatcatacttggcaagtccaatcagggtaagtctcagctggcacaaaagtggcacaaattgaaccaggagagctcttggtgagaaagttgcccttgcctctggaattcccatatacacgaaagaaaaagagccttcctttgcatttcctggaggtaaagatctcttgagtggaagctctgggtgtcartagcatccctgaggaagtcctgtgctccagggccttcccgctccttcatattgtacctccaggtcctgaccttggtcttggcttagtatgtgggtagcttggctctactggggtccctcaagcttggctctggccaccaggaagcatcccatcaccccagccctccttgaagagaaggaagccagcactcacctctttctgacttacgtataaatagaaagtctttccttcaaatttcagcttggtcacctcattcctagaagcacaaagatagtgcctgtcacctcattgtgggctgcttgttcacagctaaatcttgtagatgcacagcccaccccaactggaaggggctccaggcacagacacaattttagccaaaatcagaactgaaacaagacagcagcgcagtggccttagagaatgttgttgaaacagttcaatccacagttttctggtcaatcacactatagtaatagggtgacaggaggatttcgggcttatcaacagtggctgtaaaagggaaacatttgcatggaaagtgagtctaggtagagtatctggggtcatttcaggattgggttcataacacaggtgcattatctggatgggactgtcaaacgtaagatgccacaggtagctgatgaggccaaagttcaagatacagcaaataatgagaaacaatgcaaccaggttctgagggagttgagtctttcaggtgactgtgccactggatggaaaatgcagtttaatgcagacaaatatcaaacaatctcagggagcgggscagggcaacataccaaagagagagaacagattacatggaacagtcatgcagcgtactgaccaggaaaggggcttaggggttattgtagaaaaatccttgaagccaccagcccagtgaatggctgcagtaaaagaggcaaacaggatactggggtacatcacccgtgggacagacacaaatcagaagaagtgacatggttactgtacatggcacggcctagacctcacctccacatccacctcctgctctcagccttggttacatttgcaaaacggaaaaactactgggtcttaggtgaatgtccctgagagccatggaactaggcctcagcactggttgctcctcacttcccttctatctgcccaacatagctgccctctggagtctctcagccctctccatgtcactggaggccccatttttcaacccaactgggacccccaaggcggtcttgtcatgcacattcacctccacttggctgctgcttttttttgtaatttctaaggagatttccttcatctcctaggaaatagtagaaaggtagcgagaatcatgtacccaacttactgctggaaaaagttcaggggacagaggaaaatcacttgttctccatgctcctgaaaatcatggctgggtcaggatgagatttcacaacttctgaccaccagttctgagctaacacaagtcacacggtattccttccctgtttgattccctctcaaactccctctcaatcaaccatcaatctcatacacacacagtacaataatgccaattggttaatatatagacaagcacacagatcacctaggttccaacaagcaagctaggaaagtaaggagttttattttgagagtgagattgggtttacatctattattacagagttgacacatggtgaagaggagacttctagaagaagtggtgcatgagagaagccgtggaaagaaaagtgtctgtgagaaccaagagccatcatggtttctggaagggtgggtataatttagggactgcaggtgtctgtgacaggtgtgtcctacttgtttctagccaaacattccctctaacagggacctcacccaacagctactctggttggaatgtggatctgggccctctwaagaatatcaaatagcccagatgtatccaggcagcagagaccccacactaggagggctgaggcctgatcctgctcattgcctttttctgaaaagcattttgttggacaggagattgcaaatcctcacatcttcacccagagagcacagtgaagtgggccgacttgaggatgcctaggaaacaggtatgttggggtgtattctggtaactccagggcagcagctgccttgtggcacggctgttgtcctggggagtcgagtttcctgtcctgtgtgaggagcagtttcaccagcactctggctgacgatcgtaatgccctccttcacaaaatcaaggtgggctggaaaggcggtatctgtcctcaagctcaaactcagtgggggagctgaagagggcacagcgggatagatggtctgcagtgtccccagcagaacgctgactaggaagcaactgtactcaagattcctcatgagctctcctggagaagacaaaccaaacagacttccccccactgagctctgctggaccaagggaagccacttatctaagcccctagaaggagctggccagcttagacttggcagtctgaggcccaggaaggtacagaaatcacaagagcttagtagaatatgcaaaatgttttgatgacgctgacagatgtttgtatgggctggccagctaaagggtctccaggaaagccaaatgtcaatcaacaaaccagagtctgcccagaggcatgcagcagaacagaccccaaataaaacagagaggggcaggagaggaagcagctcagagtagctgcagctgaggcagtggctcttgcctgttagatgggagtggagaagggagggaaggaagaaagagtgggaatatgactcctggaagctgaggacacttaaatgcccaagagggataggagtgagacagcagcaactgagcttttgcagacacgatgcccacagggagggctggtctgaggagggtgttttgccaaagtagcaaaggacttatatctgccccagaggtcactgtctgtgagcccctcccttgttagtagagcaggtaagggcactaagccatccacagagatgctccagaacagccggctcaacagggctaactatgaccctcagtgggtgacggccccaaggattcagttctcacaggaactttgctccgctaacactggctccagccccaggcctctcaccctccccagaaatcaaacctctgtatcccttttcctttctggagaggctgttggctctcagggacacccctttagaagaaaaggatccctaggaagagaccactcccttcgtcagttaccaccatcaacgcaaggctttggagagggctctgaaccagaactgcccaatcacagacaaaggacacgggaaccgtcgcccctccccagttggtgagatataaagagcctattttggaaatgaagatgctcaccatttaatgaagtggaccctcttgtttccttgaagaacaacaaacccaaaaggagtgaaggccagaaatgcagcatttcctgacacgtcctgcaacacagaaagacttctcatcgggtgatgcaggcacagaggtgaaagggtaagaaacacagctgttcataggtgatgcagggttaatacttggcagtaggtcacagagggaaaagcatatcatctggaatcacaagaccatagtttgagtctcagccttgccacttgccagccgcatgactacaggcaagttacttgctgagcctcagtgtcctgatctgtaagttgtaggttataatgataccaaccttagaaggttgctgtgaacatccaaagagaatggcaacacctcatgcattgctgatggggttgttaaatggtacagtcactttgagaaagagtttgaaagtcatttaaattgttaaaaatagagttaccatatgacccagcaattccactcctcagtatgtgctcagagatttaaaaatgcatgtccacacagaaactggtacatgtatgttaatagcagcagtatgtgttaagagctaaacagcagaaacaacccaatccattttccagtgtaaagtttccattaactgataaatgaataaacaagtagtatcatgatacagtagaatcttattcaccggtaaaaagggatgaaggactgatagacgctacaacacaggcgaaccttgaaaacattatgccaagtgaaagaagccagtcacaaaaaatcaggttgtgatcttttaaccctgtgaatatactaaaaaccactgaattgtacactttaaaagggcacatatcgccaggagcagtggctcgtgcttataatcccagcactttgggaggccgaggcaggtggatcatctgaggtcaggagttcgagaccagcctggccaacatggtgaaaccccatctctactaaaaagacaaacattagccaggcgtggtgatgcgtgcctgtaatcccagctactcaggaggctgagacaggagaattgcttgaacccaggaggtggaggttgcagtgagccaagattgtaccaccacactccagcctgggtgacggagtgagactccatctcaaaaaaacaaaacaaacgaaaaaacaaaaamaaaaaaaaacattttatggtatgtgaattacatcttaaaaggctgttattaaagagtgggggagttgttatccactttcataatagtcctataacactgggcccctcaggaaagtttagctgaagaaaaaaacaagaagcaactggcaaaatagaacagttgccaccagccctgaggtgcctgaaccaacagagagggcctcctggtcactggcaccatcagtcagtaaacaccaggcttgaggctctgttgaacatagtggggagcgggcggagcagaagctgtaggtctcgcttcctcacttgcgaaagtgagctccctgaggtctaggctgggtggaggattttgccctcccagaggggcttcctttgtgacaggggcgtcaggtgagatttggcaccgtcaggctgcatgaatggtgatggagagggtgtaagtgtgttgaggtgaccagaaacttatgctgtgatgctggtcaaatgtgcctgcaggagagtcttctgggccacagctcaggtggtgccatggagttagggccagacaccgggcgtgaggcatgggtgtgggggctgaggctgctgggccaggtcagcctgaggtttggctctcctggcctctctgctttcagggctcacctccctgacacagattctcagcctgattggtcgcaagaacagtggggcctctgcagggcctcatgagtcctgcctcaagaagcagtccagttttgccttaaaactatctctcagagtcagggttacaagtatgagcatctgggtccagggaataaactaagtgtatgtttggcaaacatttgcaattaatgtattgttgttattatcctttcctcagggtctgtcatgatccagacacttggctacaagcacaatgtcatgggcagaacaaaaagctgtttaaaaataactggaatgcagacactatgaagccacagggctgattttcctcctgcttataatcagtgcctggtggtggttattaatatctgagtaccaggcactacacacaaacactgttcctgtcaggaggcaccagggctaatctggcaggcttggcagaggtatgggtcagggaagggtggccttgaggtaagaatgactgggagaggttggggagggaggcagcctgcctgttctgtctcttctgctcactgtgcaagcaggacccggggaagtcctacaactgcaggcttagaaagaaagagactgggagtggagaccttattgtgtgaatggtggtatagaaagggtctcagaaaatgttgagcagatgaaggtgttagacagtggggtgggtcagaggggccagtctggctgcagtggggaacgtccgtatgtgcgtaaaaatgagaggggaggcagaggtgaggcagaggcacggaaggggtcataatgcccgctgagataaaggaaaggcctaggaaggagaggtggagggatggaaatgaagccttgggcctgcaggaggctactggacagcttgaaataacggaargaagtagggaagggagttgggagggaaggcaggggagggaggcagcggagggcccccctctgcttcttccactctggctcatatgggcagtgacaggcagaagagcacccccactagaaccacagtggtgcgggctcttggtcaaaccgctcgggtccaggtccagctctgccactcattgtgtggctgtggccaggtccttaatttctccatggtcagactccttgtcttagaatgagggttgatcgtgttacctacctcataggttatgtttaggaggcacctcacaaatgctagtggccatgttttttgtttgttttagagacaaggtctcaccatatggccaaggtgggtcttgaactcctgggctcaagtgatccacccacctcagcctcccaaagtgctggcattacagacatgagccaccacacccggcctgtgtttgttgttaatattattatagctgctactagttagctgagtttgttgaacttaatacaaatccttttgtaaaatctaacattttactatttttcctgatgttgacagatttaaattttgctagttaggaaacgaaaatgtgggaagttagaatgaaaaaaggagaagtaattcactgttaggggaccatggaagagtggggtgatccatgaatctgaagtgagaatgggaagggaacagaggccatgacacagtcagagatccgccagagtcctctcagtgacctctgtccctctgcagagcaaagggaatacacagtcccacaagatgggtggtgctggccaggttgccctgcatcctgcagatacctcagagctggcctctgagtgaaggcaggtgttagagttagaggagcacagcctctcctaaccagactggctgctttagagcagagagctgggaataaaacccaatgaaaatgagatgccacatcatttcataagcaataatagcaccttgaacaatcccaattgttcccaatctcatatgaagagagcagttctccaaactgcttcaaatgcaayagatgcagatgaaggccaccgcaagaccctgacacccggtatccgcaggggcagatgacagctgggatgtttgcaacttgcctctggcacatgaggctcagcaatcagtgtggaagggactmgaattacagtgggaaatctcacatctgtactggcatgaaaatacaagcaggcagccacactgacaccttccctggaacttctccagattcttctatctgacttgtcattcttgttgtgagcctgccgttggagtttgtgtgcaaaataacaagttgcatgacaaaaagaggagggaatgaggacaaggtgagaagtgaagagtcaacagtcacctgttcttcagatctcccattttatcaagctggattctctttcttctctgtccccttcccatccctatgaaatcagtgcccacaggactgagccattaatggagtcgggaggtggaaaacaaactagggtcctgatagctatgccgtggatatcgccagctacactctgcagcaggtaacagtcgaaataatctagttcacttcttcagttgtgaggttaaaaagaattgttttcaatttctcatccttgtgaaaagagcttctgtctcagtttaggaccccagctctcctccttctttcctctgtgacttcacttctccaaacctcggtttcctcatttgctaaataaggacaataatatatacctggagaaatactacttccatctgattttagggagatagaccaaatatcttactgctaggatgtggccaacggtattctccttggagaggggatgaacatgcattccttgtcattcatgtgtttacatggcccctgccatcaaacttcacctgtgtcagtcaacaccagcaaagttcaccctaggatgatcactctgcccaggaaaggattcttgcaaatcaaagcattgactggttcagaagcaggaacatctggccaccatttctagtccccaccagttccayttccagattcaaagtagccttctgtctcctgccaccctagaggacacactgggtgtgactgagtaggcaacacagcattcttggttgttaggcctctagggtcatactgtgccctctctgggccatgactcaaactaattcaattttgatgaatgaagccactatttcttataaaaccctctggaagatgattccacatgctgtaccagatacgcccatttctgaaagagctcacagttgggaagctgaagtcagtcatgaaaatcacccagtttgaatatactacacttaaacttggccacaataaactagaatggaaatgaagaggagaaggaggaggaggaggaggcaccctgtaagagatttggtgttactccatgacagctcagaaaggaattcctggtggaaactgcaccaggtggctttggtgaagttcttcatttcagcagtaaatctaacaccctacctgccacacagccaagatgggcccacccaagggtgggacagccatcattgatccttcttgttctgtttctcagaagtgaggggtgctgggcatggtggctcacacctgtaatcccagcactttgggaggccgaggcgggcagatcacctgaggtcaggagtttgagacaagcctggccaacatggtgaaattccatctctactaaaaatacaaaattagctgggcgtggtagtgtgcacctgtaatctcagctacttgggaggctgaggcagaagaatcacttgaacccgggaggcagaggttgcagtgagctgagattacaccattgcactccagtctgggcaacaagagtgacactccatctcaaaaaaaaaaaaaaaaaaaaaaaaaaaagtgaggggcaactcgtcaagatgggggatggggttcttctttagagagctggctaggtggctggattatgaaagtaatgattccattttaagggcagagggacagtgtaattttatttttgtggttgatctaacctagatcctgttgaaatcaattttatcctggtctatacaaagcagacataaagacactggtgaacttacattaaatttttataggatgatgatatggtttggctctgtgtccccacccaaatctgatgtggaattttaacccccatgtgacaggggagggacctggtgggaggtgattggaccatggggcagtttccccatgctgttctcatgatagtgagggagttctcacaagatctgatggtttaaaagtatggcatctcccccctcattctctctttcctgctgccatgtaagacatgcctgcttccccttccgctatgattgtaagtttcctgaggcctccctagccatttggaactatgagtcaattaaacctcttttctttataaattactcagtctcaggtagttctttatagcagtgtgaaaatggactaagacagatgatatcaataatcttgtaggtcagtgtcctttctgtgtcagaattggcaatgagttgtgcttagttcctaaattccatctctccagagggaagaccatgaataataattgaaaaagcacagcactgagactcagataaccctgggttcgagcctcagtattgtgttacccagtacctttgggcattactgtgttacccagtacctttgggcatgttagttggttccttagaggggacttatctccctcatatcccttcttgtctgcatcttcagaggctcagtattcttatcttaaaataaggacaagaatatcttcttagcagtgatgttgtaaagattcaatgagataatgtacaaagctggcacagacagactctcaataaatggtatcttcaagactcttaacaacaaggctgggcatctgtaacaggcctcactactccatgaaccrtaacaggacatctccgtaagttgggcccaggaggccaaagtacagtgctgcaggagacccaggccaaaccaccagtctcagggctacctggatggarcaagatggtggctcctgaagttggagtgctgtcagggccagggaacagatatagcaatggactgccagtggtttgcttcattctcctcctccagcagctgtaggcttgggctgctggggctcccgccaggagttgagggctgagggtcaaggcagaaaatgcaggacagccttgtcctgcacttttggaatttgggtattagctaatagagctctctggctgtcccatccagcatttgtagaatctcctcttcctggtcccagggccagacaaggacattctgggcagaaagaaaccatcagtgtgcacaggaagaacagcagcttcttaatcagtccaggggacagagcctaagctagagcgttgttctgctctcatttaattatcaaaatgattcctcttctgtcctccctagggctgcatgccccagattccctgggcccagtaattgcctctctgttaatagaaatcatcagtatttattacaccaagtgtgccagcttatttcagctcttcttgtagcagcattaaggcgagcacttgatagcatatcactaaagtgactccacttaataacaagagtaaaggcccctaaactgttctctttgctgggagagctgaggaatcatggccagagcctaatgagaggagctgaggggctatgtgtggggtctgcaatagggccctgacatggccctgggtgaggaagaggcacagggctcaggaacaagggacctgagcactcccccaaaagaagtctcctggggggtttctgttcttccatagggtacataacaacgggtagtgacttgagttcaaattcttgctctaccgctgagggcttgtgaattttggcctcctggaatgccagtcttcttatctataaaacagggagaataacatctacctcccagggctggtgtgaggattaaatgagaacataatgtgaaaagactccactgaggccgccatgggaggcataccacaaacatctcttcttccctccctccctctttccttccaggagttgatgctatgggattgagatggcatgacataagtgactgggtggcaacagtgcctggtatgaatgctggttcctccctgcagcctcttcagcctctctgcgtccaatgatggacaaactcacccaagacgaggctgagacaggagcctcacagtcctggggtgcatgtgtatttgggttggaaaccaggctggctgccactacagcttccagaatcccgtgggcaacggtggagaatccctttccccgctctagtcagtgtagtgctcgggctcactgtctgcccatctctgtgtcttttcaactctgctcagggacccgtctctgaagaggtgggtgctatgtgtggcctcaaggggactgggcaggtttggggtcaaacgcagaggtaacctggccctttctgatgaacatatcttcaggcagccgtctttaaggtcctagagtgactcagcagttcagggagcagttattgaacacagactgtgtactttcaagtgaggctcagagaagctcccaaaggccccagtaaacaggggatgggaaccggagcccagggccagcttatccaaagctctcttcactcctgtgtgggtgccctgctaacagtattggagcaatttatggaggggtttaaactgcatctgttacacagagggcattgtttggaagttttgctaatgtgtaaatatccaaatgtcaattctctggtataacaggcatgaatgtgttttctgacagtgtggccccaagaacacaggggttactttgcagcaggctgtgctagtggatagggaactgtggggtagggaagatgaccagggtttctgaatatcaggatgttctcaaggttcataactcctaggcaagaataaatcaccatcttctcaccaagggaccaaaggacactgctttgtccctatgtcactgtgctcattcattcctggttttttttttttttttgagacagagtctcgctctgtcacccaggctggagtgcaatggcatgatctcagctcactgcaacctccacttcccgagttcatgcgattctcctgcctcagcctcttgagtagctgggattacagtcatgtgtcaccatgtctggctagctttttatatttttagtagagacagggtttcatcatgttgtccaggatggtcttgaactcctgaccttgtgatccgcccaccttggcctcccaaagtgctgggataacaggtgtgagccactgcgcccggcattcctatttgttatgcgctatacactgtgtcttcaaaaattcatatgttgacattgtaaccctcagtacctcagaatgtgaccttctttgaagacaggatctttacagaggtaattaagttaaactgaggtcattaggatgggccctaatccaatatgactggtgtctttggagaaatctggacagagacatgtacagagggaagaaagcgtgaagacacaggcagatgacagccatccacaggccaaggagaggggcctggaaaggatccttctctcaaagcccacaggaagaaccaaccctgctgacaccttatctcagatctccagcctccagaactgtgagacaatagacttctgttctttaagccacccagtctgtgatacttgttacagaaaccctaggaactaatatactattcttttaatttttgcttgaagcttagtatcccctctccagttaggaagaaaaggttgatgtcttcctgttcctggctgatactgcttccttcagatcagcttgccagttggttttactggtgatactggaccctctccagtratggaaagagagaggcagaaatgtggagaaactgaggtagagaccaggagtgtcaaagcaacagggacaggaggtaacgtgaagggccacagccacagagagagactggaaggggccatgggtctgcacaggcctcggcagtgactggctgcccccgctcatctccaaaatgccagatgtgcatgagtaattacagaggttttctctgggcagcctccccggctggttctcgtctatccctcacaggcgcataatggcattaaatgtgactccactgcagttccgtgcagtgacttatgccactgcagtcaataaaacccactctcggaaagaaactagattacaggtcaggaaagggtgggcaggcactgagccgcctctgatcgttctctgtggggggccttccatatccctcctctcttcatttctaccaaattacccattgcggggccctagctttggatttgttatttagattgactttgcctcggttcctctgacattratgtggcaccacaaaattatgtagcatgtgatccagaggagttttcaaagcaggcattttctctgatatctcactgaaagtgccagccatgtaaacgttgaagggggcctctgagcgcaggcatgggggctcttgctcctgatgccttctagaggaggaaaggtcatgcagtctccaaccagggggtcttaccttacatgggtgaggatccactccatatgtttccaatgtctgtgcttttcttaagaagttcagctctgatgttgctggtgtttgaccactggaataaagaagatgagatgatttcaaggtgtcttgttcccacaggttcccctgaggtaaactctctatgaagatgtgcttaggatgagccacacatctcagtttgtctagggtgtgctccctgcttggttctaggaccaacttcgagactcctgctagagtctctgactgtcttcaaacgttttcagagtgaggcaggctacataatgaattacttgggctgagtgtaaacaatggggagtggtggggactgtggcagcaccatcttaactctgagattcccatcactgagaatgcagggcccactacttgggaggctgaggtgggaggtgggaggattgcttgagcccaggagtgcgaggtttcagtgagctatggtcacagccctacactccaccctgagtgacagaatgagaccctgtctcaaaaaaaaaaaaaaaaagaatgcaaggcttagctagatattgtgattttaaaagaaaagtcagagatactgatttttatgtggtatttcacaatttaaaatactatggggtaaaacaaaatacatctgtaggctggaagcaggtcataggcttctcatatgtgatctgttctagactgaaatataaagaaggggctcatatagcttgctggtgccacccagccctcttcctttgccaaaaggaaacacaggaaattagggtgaggagaggcaggagacagtgctgagctcccatgctccacaacagctgtctgtccatagggtgatgaccaggaaaaygaaagatgctgaaaaaggcagagatcagctccggctccaggccatctgaaggggcctttggcatcaccccttcccactgcctctttagcaggtgtgttgatgggctcattgcagacccagtggcagaataaccatcaggctcttgcctgggtccagagccctgcaaagcagatatacttctacagatacaggtttggcttcagtgaggaggggtgggcagcttgtgaagtcaacatctctgatggctggtggacaggactgcacgttgctcgtttctaagcttatcatttgcctcaggtgatatggccaggcaggaagataagctgaccccaggccagattccccctagtgtccctctggagaggcattagtcaggcagcacctttatgtgccagcctctgtgctacttgctggaaaatatatgaagaaacacagtatacagtctgtgctctcaaaagcccatatcacagttgcataaaggaagcatggatgtatttttacattatgaagacgaggcaggacctatggaaaaagtacctgtggaagggggtattgctgtgaataaagacttctgcatccactagtgtacctgaggcacagggaaggtaagttaggaaaatatctgtgtggcaagcaaagggctggctagagcacagcttccctttccagggagtgtcctctgtctgcagggggagtgggccctgtgggctccatttacccttggagttggcccaaacctccagggtcctcaaagcgggcatcatttcctgggggatcccctgctttgaactaggtttctggagggctgtccctactattctgatgtctcctaaagccctccaggcagttccagcacatccctgatctctttgaaggaaccatgaggcccctgcccccaacaccacaggcccgtgtttattctgatttttaccacaaggggtcgctattccctaacagagtgacttgaggagccatggggtcctgcacctgggaaggcacaccgagggagaggggcgggaagcatctaagattccatttgttcggtgtcgccattccgctgggagggtcaggaacccctcctgccacaaggcatgggcagaggggtctgtttacaaaggctaaggaggctttgggttatatttgttggtaaaatcattgagtgaagggtttctggggggcctgtggtcggggaaggaacaagttgaagcttagtattagcattagaaatatccagctctgctccctgttgccaggcatagtctttcctcggaacagtagatacacaaaccttttaaaatatttttttaaagctgtaatgtattataatgacaacataacttttttttatttttaattttttgagacagggtctcgctctgtggcccaggctggcatgsagtggtgcaattccagctcactgcaacctccacctcccaggttcaagtaattctcatgcctcagactcctgagtagctgggatacaagcgtgtgccaccacatctggcttttttatttatttactttcatttttagtagagacagggttttcgccatgttgcccaggctggtctcgaacttctgacctcaggtgatctgccctcctccgcctcccaaagtgctgggattacaggtgtgagccactgcgcttggccaacactgcattctatatcctttttcctcatagtttgtcagtttggggaatctgtgccgtaaccaaatggagcccaaacaccctattgttgctttttaaaatcaggctttgtagaaaatcctacttcatgtgggtgaaaagctgcattaatgctgttttatggtattcagcatattctgggcaaagtaagagaagctgagaaagatgaggctccaaacttgaagccacgtctcctccacttctctctgtgcaaagtcggggactccaggtagggtatggggggggcctgagtcaggcggggctgaggacatacttctgaaccagagtgctcccaaggcaccctcagcatttatgaatcagccctgcgcactccatcctccactgagaagccacctgtcacactgtcacagactaagagcagaagcctgccctttttcacatcctcactcaacctctcctttttttttttttttttttgagatggagtctcgctctgtcacccaggctagagtgcaatggcgcaacctcagctcactgcaacctctgcctcctgggttcaagcgattctcccgcctcagcctccggagtagttgggattacaggcacctgccatcatgcctggctaatttttgtatttttagtagagatgggttttcaccatgttggccaggctggtcttgaactcctggcctcacgtgatccacctgcctcgacctcccaaagtgctgggattacagccgtaagccaccgcgcctggcctttttctttcatcttttttatcttatgcaatttcctttatcttttccttttccccagttcatgctttcctctgtatcttcattaaatatcatagtgaggcagatgcctttcaaaggccaatccctctctgtttcccctataacacaacttctcccttgtctttaagcttcaggctaaatcgcttttcttggagagggagcctacagggcttgtggctgtgacttgtgctgtcagtgtatcactgacaatggtacatccgcggtcaggaaggctggggagcatcactctgtgtcagtaaacagtctgcgagaacagaggacacggcgtggagcctgcgtgctcaggctgtggagaagccacaatgttctgggcctgattaagtgccacgtacctcagttccgtcttgtgaatctcrgcaattttcctttccagcttctctgaatgtttagggaaaaactggaacttggagctgtagccttcagggtgtttccctgagtcataatccccaatctccgctttcaaaaggaaggtggaagaaaacaattgtggagacaggtaaatcatcattgacaaagcaacaagagattagcacacagagcaaaagccaaaatacacatcagatttataagaaacagtggattctgagcacggctgtgggctgggcagagggcaggcccttcaggagcatgtccacctttgtttttccaggtgcacacactgggttggcattcaagtctatgcagagagacagagagctgaccttgtgttctgaggtcaccacaagtaaatttacaatgaaagagcagaggcctgcactatggtcctcatccattccgccatgagaagatggtctgggagcaatggtctttgtggcagcacaggaagtggtgagcttgatcagaaagggagatcctcttgggcctcagccagatcataagtctaaatcctagtttgaggatgttagcagggacacagtaaattgatgaatgagctgcgatccaaattcagaactcaaccctcagttcaaatcaaatcaaattaataaatttgaataaatattcattaagggctgaccaggtgccaggttccttcgagaggcctacagagtgggaagcctggctgtaactagaaagtatcgttgagttcagaagcatcaagttctttttttttgtttgtttgtttttagacggagtctcactctgtagcccaggctggagtgcagtggtgcgatcttggctcactgcaagctccgactcctgggttcacgccattctcctgcctcagcctcccgcgtagctgggactacaggcgcctgccacctcgcccggctgattttttgtatttttagtagagayggggtttcaccrtgttagccaggatggtctcgatctcctgacctcgtgatccgcccgccttggcctcccaaagtgctgggattacaggcgtgagccaccgcacccggccgagaagcatcaagttctaaggctcatttctcaagtccctgccaggtgtgagcctttctcctccagctattcagagagagtttatctctaaacctggtaagatctcagggcagtaaactttaggagggcagaagacccacggtactttccacacccaggtcagaatccagctttttccacgtgaagctctccacagggaggatggtgggtakgacaaaagaaagaggaggggccagctactctgtgggtgccctttttccttcccaggtgagagccacaaccacttcagatgtgaagtcttgagggaggagaaatattaagaggaaaasgtgccctcctcccatggctgaatattgtacttgggacttgtactttttcactacaaacctactcactgtatcttccaaattacttgggaacttctactgttagcaagagacccaagtctgaagtctggggtgaccttgagccttgcagtcttttttcttttgagacagggtctcactgtcatgcacgctggagtgcagtggcatgatcatagctcactgtagcctcgacctcctggactgaagtgatccgcccacctcagcctatagctgagactacaggtgcacaccccaggcctagcttttttttttttttttgagacagagtctggctctgtcaccaggctggagtgcagtagcgcgatctcagctcactgcagactccgcctcccaggttgaagcttcccaagtagctgggactacaggcatgtgccaccacgcccagctaatttttgtatttttaggagagacggggtttcaccatgttggccaggatggcttcgatctcttgacctcatgatctgcctgtctcggcctcccaaagttctggggttacaggcgtgagccaccgtgccaggcctaatttttaaattttttgtagagatggggtttcactctgttgcccaggctggtctcgaactcctgggctcaagtgatcttccacctcggccttccaaagtgctgggataacagttgtgagccactgtgcctggcccagagtcatttatattgattttatttagaaagttccaaatggaaaacatcaatgttggacgtcaagtacttttttgaaggaaaatgaatgattgggtaaaactgtagaaaagactagagtttaagactcgacttaggtcaggccaggctttctctttaaaaataaaaggggcactcaggagttcaagatcagcctgggcaatgtggtgaaaccccatctctacaaaaaaattaaaaatttagttgggtgtgatggtgcacacttgtggttccagctacttgggaggctgaggtgggaggatcacttgaacccaggaggtggaggttgcagtgagccgagatcacaccactgcactctggcctaggggacagagccagatcctgtctcaaaaaaaaaaaaaaaaaaaattcaaaggggcatctttgggtatctccccatggactccccatgtaggtgattttaaaaacaggagtctcagaagtcaaagtggcaatgggctgaattttacattcttaacacaggcagccagccgtggtatttctattgccagaaggactttagtttcttattggcaagcagtttccaggttctcttcacaaagttgcttccaggatttccaactaagagttcaaattcttttggggaaacttcatgattttagtgctgtsgtccaaaatgatccagtagtaatggcagtttcaggcctagggactaagaggaatctaggaagcggcacttaagtgtctctgcatctcaggagaaggggacgtgtgtgaagagtgcatatctctcccactgttttgcaaaaaaacccagtctgggcctcagctgggtaagcctcaactcttacttattagcctgttaggaaatgtgcttgttacttggaaacactttcaactttgagcacactgaactaaaaggtctctgaaatagatactagaattctaagatgcttcatatcttggagatttgcctgagaggatggggaaaaaatcaagtctgattacactccagagtctcagggactttatcaaccaggggcccaggacaaatccctaaaacagagtcagaatgactttaaggggctggtagtaagatctcaggcgcagtttagggttgagtgttcagtgttttctggctctaggaaatccaagcaaaatcctctaacttggctgggtgtggtggctcacacctgtaataccagcacttcgggaggctgaggcaggtggatcacctgaggtcaggggttcgagaccagcctggccaacacggtgaaactccatctctactaaaaatacaaaaaaaaaattagctgggcatggtggtgggcgcccgcagtcccagctactcaggaggctgagacagaagaatagcttgaacctggggggcagaggttgcagtgagccgagattgcaccactgcactccagactaggccacaaagcaagactccatctcaaaaaaaacaaaacaaaacaaacaaaaaaaactctctaacttgaactctgcttcaagttagatactgtttgtttgtttgtttatgtatttatttatttggagatggagtcttggtctgttgcccaggctggagtgcagtggtgcaatctcggctcactgcaaccgccacctcctgggttcaagcaattcttgcaccttggcctcccgagtagctgggactacaggtgtgtgccaccacactggctaactttcgtatttttagtagagacggggtttcaccatgttggccagtctggtctcgaactcctaacctcaggtgatctgcccacctcggcctcccaaagtgctaggactacaagcgtgagccacagcacctggcctagataatgtttagattcaagaaggagtcatcagtgstaactgaaaataatgtaatcagtacttggcatgaaaagcaaacttatcctgtcaaaagtcattaccttgaaggatgtaagctgctaacaaggcagcatccgatgttttacagaggagtcggccatggtagagatcccttttgatctgcaggaagactaaatacctggagagaaaacagagaataaactataaaggatttctttgattgctttaaagatagaaatatgtattgtaagcctatcaaaatctttgtcaggatacttttactacattaaaaaaaaatcctaaaacataatgtagaacaaatacattctccatttccctggaaactctttcaggtactttgccctgaactgacttgaggttcagttaaaaatatgccagtttcctcctgtagctcaagtcagaaatggctgtttcctggtaaaagcatcaccccacagtgctgagctttggaaggagccagccccagtcgatctggtgccgaaaaagaaaactatgccatcagagactggcaaactgggcctctctccgccttggatgccagctgatgttccttcttaagtagaatggtgggtgaaggaactagcccaggaagagttcagcctcaacttaccaagagaatctgtccatatgtggaaacagcctgcagttaccgaggtcaaccagacctttgaaatggaataaagtgtaagaagagtgagccgagattgtgctactgcactctagcctgggcaatcggagagaccttgtctcaaaaaaaaaaaaaaaaaaaaaaaaaaaattgcaacaagaggcactggtgaaagaagcacacaaatgaagcagaaacctggggccagcacctctttaaatacagaaagctgttgcctcaggtggaagcaggatatcaaaaacaagagcaaatagtagctgacatgtattgagcacttacgatctgccagtccaggtgttacacactttacatgcaatawcttatttaattctcacatgacactttgagataggtactgttattatccccattattmcagatagagaagctgaggctttagtgattttctcatggacgtacaactaagtgaaagagccaggattcaacttcagcactgtgagacccctaaacttggctcttcatcactatgatattctgccctccttgcactataaatgctttgcagtttcactagttggatggaccctgtcacagtggaatggaattgatgactttccattttgaaatgtcttcacaaggagtgtggtctttattgctcttcttagaagacctgtaagattatgaggagcatcagtcccttgagtgggtcacctaccatggtggctccttggccagggagcatctctggtgatttaaaaatatttccacagattctttgataatcctaatttcatgaggtagagcttaattccttctctgagtatggcttagacttggtgactcacttctatcaatagaataaagcatgagtgagtgtctgacttctgagatcataaagtcattgcagcttcctccttgttctcttgcccttggatcactcattcttcttgaggttgcttcagcagtcctatagaaaggtccatgtggtgaggaactggggcctttgccaacagccagcaaggaactgaggctttcggccaacagccatttgaatgacccatcatggaaatgaagtccccacctccagtcaagcctgtggatcactgcagccccagccaacctcctgactgcaacctcgtgattgaccctgagccagaaccacccagctaagctgctcttgaattcctgacccatagacactctgagacaattaaacgcttgttattttaacttttatggtccagcatccctaggggagtaatgaaaatgtagtaaaattcctttaaattcgaacagtctgaaccaaaaagaaattgacccctccctggacagttggaggtttccattgtttctgttttcgggctgaagaatgaaacagaggattccttgtccacttgatcatgtaaaaatgctcaasaggaagagggctgttgacagtgcaacttctaggaggtggtaggaaggggtcctagcaggtaactctgagaggcttgggcttgaagattcaagcaattaacaaacagaaatgagggagcaaccaagccatcttctctcctcagcgcttgctactcaaagtgtagcccacatatcaggggtatcagcatcacttgagagcttattggagataaagaatataggcccatcctacacttccacctacaccttttaacaagatccccaggtgatttgtgtatagattaaaatttaagaagctgtcctaagaaaattcaaaagccatcttctaaccacagcaggatggactgccttcctcagaccaaagggaaggtgagtcttagcctggaagttaataagaacccatcccctcactcccaccaaccctactctgcccaaatgtttgccaagaaaaacgaaaggaaaaaagacatcatgtagagtgaataattaagatggatctaccaaatcaagctcgtcttcactctgcttcccacagcgaaatgccacacggtgtgtgggagagartgagtgagcacttctctgcctctcactgttccaactcccaccttccacaggcttcagcaggatgtggatgcaaaccttttgccccttactcactgatcactccctgggcctggattcacgcatcacgtcttccatgtttctctgcttgtctgtgtccaaaattcagggactgtacatattggactaaaggagatattacaaagggataacatggctctgggcagtgattctcaatgtggcagagaggggaacatcttccagggggagcccgtcagaatctgtatgtgttgggggtgctcctgtggtttgaaatggcccctttgggccgggcgcggtggctcacgcctgtaatcccagcactttgggaggtcgaggtgggtggatcacctgaggtcaagagttcgagaccaccatggccaacatggtgaaaccccatctctactaaaaatacaaaaaaaaaaaaaaaaaattagccaggcatggtggtgtcggcgtgtaatcccaattacttgggagaggctgaggcaggagaattgcttgaacccaggaggcagaggtggcagtgcgccaagatcgtgccactgcacttcagcctggctgacgagagcaaaactccatctcaaaaaaaaaaaaaaaagaaaagaaaaggcccctttaaagtttctgatttgctccccttctcctcccacccaagggaacatgatcctgctcacactgagaaccactgtctttccaaggcatcattattgatggcaggtaatggcctcaggtgaactggaatagaaacaaggctttccactgctgggcagggttccttttgatttctggtgataaaacagctgcagggaggttaaaggcaaggccacagggcattctcaggcaatgtcataaaactagatgggaagagggaaaaggatacaccagtatcctaaagaaacaaaccatagttgagggcaagaggagatgagctcatgaaagaatcaactgacagcttcaagagagagaatgagctgcaccagggctccccctccctttctgccacagtggcttccatcgagctttgtgtttggttcatttaagaagataaccagtgactcaatgttgttggtggaaatatattccacatgactcatagcatccttagacctattcacaagagaccctggcatgttctcccctgccacacaagggcctaaggaagactatcttgttgcctgaggcactatctccagggccactgtgtgttgccaggcaagggatcagcctgctggggctgcctagtgcagccctcctgaatctctgaacctcagaacatttcatagccaaggaaatagaagtccagagatggagagtgacttatctgaggtaacacagcaatcagaatccaggccttctgactcggcccatggtaattcacttagttatcaggttagtcctaatccaagtcaggaggaccctttgttatcagagagatattctcactgagactaaaggagaaatgagctctagaccggatttaggagaacacgcttgcttctgaggaaactggttttttgttttttaaactctgctgatctctttctggcctcagaggggctttacctcacctccatttttgtttgaatgctagtgttgtcctaaattgattggagtgtgaatcaggacagaattagcaagagcctgcaagatgccagggaaaacctgagcttttgtgtaacacgaacatctctccagggtattggctttggcataatgctttctgatatcagagggtagaaatgagtccacaggcatttccagagtttaaggctgtgaactctggaaagcactggaggctcctggagagttttttccagaagatcctttggccttaccttcccttcaaatagattctttgccactggcttccyctatttactatttcctttttcctgactataattatgtttagtacgtcttcctccccaatattagactgtaagctccttgaagtcagagactatgttttatttacttttaatattcttctacagagcctaaacatcctgtgcctagcttatccatctatccatcatccatccatcatccatccatccagttctgacacttactatatgtgccaggcactgtcacaggtgctgggaatgcagtagggaacaacctggagtcctgttaatggagcttacattccaatgggggagatggcaaaataataacaaaacaaaataacaataaagactcacatttactgagtgcatgctgtgtgccctgtttcattcagtcctcccagcaactctatgaggtgactacctttttttttttttttttttttttttttttttttttttttttttttgagatggagtcttgctctgttgccaggctggaatgcagtagtgcaatctcggctcaccacaacctccacctcccgggttcaagtgattctcctgcctcagcttcctgagtagcagggattacaggcacgtgccaccacgcctggccaattttttgtagttttagtagagacagggtttcaccattttggccaggctggtctcaaactcctgatctcaggtgatccgcccacctcagcctcccaaagtgctgggattacaggcgtgagccactgcgcccagcctgtgactaccattttaatccttgtttaatggatgaagagactgagtgcttagagatactgttcttgccttgtcacagagctagttaaagaacaacctgggatttgaagccagctctctgatttcttagcccaggggttggcaaactacagcccactgccatagtttccaatggaataaaattttactggaacacagccttgctcattcatttatgtatcgtctatggctgctttcacactacaatgacagaattgagtagttgcgacagagaccatatggcccgacaagccaaaaatacttactatttggccctttacagaaaaagtttgccaatccatcttagcctaagctaggctcaagcgatgttcactgaaggcacagtggcctggtgactccgttcgttcatgtatgtcttgattcatcctgttaacgttttttggagcacctgttgtgtgtcagacattttgcttccttggacggcggggccccatttgcagtcagtttccttctcctacttgatctttccaaagagttcatacacctgcaatccctgttaaaagccaaatctggtacctgaatttcccattttctttgccttgtctctagcctagacaagaaaatctgtttattactttaaaaatgacaaaagaaattaatcaggatttggcaactaaatttatcatctgggaagaagccaagagataaactgaagcaagttctgtactccctacttcacccccttctctcagcctggctttatgggaatggctgagacagcagtgaaatttaggaccaatattgcctggaaaaaacacactgacagctaaattagtttggcagcaaggtgggatggagggctctaagccagggatgaattacggatgttgagtgaggctgggcccggtatctcctctcttaagatcagtagggatgtgaatgaggagaaaaatgcagctaattccacaggctcacagaatgccccagggagggggaggcacaaagactgcaaagcaggcccaggcaccggtggttcacactcctgacaatgctggaaaactgcatactaggtaaagaacgctggtgaggttgagagagaggggaaaattgcccaagatggttagcacaaatgcatgcagaccgagaggagctccttctcttgccagtgtccttgaagtctgctgacttggtgagaggcctggccatggtcctaatgctgtgcttaccaggacttggatgactacctgggatagctttctctctcaggaaacagaagttagctgcttaagttttaggattctagctggtggggaaaggggacagaggaggagtggagattattagaaaagaagtacctttcacataaacaaggaagaaaagccagtactaactgtacttgtgcatgatgcagagcccctggggcctacggactgtgtaatgaatctggcaacgaaatattgagactttgctcagtgcaaggctcactgtgggtgtattaagaagtgtaagaggccgggatagtggttaatcttcccgacaattctatgaggtagatatcactatccccattttataaatgagtaatctaaggttagagaggttaagtatcttatttccaagttaagtatcttatttggctgtatacagccaacaagtaacataagtaagatctgagctcccaggtctatgctgcttcttgggtaggaaggtctgtccattcatgtaagatagtgacactggatttacaaaattgtattttttttttttttttgagacagagtttcacccttgttgcccaggctggagtgcaatggcgtgatcttggctcactgcaacctctgcctcctgggttcaagcgattctcctgtctcagcctcccgagaagcagggattaaaggtgtgcaccaccacacccggctaatattttgtctttttagtagagacggggtttcaccatgttggtcaggctggtctcaaactcctgacctcagatgatccacccacctcaccctcccaaagtgctgggatgacaggcgtgagccaccacgcctggcggaaaattgtattattaagagctcttcctaagggccaagataaccatacatttccagtcctttaatcaaattggaaagccatgtgtctgtggtgctctcactggctgctccctctcatccccactgttggtccagtgaggtggacaacaaagacgtgttaggtttgctcygatatgtagacaggagtaccaactttggggtctgccctggcaccagtacctcttttagcagagacagacagaagttcagagctaaggcaaacactctggagatcatgagtggggcaggctagtggtattttaacaaaactcttgaaaaaaatttttttttgagacagagtctcactgtgtcactcaggctggagtgtaatgccgcaatcttggcttactgcaacctccacctcacgggttcaagtgattctcctgcctcagcctcccgagtagctgggattacaggcgtgatggcccggctaatttttgtatttttagtagagatggggcttcaccaagttggcgagactggtctcgaactcctgacttcaggtgatccgcccgcctcagcctcccaaagttctgggattacaggcgtgagccaccacacctggcctgaaattttaaacatagtggttctacccttactcacctacmtaaagccttagggtgtctatgatttggatggatttggttttctgaagcaaagcaagagccacctccacttccacatagatgagcagagcctggggcttctatgcctagtaagagacatgagatttggttctagctacactcttcactgtcttcagtgcttcaaagtaggtgggtacacgctgccctatgcatctgcaggaaacaagccttcctgaagaggatctccctcaactcccatgtgaagggcccatgccgaagaagccacttttctcccctgtcccacttccttgttgcctttgtactgataatgcctgcttcttggccccctcctctccccatttcctgatttcctctcttagagaaatttttgctcctttcacctggcatgctctttagatcaggaaatgaaaataattctggccgggcacggtggctcatgcctgtaatcccagcactttgggaggctgaggcaggcgggtcacgagctcaggagttcgagaccagcctggttaacatggtgaaaccccgtctctactaaaaatacaaaaattagccagccgtggtggcaggcgcccgtaatcccagttagtcaggaggctgaggcaggagaatcgcttgaaaccagaaggtggaggttgcagtgagctgagatcgcgccactgcactccagcctgggcaacaagagcgaaactctgtctcaaaaaagaaaagaattccatattctttcctccttcttccctcctccttttctgtctttggaattttcccaagcagttaaggatctaggagtggatctcaaagccttacaggataacccgtctatatggctggcaatatcctcattcccacctttgctgtctccacggtcttagggaaggggttagagctgacagtcctatctcttcctcagctctaggattccctggcatcacatccttacctatggtcctgccttctacaaagtaacatcaaggttttgcttatgtcaaaattaggtctttctaatataaaaattagggatccatgttgtagagttcttgaatctctgaggtgagactttcacagtaaatttcgctcagatacacaaaatcctggggaagctttgaagctctcactcactgaccctcttttaggatggctgtgggcacagaggttcttttcatcctcaagtggcgctggatgagacaggatgcattccacgcagctgtcggcctgccacagaacatgatccccacaatagtttatcacgaacctgatccaacagcaccacagagtttatccattttgattttaaatcttcagtatctcccagcttatctttcagtgttatgcctttggcattttccaagyatatccattagaccacttgaatctatttgcaacctccgaaataagcagcaacatagctctctccaaaaatgtccacagtggcaacatcataggtaaaagaaaagacgcttctgattagttactccagagccctttgagagtgaccagttcaagaggtagtattcacacttcttgaaggaaagaagtccactctgttgcgactgcactgaggggtacgcgaagaaagcatgtggaaatgaaatacagaagtcattatatttaggaagagttccttgcctctaagagttaggcgcttccaaatgagaggctctaagaggtcaccatccccctttcctatgctctccaacaggtcctaatggctgcgggaagcatgttcacctcacctggttatttcttctttcagagcagcagggtctgcaggataaaacttcacacggaagcacatggtgaatggaggctgggctgcagagaaaaagaggtgctcatcagggaagactctcacccagaagaggacagggctcttctgcccactagcatgaagcagcagaagagaaccctcatatatttagggccaacttatactcagaacagtggraaattatatatgtagatcaaaacttgagataagtgggaggtttcrtcccaccctccccaggggtgtggcttgagtcttttcatggagaatacttacatctcaattgtttcaccacagactttgtaaattccagccaatgctgaaacagagaacacagaacatgaaaaccctaatgagaagggctgtaaaatataacttgttttctccaacttaaaaaactagacagattgtagcctagggtgaaagcagcccaaaagcttatgaaagataagtttggtgagtaaagagtgatatgattttctgaaatgagctcccatggagccagctgtgaaggggggaatagttccagcttcagatgccatttatgggcttccctggaaatgctgtcttctaaagcagggtgccaaaattctgagccatgtttttggcatgcgattaaggcacaagcgactgcatgtatgtgtggcggggacagagccccacctgggttgagtcgggaaatactgactttaatgggtggtgtgtgtttctgttatgcaccagctttttttttcttctttttttggcaggggagtgggaatagaagattttggtagcaactctagaaagtagtgagaagtggaaatttcctaagtcagggatggctggtatatattccatctttctttgagtaacataaattgccaacccttgtgttagaaaacacatactcaggattccttggcatccagtgatgttttaaaatctaaatctcaaatgataactaaccacaaccaacgtgtaggatagtaccttcttccccttggatttttcaaggaggcaggacatagaggcagaatacattttcccatggtacttaacgtctgggggaagcaatgaaaccattctatatgtgttccttaattctacatgggtcctttataaattttattattgatgtttgttgctttttgctaatcaagattaggtaggactgctattaattggagtttgattatccagaggtagcttaacattgccagatgtaagctccatgaaggcccagaactgtcagtctcgtttaccactgtatcaccagtgcctagcacagtgttcaataggtagctgctgaatggcaaagggactgggcccatacttccttcttttctggctacttcaatttagtgtaatgtcttggcagagtcctccctctggcaggagagcagccagggcgctgcagtcagcatcctggcctcccttgattcccagtgatcaccttctgggctgggccatgggtcatgcagttaatggacccactaagagccagttcttctgtcagctccacatggataatctggactgacattctgctctcctgcttctgctgatctgagttcccacgaggctggcaactcattatagccactcaatgtggttaagaggcccttctcacattacacggcccaccgcggctcagcttcacagggaggcaaaggcaagagatgaaattgctcagaaacaactggggttccagggtatgcctgtgaagacggaggaggcctatctgttcagagcacactggaattgtggacagtgaggagaacatagccagtgccagggattcagtacacagaacagcaacacccccagacattagactgatagattaaaagaaataaacaaaggaaggtagaaattaatgactgtgagatgcattatcagcagagggcagataaagctgaatgacaaaagcctattccccttgacaatagctagaaagaagattttagttttattgtagtgagagctcaagaaaggactgaggctggaggatagtagcaaggggtgagaagggactgaagagctgtcacagctgatccatgggatttggagtctggcagagaaatcttgagaggaacccaagaatatggtgatggccagagtggctttttgcaaatgcctgaccaaatcggtcccagattcactagcaaacagacaacatgggcttagggaggagggattaaaagaagaggaaaagaagattcagagaggagggtttcctcccctatctgagtgaatgggccaatgtggcacaatcttcagactctaggggcttgaaagggtacaaagcagaggccaagagaaggtggaggccctgggcccgagtcaggcatcctggggaaggaaagtaagggcagctcctccaggagagaccaggagagcttgcagatgcatggaggctcctgcagagcaaggactgacatcggatggatgtaagtgctgggttcagactgtcttgagacccagggaaagaggtttatwttaggcccttacaccctgagggagcaggggagctcagctcctccatccctaccatgaatcagtggactaaggacaactctctacaggtccccatttccctacaaccctcagwtactstctcaagcctctctgctctccttaacccctcccgcaaggcacagaattacacaactttcagaggctatcagttatacattcagcatggaatctcagaaaccacactggccctggagtcaaacaggtctgagctcgaggctggctttgccactgacctggggcaagttacttaacttgtctgagactttatttactcatctggataacagatattatcattagggatactcatctcattttgttaaggatgagatggaataacatacgtgaagctcttagcttagtgcctggcacgactcagtgagcagtatacatcagctggaagaattaggtttgtgtgcagcgcagagcctggcaagcagtaggaactccataaatgtttacttctcctctttcccatgttcttatctctctctagttccttctcattttaaccttcaccacatccacatattctcttactctcctcaagcacattctgacctaactaaaaaaccaatgaacaggatacaattcgcctttttttcttcatataccaccactctaggggatgaagagatcttggagtaactggccctccttttttttttttttttttaaagacaagagtcttgctctgtctcccaggctggagtgcagtggtgtgatcttggctcactgcaacctccacctcccgggttcgagtgattctcatgtctcagcctcccaagtagctgggactacaggcacatgccaccatttccgcgaatttttgtatttttagtggagacggggttttgccatgttgcccaggctggtcatgaactcctgggctgaaacaatccgcctgccttagcctcccaaagwgctgggattacaggcatgagccagtgcacacagccagccttcctttttaaggataaaagtttggaccaaacaaagaaacaccatcattacctctctactttggtggggatgccagagagtacatctccacaaagagcaaagggtagatgaagggaagttatagaaactgcaggtgtctgcaagctgggaggctgggcaaatggacgtaagaaatacaacactataagccattaactcactcatgcattcatttcttcagaaaatatttattgaacaccaactacattgtaggcctgtgctagttaaatgggagatagtgatgaatgagacaaagtccaggccctcatggaacttacatttttgcagggaacacaggtaatcacagaatgatgtaataagtgctataacagggtagcagagggcacatgggggcccataggaggatccctaatacagagtggggttaggggagatttcccagaggaagtaaaagtctaagctgagaccttaagtgtgaaaaggagttagctggaagaagggtgtggagtgtggagcggtaaggaaaaggagaagattctaggcaggggaactctataggtgaaggctctgtaaagaaagaaggtatgatgtatctggagggcaaaagtattactgtctggcgggaccacagcaggttggggagatgaagctggagaaataggcaggggcctgagatgatggacttgttcctgaatctgtctggaatatcagcacccttggctatcagaatgccctgtgtctgcagagctgcctatgctgtgtagagcagagcaagaactgcaagatctgcaaggtgctgaaaggcccgcgctggtttggctctgtctgtactgcctagattgggttggtatggcacctttggtgaggcctttcctaaccagtacaatgtgcttcagcctgcttactagaaagtgggcaggagaggctcaccctgtgacytgggctccgagaccacaactccagcccagctgctctgcctccaactttgtgcaaatcatttaagctccctagcctgccatttcagcaactgtaaaatgacaagcttctccaggtgagctctagccaaggtgccttccaggtctaatgctatgatctgaagagacgacatccaactgcagggtctggttggtccctgattcctgaagcttgactttgaatatgaatgacagttcaagacctcagtcttattgactagccctgtcctccttttgtgctttgaatattgacttacccgctgcttatctgggtctacaaagcggataccaaaatagtctttctcaagtaggttcagatggtggcaaagaaggtcaaacaggtactggcctttggcatctctctgcaaagaaagaaaactccattgagaaatgagtgggtttcttcagtgtaactttttttttttttatagccattaaaagttgtttgtaactgttgcatgtgtctatgaaaggggtgaatgtccataactatgtcctccacattgtgatacatcactcactgtctggaatccagaggcttttagcacctggaaggagcccaagaacccttcccaccacaaagatgtcagagaartcagggtagagtcaggtaagcccagttcccatctcaaatgcacagagagctttcttaaactgtgggtgtagggaatgtcagtgtggaatacagcaataattacaccaggcccagctgactgagcctctaaagtaaatcttgaatccattcacttctcttcctctctgttaccaacaccataggtcaagccaccaccatccctcaacaggaccactgccagagccttctaactgatcttctgcctttgctcttgccctttcagtccattctccgcacagcaatgagggtgtccacaatttagacatcatctctttcttgctgaataagtgatcaggcacattgtaggatatttaaacaaacaaaaggatatactatgaacagtaagtctcccttccaccctggccaccctgtgccccagttcctctcccyagaagcaactgttatcagcttcttgtatatcctttttttttttttttttttgagatggagtctcgttctgtctcccaggctggagtgcaatagcgcagtcttggctcactgcaacctccaccacctgggttcacacgattctcctgtctcagcctcccaagtagctgggattacaggcatgtgccaccacgtccagctaatttttgtatttttagtagacacggggtttcaccatgttggtcaggctggtctctaacttctgaccttaggtgatctgcctgcctcggcctcccaaagtgctaggattaaaggtgtgagccaccatgcccagccctcttgtatatcctttatgtgatgttttatacacaggcaaacctacatacatatacatctcctcttttaaaaayacattttgtaacatatttttaagctcttttctcccacttagggtatcctgcaaatccttctatggcaatatatatagatatgcctcacagtttttaactgctgcatgtcactgcaatgaatctaaaattatttacccagttccatattgatgacatttgtttctaatttgctattacaaacaatgtggcagtgaacatacaatgatctttatgttactcacttctcttaattcttgttgctctcagaataaaatgaaaactctgatcatggcgtcccaggccctatacagcctggcttctctctgcactcacccaaaatcattttcctcactacacttcagccatggcctttccgttctgaactccccaaggcttttctgccactgtctttgcattccctctgccgggaatgttcttcctgcagctctctgcagccactcctattttttgaggactcagctcaaatgtcccctcttcagagaggcctttccctatagtacagcccttcccagttactttccatctcattttgccatttatgtccttcatagcacttataycaatctgtaattatcttgttgatttgtttagttatctatttactatctgcttcctttctagactgtaattttcatgaggtcagaatccttcccccagaacttagcacagggcctgatgcatggcaggcaggtcctcaataattatttgttgaataaattactgaatgaatagaagggaaaaggtttgctaaaagatttcacaaaatggtgaaaagctaggccgtttatarcccataaccttctacttcagagacctgcctggatgccaagggtgaagtgggaggagaatgacttgcaggaamctgtcaaaacatctggagcctgcacagcatccatcgctggcctgtccccagtggtctctgcagctcagttcagatgatcatctctggcgggtctatgtctaattttgcatacaaattgaggttgtatgaggaatttctgtagtgtagtggttatcacgtttgtctcagaaattgaggttgtaagataagatccaaagatctctcctgtgccaaggcccaaggccatgggtaattacagaagggcctggccctgccccaagaatgagcatattttaaagaccttcacaaaaggtttacacctcacctcttccccttctgctaactcaccacatactatccaaggagaactagggcaggatgctgatctcgcggcagttatgttaagaagtttgtccttgcaggagctggaagaataggtgagtagacagctcaactacagaaggaggcaacatgtgggcaacacccctcctcttctgagacaggaataatacagggtggtcacaggagaataaaaattccagacagcagtttcacatgactagaggctatgggctgataagaccctgaaaaacagggcatagaccaagctagctaagacccactgaacccaatgtgtggctggatttgacctaggtttctcctaggacctcactataaactcgttaacatactagatcacacacctaccagcgccaggactgttccaagaccacccatatttgctgtaaaaataggtgccactgcagttatgagaaatctctaccttttcccaagaattttcttgaatattccaccccttggttaaagaaacccataaagacagaaaccccaaaccccactgaatgactctctcaagtatgccyacgctcccttttcttgaatgtgtactttgccctttgcaataaatctcaataaatctctgttcttttactattttctgactcttccttgaatttcttgaaagaattcttatcttctcaatggtgtcaagagcctggacaccaggtggggtggaggtctcactggcgtttggggacctcccccagcccactggtatcacttctgctagcctcatactccctctcacaacataagcctgaactcgcaggccctattcctcctgtctttggtcccctacaggaaagagtgactctcaggacagagactcgttatgaatcacactgggacttctgggtggtgggccacaaaccaggtctttcaaaggactccgtcagaactttctttgtgcagggcctattaactacttcttcactgatgccaagagagtgagaagagcttaaagaggtatttcaggttctctgggagcagaggaaacatgttccactctatcccatgcagcatatcctatactattatctctctcagagcaactgaaatggaacagtgagagacagtagcatattttcattgcttttctctacaaattttactttgcaccaagctggcttttacattgtgatcagctggtgcttttttttttttaatgaaaaaatgtttttcacaaacactactacrgtatgatgtgagttttacgggctgaagaagtttgcttccatacatacaacaaccagattagcaatgggacagagatagctatagggaaaacatgcttctgtgatggaaatcatacagacttttaataagaatcctgcctttcataaaacaactcattctcatgggctgcgagttcagatgcacttgtaaggctcttagctggtaagaaccctgaacttggtagatccaacttcagatttcttccacttcacaggaagaaaaaggaagcatggcttttctcttggagtagttaggaaataaggatatatcccactacccattccctacagctacataaaaaagacctttttctggttacttttcagcacctggtgaatccccctgctcccccgccgtgaagacatagttccctcaagttcccrtttaccagttaccagtgttagatgcattgttttgagctgcagggctcttgcatagactaatgaagagaagcatcttcctttgctctttctccaaggctggggtgggggtgaggggaatgaggaaagaggtagacatagaattccatgaaatttaaatccccagtaggtatgcaaaggtagaatcaacttagagctctgcgcagaggcacctttcacagagggttgcgacaaagcccttcctttgaggcactcacacctgtggctggtggagtggcctgaggcagcactgggtgaaatcacatgcagctgaaccatcatgatgggctccctacaagccaacggcaggggcaagattttaggaattttacaacttcctgggcttgtggatccccttgcacttcctgatgccagctgcgtcctgggataccctctccatggtctcccagtcctaagtccaggggtttctggaatattctgtgacagtcagtcttttcttttgatgagatggcaaagccgtcttcccttccctttgcctgcaggtgccctggcactgtggctaaactgtgcgttgaatgttgtgccattgattataccggagaaacaggcacttgcgctgacaggtgattactgtttagtcacaaagtcagagctccaagcctgaggacatttatcttcaggacaagtgagctgaggcagagcacccaaatcctcaccctgcagctacttctgaggttattctcttcccaaagacattattggatcaaaataacttattaagcactcgtttaaaaaataaatttatattttatgaaccacaacagtgcctatacatatttgaaaatactagtgcatataggtacaacccatttattctctctatatggtgcacagaatgattcatgagcctcttggaatcactgtgcagctctgagggtgggataattcctatttttgctcctccctggaacgcctggttctggttctctatggtttgcctattctttagggaagggactgaggtagcaagcagtaagcaagcttgggccagtgacctaaactatttaaggttaattgcattttctgtctcatcatcgatatccatgggcaggagaggagctttattttaacccatcatggatgaggttaatcccaggctctctggcatgcagcatcctgatgagagaagccaagatgcagaaagctccactcattaggctccactttattcaatcctgcttacttgtgaggcacacaagcacctcacaagcaagtgcaaacgaagtagagtctagcagagggtaagagtgattccaacttcctcctggctacatgctatgaccttggttcrcaatctgttaaagggtagctggccttggtttcacgggcccttagagaaggcagaggtaaaatggagggattacagaaagtgggcacccgtagcccaaagtacaagagtccagaggtggaagaaagccacactgatactaggcaccctggaggaagggcaacagttgaacgagttgtccttggaggcctgccggggaagaaacaggcaccagggatgggatggcatcttagcctgcattctagcttaactatatatatttaaatttcttgtaggccaaagacttccttgctttccttccatgccttttagtggtgtgagggcatgagtggcatgccgatgtctgccaggttccagagcagatgctgtgtaaaagcactttaatgttacagaggaacagccacagtaggtcatcttctcagggccatggcattagtgagctgagcagaaaagtgtgaattaatttctggggtgcagtccctgcctctatggtcacatgctacacccagcccagctttctgaggcagagggagggtgtggggcacaagtgctaacagcagaacctcagattccctaacttcagcaccttctttacactttctttgaagggagggaacccctgctgagctcttggcccaggagctcacttttcctgcttagtcgtaaaccaatgaaatctgtccaggaactgctgaggctgcagctagaagagcagccagctcactctgggagaagattaagaaagctcattccagggggaaatgcagagacgtccatctgcaagcaatactctcttgagtagcaggtcaccacaaatgtggcagggccatagctcacccctacccaggtactcccttctgtttcctactctcagaactcagccatcaggctgggaagaacagggcccaagcaggctctggtatctagactacaatgccaggaggctgctgtggggccacgtaaccatgtggctcctggaggagtggtgaggccccaaagtggagggaaatcagagctcagaaggagaaaggatcagtgcttcttagccactgttctcaccaaatccttaaatacagcaacttctttgccccaacaactcccttctacatgcaaattgagagctggggtgattttcatgaagccacacagatatctctaggttcagatgccaggtgcagtgctgcagggagccctgttggcagtcctcacttgggtcagagaactggctttgctcatcgccacatggtgtgacacgcaggatgtgcacrtggggtggggaaatcacattcagtctggaacatggaggtcaccgtgcgcaaggaaatgtcatgggagggaggactaagtgttctgtcagcacagatggcccaaagcagactcaacaagggcaattaagaccctctgagcagaacttcaaacctgctgttgtacagcttgtaagagcarggctaacaagagggccagtcttattgagatatcagtggtgatgcttcaagagacaaggtgtctcatttctatatgaaatctttgtaccctgtgaagtgtctggaaagaaaaagaaaaacagagccaggtctgaagaaaagcagacaactcgttcatctttcttatctttggagaagccacttttacaagtaaggtgactcttaaaagcatcactgcatcttgctattgattgaataaattttagttgtatttttccaaccagtgctgaatatctcagtggactagtcatgtcacagctgcagaactactggaaactcagccaggcttgttaggaaaaaactcattgctttgtatttgtgaagctcatattctctttctctattctctgtctctctctctctcttctctttctctctcacacttataccccccgatccccactcccaacacacacacacattctctaatacagctgcacttctcatacaacgctgcttcaaataacttgtaaagaaaatctagaatttggggaaagatcgacttccccttgctccaaccctaaggacagtttgacaactcattttattgctgcttttttctttttttttttgcaaaagacaaatgcatgtttggcaaaatctgggaatttctggggttttagggagtatcctggatggccagggtcaggagaaatatgataaactcactggtcctcataactctttgattatttccctcctcttcacaaaaaaattgtttactggccagtgccaacatatgtgatggatcctgaggtagacacatttcattagcaaacaggtcaggatctttgagtcctgagtgcagtctgggtgcagtttccttttcaactctcctatcaggttacttatgttccttagaagttgaggcacagggagcagaaaggggaggagctctgggaaggcaaaggctttgagaacsagcactaagtagacttagagtcaaggccctggtctgccacttctcagcttgtgatctcagacccatcccttaatgtactcaagcttcagcttccttatctctaaaacagagttaatcttacatctaaggatgactgtggggctaaaatcaagacacaaaatatacataaaaaccctgtgagttttcgtgccaacttcctcagcctcttgagacctcttcttcctccaggatggatggacttgaatgcacaaggcctcagcaatgagtcaatgcactcaaggaacagaagcctgtcctccctggacaagaatgcatgaatggatcttggctacatgtccaccttgtagtgtccccaagatctgggagtggctaccattttggaaatatgcccaaagtggctcttaaagtacaaatctgcgtcttcttcttacccaaggctatttttttcctgatcagaagagtagaaaatttcaaatatatgtaatcaaaccaaatcccctcagaagcctggcagcctctartcagtgccacagagacaaaggcagagcttctgtgacaggctcctgacatgctccctagaaaggaggagctgaataaggggaataagatatgacacaattccaatagacactataccttttaatgccttggctttaattagaataaaaagaaaaaaagcatttggcaaaatatatttcaagaaattaactcagcgtcctgatctctctcaaaaaacagaacaggttccctctgtagttaaacctatgggagctacctgtagcattagactcttccccctgggattccccagggcactgcacaacaggatattgacagataaatgagagagggatgggcaagtagggcccacagctctctgactgaagccccaacttccccagagcatgcccagtcacacacagctgctggcatcctatcccaggaccagacaagtcattttcactgcttctcctgagaaggacagccagggcctcccttgaaagccccttgtcacagcaaacagaactctgaagaagagttccatggtctgccttgatctgtggtcccactagaggaacaaaagccacgtttatgcctcccttcccagcactgagtagaaacaacctcactggaacaacaatagtgagagtcccaggagaggagtgagacagctggggcccagagccagacagatgggtggagagacagtttcctgtacaaataccgaggcctaggaaagcagcaggacaaaccccgaatcttccaatagtggttgtcccactggtggaggagaagaggagaaggaggcaagataggaggcagacagctagctcactcagaaggctgactttccttaataaacagcaaattaggaagcataccatactccggaccattggttctcacacctgagtccacctcagaatcacctggagggcttgttaaaatacagattgctgggccccgcccctaaagtttctagttcataggtctgctgtggggcctgggaattggcatttctaacaagttcccaggtgatgctgctgttgctggtctggggattactggcatctgatggtcttgtagctcttgaagccaagattacagggataagggaaagagaagcagatatttgacctctgtcacaatccaactctgttagcacaaaccccactttcattaaccttccacgttttcatataacaagagtaccaacttcagagcattagactgtgagttaaatattacagagaaacactgcttcttcctaccaggtttttaaattctgcctttcatgacagtgggcagctacccaactctggcttgcaagttcgagtccccaattaccatttattttcaatggctaactagctcaaaactcactgcacttttgctatgaactagatcatcagaaaataaagccagcagttatcatcaaactcaatccggggaaagaactccccttctcaccccagatctgctgtcagtgacagggagtctgttccagaacatgtcctatcctggcctttgggctctcttgtctaggaggcggggctggaaggtgccccagtacctcatcctgctgtctcctccctacatctacgctccttgaggctccttagtcagaattctgtcttggctgtcaagaccagccttctcctttctctccttttcctgagagaggatccagctgcccctccatggagggttggggtgggtataggaaatatgctctgagcatgtagttccatgccaaggaggcaagtcctccatgttcaactttggcagggagtttggggcaggagggaagcgatgggagtaagaaaaggcacattctgactgtgatctcttgggcaggtcattttccctttctgtgcctcagtttctctatctgcaaataatctcatgtcctcttatgtgctcaaaatcctctgattctgttattagtcaatcaaagtaataacatcccaggtccatcttctaaacaaggatttaaaacagtttttttttctttaaaaaggataatcgggtagctttaacaggtagatgtttattgctagtgtaattaatctaaaaaactcagggccattgctcaaagtaaatggaaagagtaactaaacagaatccattcaattttagaaactgcctctagcaggcctgacacagtgaacaccattatgtgaaactattatcctgctagagtctggtcattttacattccactgtgagcgatggaaaagtcccattagatcatctaatgcccgcctccagcctcataaaatgaggatcgttgcaagatcttctcagagtggatcctcaggctaataccagcctctgtccttcccaggcccactatttcctaaactataacccaggcagcagcgggactgctggatttctatatgcgagggctttaggcgtgacagtctggctggggtgagggtggggaataaagatttatttgtatgatcttgtgtataagattgagaactcttcaactgtccagataaagaagggataggaactgacagagatggaaaggggctgataaagtgtcccttgcaacctcatctcacttaaccagaggcagagcctctgaaacgtggctgaggcagaagctgyggatgtgctttcagacaagtaccattgggtccctcaacttgttagtttcctgaaggttctcccacatgtggtatttcagtggctgagcagcaacagatgtcttttggtctataaataattcttggggccaggcgtggtggctcccgcctgtaatcccagccctttcgggggacaaggagagcagattatctgaggtcaggagtttgagactagcctggccaaaatggtgaaaccccatctctactaaaaatacaaaaacaaattagccgggtgtggtggcgggtgcttgtaatcccagctacttgggaggctgaggcaggagagctgcttgaacccgagaggcagaggttgcagtgagccgagatcgtgccattgcaactccagcccgggcggcaagagtgaaactctgtctcaaataagtaataaacaaataaataattcttgggcttggaaatgtatgtcttaatgtgcactgggggtagggtgggaatgaccaggtccccagagcatcaggaagaaccatggtccaggctttgcagtgtgatagagagagcaaacagaggaggcaagttttctggaagtgtgtgactgctccttcttcagtttttggtcaagaagagtaggggtgagtggaggggaggcaggaaccttgagcccagcggctccctgaggcctctggcgcatccctgtcatcttctgtgcctctgcacattggttgggatattactgctgaaaaaaatcttaacatctgctgccaactgaatattgtgttatttgaaggccaaaaagtggatggaaaaccattgggaaaaacactcaattcagtgtgtatctactgagggtctaatctgagcaaggcactacctgagctatctcaaggctgcagagacacgcggtttagacatacctgaaaaagtgacttgggaaaagccatcttttctctgatctcatgatatgcactgcctgtactgcttagctgtcctaatgctaaccttcccatgtttaattccactctcctctccattactgggagagacagaagcatggtgtccagtgtttgcattcatggttcacagcccagtgccctgtacatgatcctcaagaagtatttgtgggtttttgtttctgttttgagacagggtcttgctctgttgctgaggctcaggctggagtacagtggcacaatcaccgctcactgtagccttgacctcctgggctcaagcgatcctcctacctcagcctcagaatagctggaatcacaggcatgcgccaccacacccagttaatttttaaagtttctgaagaggggggtctccctatgttgcccaggctggtcttgaactcctgggctcaaggggtccttctgccttggcctcccaatgtgctgggattacagccatgagccaccacgcccggccaagaagtatttgttgattaattactaaatgactatgaccaggctaattacctgatgagctcctccttcctgagtcttcaactcctaatacccagtgagatcagtgtaggaaagaacagaggatcaaactggggtaagggtattcctggagatggtatccctgtccaaatcagagtctagcttaactctagacattcacttcagaatcggtctgctgggttctgccttttatctagtttgctgattctaactacataggctgtacttgggaagggagggaaggggaagaagctgactgagacaagggggtcccagcctcaactccagaaagatgccgacagtacagcccggttctaaagtaacttcttatacaaccaacacagtaaaggcaagtaaaatggctttgcttccaggaagatcgctaactgggtccttgccattggaaagggaattaaaagctcaatgctggaaaaaactaataattacatttgcttaattatattgatgtgaacctcatagccaagttatttttaggaaattgatgctaaaaaatactgccatgctcttggggtcatgtggagcaggatttaggatgtttttaacttttggaaattatcaaatgcctttctataggaaagtgttacatttctaagatttttctctttacagtttttctgatgctttgcctgtctttctaaaatacatcctgacacctagacaaaatggcataggatcattgggcttcagatcaatgggtgataaatgataacatagaattggctgccagccttatcatttgtcacaggtcagattccttagaaaataaactccgggacagagtttagcatgaaggatgtttattaagaagtgctcttcggccaggcgtggaggctcatgcctgtaatcccagcactttgggaggtggatcacttgaagccgggagttcaagaccagcctggctaacatggcaaaaccctgtctctactaaaaataaagaaattagctgggcgtgatggtacgtgcctgtaattccagctactagggaggctgaggcaggagaatcgcttgaacttgggaggctgaggttgcagtgagccaagatcgcgccactgcactctgcactccagcctgggtgacagagtgagacactgtctcaaaaaaaaaaaaaaaaaaagtgctcctgggaacaacatccatggaaaagagggggagaaagctggagtgagcagagggagaagctgagctgccacgtgggcctagtgttgacttggttggaccatggggagatctggagccagaggggccctttagagttgtttcaagtttagccaagatagccaagtcttttataagcttgtctcaagcggtaactgaatgttgaccactgccaacaggacccctagtggggacctgggtggagtattagcctccatcacaccactcttgacagaaaccccaaatcataactaccatttcttaagagcctaccatgtgcaggctgggagcggtggctcatacctgtaatcccagcactttgggaggccatcctggctaacacggtgaaactctgtctctactaaaaacacaaaaaattagccgggtgcggtggcgggcgcttgtagtcccagctactcgggaggctgaggcaggagaatggtgtcaacccagaaggcagagcttgcagtgagccgagatcgcgccactggcaatctggcctgggcgaaagagcgagactccgtctcaaaaaaaaaaaaaaaaaaaagcctaccatgtgcaaagcattctacaaacattatctctaatgctaacaacaatctcacaaggaaagtttctattaaccccattttataaagagaaacaaaggctcagtgaggttaaatgacatgcctaagacaacacaactagtatatgggactcaaatccacgctgccttgctccaaagctcacattctttccaaacgctagactcttattttttgattttctcatatagctgctgyagaagcaacctacagctccatccttctatgcagctttgggttgcctttatagtcctctgactatatttataaattggtagctatgcacatatatacagcccattgcttgaattcttttctgaactctttggattccttagacctgggcactattggcctgcttcaaccagaacaccactcctgttgaaaacagtatagaggctgggcttctccaagaaggtacacaaagagggaaagcctcaaaatttaacagaaaccagtaacttagccaacaatatttgaagattatgaagcaaaaaatgagcagcatttaaagccagatttctttttagatttttttttcttaatgacaccatgctcatccttaatagattaattaatttatttttggagacagagtctcaccctgtcacccaggctggagtgcagtggcacgatcttgactcagtgcaacctccgcctcctaggttgaaggaattctccaacctcagcctcccgagtagctgggattacaagcatgcaccaccacatccggctaattttttttttttttgtatttttagtagagatggagtttccccatgttggcctggcaggtctcgaacccctgacctcaggtgatccgcctgcctcggcctcccaaagtgctaggattacaggtgtgtgagccactgtgcccagccaatagatttattttttgatcagaacatttctgaatttctatatcctggagattaaatatcagtggataaccaatcccaaatcccccagatgggggagctgatgaggcaggtgccagggataacatgaaaggttatatacaacctctctatattccccaaaggctgttattaatcttgttcttcctttccacactccagatctccctaatcttcagcatgacatgcatgtgccaaaagaagtcatcagttcaagacaagaaaagctgctgcctcagtaaaaagatgcaccattgacaagttcatttggctctgtgggtttttctccccaggtagagtgtcttatagttgttctctggggtgctcttttttattaattaatgtatatatttatttttatctttttgagataggttctcactctgtcacccaggctggagtgtcgtggcacaatcatggctccctgtagccttgaactcctgagctcaattgatcctcctacctcagccccctgggtagctgtgactacaggtatgtgccaacaggcccagctaatgttggtttgtttttttgtagagacgggttttcagcatgttgcctaggctggtctcaaactcctgggcgcaagtgatccacttacctcagcctcccaaagtgctgggattacaggtgtgagccactgtgccaggctggggtgctctttttcatttgtcagagakgcttagaaaagcaccaggcgcggtggctcatgtgctcccagcgctttgggaggcaaggcaggcggatcaccttaggtcaggagtttgggaccagcctggccaacagggtgaaaccctgtgtctactaaaaatacaaaaattagccaggcttggtagcgggtgcctgtaatcccagccacctgtggggctgcggagagacaatcacttgaacctgggaggcagaggttgcggtgaacccagatggagccactgcactccggagcctgggcgacagggcaaaactctgtctcaaaacaaacaacaacaacgacaaaagatgctttaaaaagtgcgtggcatcagactgtgcaagatgcagtcaatgaacagtttctggggcagcctcctcagtgcattcaagtcatccctgcactccaagaaagtaatggggccctatttcttgtgcccattcttcccgcccagggagactctagagatgagaaatgatagaatgattcccttgactatccattaattagaaagtgaaccttatttttgggaaggggagattatctcccaaattacaatgggatgatagctgttataagagaggtatgtacaaggtacaggggtagtttggtgggagtgagaccatcatgtctagagcatgttctaggaatttcaaataactgccttggtacaaggacgtcggttgcagatcaatatggagaggtaaacaaatgccacatggtgaagggctgtgtataccatgctaagaactagtcgggaaatcactgtaacaatacaggtgagctataataggcaataagataagggcagtgaggataaaaattaaatcaatatttaggtggcagaataaatagtatttaagtgaccaatttgaagaggggcgtgaatgagaattaggaatggaggataattagcaaggaggctgggagaacaggttgaaaagctatctttaaatcgagtattatcacaatgactttggtgaatgggtcattaatattttcagggctctgactactgaattaattaaggaaataattaagatttcttagatcagccattgcattgatttctttttagagcacactgttttggcaaaccctatgttttaaaaaaatgtttgttagaatacattatcttcttgtaggtaccaaggttgaagtcaattatcaaagcatagaaatcatgtttgggccaggcagagtggcttacacctgtaatctcagcactttgggaggccaagaagcggattgcttgagcccagcagttggagaccagcctgagcaacatggtgaaaccccatctctacaaaaaatacaaaaaattagccaggtgtggtaacgtgtgcctgtagtcccagctacccaggaggctgaggtgggaggatcgctgtgttgcccacrttggggtgtagtgactgatcatagcttactgcagccacaaactcctgggcttatgtgatcctgccacccagcctcttgagtagctagcactacaggtgggtgtgtgccaccatgcctggctacttgtacatttctttaaagcaagttttagatgctcttttctgagcttccatagcattctggacataaccctgtcaatatgttgtatctgcttctcaatatgttgtaattatctgtaagttatcatggagagctgggtgggtggaatagggactttgtcttactccttctggtatgcccacttcttgaaatatggtgggcacttaaaaaataaatcttgacagcataaaagctgcaaaaataaaagtagtaaattatgtctagcaaataccattctaagtgcttttttcagactggccagcagaactgaaactaattctgcacagaaaactaagggcgggggggcgttgctcctgtgagctcagctgcacctaaacactaactttgagttgtatactggtgatcattttcataagaaagtgggtcaattccagacatgaaatacatctgaagacgtagtccatcagcaggagcctttggaggcaatattttcttacctctaagattcttattcaagaaatatattaagagaattactgatgctcatatttattgtcaaattagccatgacagctgcaaaatgttttcattttaagttgaatccccaaagcttcatttgcattttctctaacttaaggatattgttagaaaaagccaggcttgctggtataggggtagagggagaggaaggaagaagatatttcatctttggttcttctgagttgaattaaatattttaagttaatcatctctgatctgtcattaggggagttgtccatatgctttttacaaattatgactgctaggaattcataattaaagaatgtatgaaggtcaagaatatggaatttcaactaatgtctgaaatgatggcctcaaagacaagagtccctcagacatctgccccctccctctcctagagcagtctagtacaaggactgctgctgagctgcaagcatttccaaatgcagcaacaccgaaactcattatagttttaacagcttgcttttcagagtctatgggactttgacaatccaaacttaggtctgcttaatggaatggctttgctttagaaaacagattttgtggagggttttataaccctcttctcccaaaaaatgcatttaaccttactcatctggaacaatggaagacagcaamagacagggagaaggctgggattagtatttagtgatatcttaattttaaatgtttacagtgaaatgaaattcttgttactatcaatgacaacacataagagtcaaaatataaatgagtcatgaataattaggtattaatcataacacataatatactgtcatgaatactaatgttccataaaagagaatatttcttttttgagacagagtcttgctctgtcacccaggctgcagtgcagtggtaccaccttggctcactgcaatctccacctcccgggctcaagagagcctcctatctcagccccccaagtaactgggactttaggcgtgtgccaccaggcccagctaattattgtattttttgtagagatggggttttgccggctgggcacggtggctcactcctgtaatcccagcactttgggaggccgaggtgggcaaatcacctgaggtcgggagttcaagaccagcctgaccaacatgaagaaaccctgtctctaccaaaaatacaaaattagctgggtgtggtggcgcacacctgtaatcccagctactcgggaggctgaggaagacagaattgcttgaacccaggaagtggaggttgcagttagccgagattgtgccattgcactccagcctgggcaacaacagtgaaactgtatctcaaaaaaaaagaaaagaaaaaagagacagggttttgccatgttgcccagactggtctcaaactcctagactcaagtgatcctcctgccttggtctcctaaagtgttgggattacaggcgagagccattgctcctggccgtaagagagtactttaatattaaggattaagtaggcccagaactgtaagaccttggatatttcatgatacttttaactcacctctgtactgggtagaatagtgtcccccaaaattcatgttcacacagaaccttagaatgtgaccttatttggaaataaagtctttgcagatgtaattagttaagatgaggccatactggattagggtagacctaaatccagttattggttccttataagaagaccatgaagagacatagacacacacagagggaagacagaggcagaggtcagaatgatgtagtaacaagcaaggaatggcaaggattgccagcaaccactagcagctgggaagaagcaaggaagaattcttccctagagtctccagagggagaatgtctctgctgacaccttgatttcaaacttctagtttccagaactatgacagaataaatttgttgtttcaagccagtttgtgattgctatggcagccctagaaaatgaatacaacctctccttcagggcaaaagttccacaytgtccatgaagtctttccttaccaaatctggccattgtgacccctctttctacttagagcaaagcagactttgttattttgcacttggggctctccatgattggtcatttacttatcttttcagtrccatatcccatcggccactgccttagtccttttctgttgcttataacagaatatctgaaactgggtaatttataaagaaaggaaatttatttcttacaattatggaggctgagaagtccaaggttaaggcactgcatctggcaagagccttcttgctggtgggaactctatagagtcctgaagtgccacagggcatcacatgatcatggggcagagtgggctaatgtgctcggctcagatctgtcttcctcttctaagaaagccaccagttccattcccatgataacccattaatccattaaccctttaatctattaacgcattaagccattcaggagggcagagcccttacaaatcccatcaccacttaaaaggacccacttcttttgtttttgagacggagttttcactcttgttgcccaggctggagtgcagtggcgcaatctctgctcactgcaacctccacctcccgaactcccgggttcaagtgattctcttgcctcagcttcctgagtagctgagattacaggtgtgagccgccacgaccagctaattttttttttcgagatggagtctcactgtgttgcccaggctggagtgcagtagcatgatcttggctcactgcaactttcacctcctgggttcaagcgattctcctgcctcagcctcccaagtagctgggactacaggcacccgctaccggctgggttccttggagtctgtcccacgcatacatagttaaarggtcagtcagatatttgggcaggatttatgcacagaatttggggcttcccatttgcctctctcctttctggaattttcctcctcattttccagctgctgtggctatcccaagctgtggcctctgtgggtttgatagaaactgtgggtttctataagtttatttatttwttttttttttttttgatagagggggggtttcaccatgctgcccaggctggtctcctcctgagttcacgtgatctgcccaccttagccttccaaagtgctgggattacagscatgtgccatagcgcccggcaggtttctatgagtttatatgacaccagataggacatctccttaatctaaaagccattaaaaaatgggaaacttacccactgccatttccttcttccaagggtagaccctacactaccctgcctactttttattatgctccagtggcattaggtggttgctttttatattttattcaacatttacacttatctgtgggagagttggttcaataggaagtgcttggtcattataggaagtaaagactcccttcattaaaaatgtcattttttttaaataaaaaattttcctgaacccaaagaactagaaagaatactaaacaaaagccaaagtcacggtcagttgtaggcagaggagaactgatttaaattactactgaggacatttcaatcttttttaaaatatgaaattacttttacttgttacagtggaatatcattatgaatgaagtaggtcctgggtacctgagcctgttatatgattgccaagccctcatcctatgccaacataggacactcatacaaaaacaccacatggaacttcttggacacacaactgcatgcatcccactgtaaatgtactgaagtgtaatataacctttgtgaagatttcttaggcatatggacgggagggcacattgcaccatagaaagcaaaactctgccccctgccccccagatcttttaaaaatgtcttccccaggtggtggctcacctgtaatcccagcactttgggaggccaaggcaggtggatcacgaggtcaggagttcaagaccagcctggccaagacggtgaaaccctgtctctactaaaaatacaagaattagctgggcatggtggcatgtgcctgtaatcccagctacttgggaggctgagacacagaactgcttaaacccgggaggcggaggctgtagtgagccgagattgcaccactgcactccagcctgggcaacagagcgagactctgtctcaaaaaaaaaaaaaaattccccaaagtctcacttcctctgacagcacccaaatctctcctcctcttggcttccctcttccagtcctatccaggtcctttgctctcttatctctctcttcttttaaaggcaaagctcttgactgttctaaatctgcagctgtatctatttctctgcttatcacagcaaaggcagcatggttagccatgcaactacaggattcttcttcctcagtgtgtatgtgtgtgcgtgtatagcatgactgtaaatacttataagttaatagttttctcctgtttatatacgcatgtacacgaggaaataacataggctggaaagggatatcgttcaggctggcagagtctgagcactaactatgtgccatgtactttatttacacacattatttctaattttatttttcagatgagaaaattcagccttagagctactgttcattctctttccactacaacacacagcctctggggtatctctaacataataatgtaaaatgcattagaaaacatgaaggatatgtctgggagtcttaggggagggaaaggaagtagaggattgggttgtcttgtgttcaggagagaaggtttgggatctgggtcgttgagggaagaagtttaatgaaagagttctgctagatggggcagtgggttcccaggatggaagggggtctccactttcactttgctctcttctgtccccctgctccctacatggtggtcacatggcctcctctgtgctcctcaaacacttcaagctcattctaaaagacagacacattctgaatgatgacctggttaatttatttactagtgttagttaaagtagatactttggaagtctggtaggcaacttcagtctttagaacaccaggtaacaccatttctagcattaaactacttctctcagtttactcataagctggaaaagtacaagcttttaaattcccgtacaccttgtcaatttgaggtgaactggttcaaaagaaaaaggaacctacagaaatgtctacttttaaagttatcacttgaatagaatttaatgaatactagtgcttaagcaacttctgtttcattgtataatatcctttaaaatctaaatttcctggcataaatgttttggatgcttcacttttagccagcattacacagcggtggctgctagatatttaccttgagtgtgagagtatatgtgaagaatattagctaggaaatagacttcttggtagattacaaaaagctgtgcatggctatacaatttccatttattctgttttccaaactccatatatttaaaagctatcacctctcaatttcatgctgataactttgagtttggcaaaagttgacagttaaaactatcttcctatagtgtttgggtatggctttataaaaagcaatttacaaaagaaaatccatttgaaattttaaatttaatttcaaaatgatggtttttataatccctggttttaaggaggttgcaaggaatggaaagacatgagaaacaaaaagaagaatgaagaaagaaagaaagacggagagggcaaggggatgaatggttgcatcatggaccgaggtgaggacaatcagaaaggcagggaggaatgccacacccagggagacagcacaggtgcactttatatcagacagagtgtgtagaggcctgggaaagctttagttttcataaattcaatctcccttattgctgaagcagaggcagctgggatacaggaagattaactgataactcaaaccctactacatttcaaacccctccagtacttaaaccttttatcccagatgttagtaaaagctaacgagtagccaagctggcaatttttaataactatccttgggcttattctcccacaggtgtagatcctgaataagaggggtagggagagaaggataaagaaagctgatgttggctgagtgctaactctgtgtcaggtactgtgttaagcactgtgcatgtattctttaatcatcacaacaaccttatgaggtaggtaccacaatcccgcccacttaaaaaagggaaaatcaaagtacagagaaagyaggcaaacttgcttagtaagtgactgagctgggaattgaacccaagcagtttaattatagaacctgaatatataatcattgtgccatatggcattttccaaaataacaaaaaataaccaagttgacaggataaaagggattgaaagtgtattgtactctaatatatggctgctgcctgggaaactgttaggatatagtggtagaagtctggagtcctcttcagtgtacatttctgccacccaccattacttgtaagcatgggggaagaaaaaaacctacctgaaaccatcctttcttctaaattcaaatttgaataagttaaagaattaaaaatctgtttggatttttgacatgttcattccattatattaaaatttctattaaatgtcaaatcctccttgtggggaacatttcggtaatttggtggttgaatcatgtagcaattacaagcctaacttataaaacagtttccataaggagggcatatttttttccaaagtatgtataaatacacacacataccaatactccctcactctatataagataccttaaagccaagttcccatttttcaggttctatttatatgcaaccagttctaagaattctccgaaaaggacaggcctgtactgtcccctaactaacatctgtcagaagaaaactcctcatccatttttcaggcatgacccactttgagggttcagattctgtgatgagtcacatgcaaatcttctaagaaccttgatgggttgcaaatgagatgaaaatgaaaatgaccaaaatgttcagagtcaaccaccttagtttctctttcctatttgccatctgtccacagctcattaagttcaaatcatatttttgtgagtaagaatctagaatttggggacctcttcatgggacacttctgcttcacagacatacaggccaaaagaagcactaagcaggcttcagggctccatggttagtaggcaaagcctgcagggaaagagctcagcaagggtcaccaatggggacacctcaggcacccaaacttaccactttggtggcctgtgtggatgactgggaaaggccctgcaaagcccctgcaaggttccctgacatccctagcagtaactgtgagcttcttactccttcccttcccctcagtcccatccactaccatctatgctcactgtccacatgggttccccttcacaatgggatgggctttccatcccttttaaaaatctgtcttagggccctcataactttccacccagtgatataattattcacaaacatattctacttcctactaaactgtgagctcccttcaggtagaacctacatccaattcccctttctggaactcatggagtcttgctgatagatgctcaaaaaaacactgaattaaacaaatggtcctagaagccagtctctgaaagtcctgcttggtagcaactacaggatgagatgggcaccatatcagcctcaaaatgttcattccttgtacgacactagagttgttgcatcattccacatagccaatggtgttttttgtaagttggctttgtgtactccccagtgtcttacaggtgaagcagtccaattaggcaatgattgtttaaacacacattaatcatgcattaggagtcctaaattgaataacacaatatccaggaaaataccctggacacaaggcatccattacagacagaagtgatctctcaaktcgtgctgcatacatatttggagagtaagtgcacttcagggagttctgctaacttaaaaaaaaaaggatgaaagaagaagacatttgcatgctgcatggagattccaaggcttgggaagggcacacgtgtcaggcagccaggagctctggaacttgcattggtcatcacaattatgcctcagtttcttgaactgcttccttcttccttcttggtatgcaggaaggctagaggttgtcctacactgcatctgggcaggctctggttacaaattcaggcccactgctcagtggtctcagccctcctagctgaggtactggtggaatggtgcagcctctgaagaaacccattcagatctctgccctagaggccatgtgtattagatgtgcttctgtacaaccgggaaggtggataggtgaasgaaggagtagggtgtgaccaaggagggacatatgcctcctttaatgagatcctaaattcaatcctattttcctcaataaaaagggagcaggccattgtctggggaggaaaattggtttcatgctttaaaacacgcattcacatagacaaacagccatgcttaaactacgatagactgaaagctgatgacaagtccttggggatgatgattctatagtctctcttcagctacctcaggcatacttggaaatacatttgcattcacacccattcctgtgggcagggatgcattaagagagacaccgactgagcctctcttaacctcagtttcacctgcagctcctaaataatgtgggcagaggccaagcgttcccattcaatggatctgagtccccagagtgagctyagcttgggacctggcatcctgagatgatgaagagaattttgacaataaggcacagctgggacatccttaccagcgacagcaaaccccagattctaaaatggtttactccagctgccttgctcagtgctattttaataaccggagaggctggctgtttaacagttgaatgcttcccctgccatcattttggtactttgattacaggcaaagtgacactgacttttaacaacagggatatatagtcttcaatataatgccccttatatcaatggaggatgattaatcttggtttcttccctcgaaatgcggtgtgagaccagataacaaaattcaggtgggccagtcagaagatctacagaggaaatgatcaaatcaggtaattagcatatgcatcacctgaaacatttatcatttctctgttttgagaacataaaaatctgttcttctaccattagaaaatatacaataaatagtgccaggcgtggtggctcacacctataatcccagcactttgggaggccaaggtgggcagatcagaaggtcaggagatcgagaccatcctggctaatacggtgaaaccctgtctgtactgaaaatacaaaaaaaattacccgggcatggtggcgggcacctgtagtcccagctactcgggaggctgaggcaggagaatggtgtgaacccaggaggcggcacttgcagtgagccaagatcgcgccactgcactccagcctgggccacagggtgagactccatctcaaaaaaaaaaaaaagaaaagaaaatatataataaattgctgttgattgtagttgccctataatgctatagaacactagaactataatgaaaaatattttataaagaaaataattcatagtgctcttagacttcaaataccaaacagattatgctctggataattaagaatggattactgaattccccacacaccagataatatgtgtgaaagtaagtcatgcacagtacagtggtataactgtattagatgttattgtcctttaatgcttttgagccttaaactgctgtattagcaaactacttaggatagctcttgtttgttgtgatgagtgatgctcagcaaggctgaagggacaattcacatgccatcaaccaaaaacaaccttacattaaacaaggacttgcctgctacttttctgaaaatgaacgaacaacaacacaagacaaattctcccctgaccaggcctctcttacatcttgggtggaaggctaaacctgctaaggggacacatttttttgggcccgagtctgtatgtgcatgtgtgtgtgtgtgtgtgttgtgtgtgtgtgtgtgtgtctgtgtgtgtgtgtgtgtgtgtgtgtgtgtgtgtgtgtgtttcagagttgccatgtggtcaaactgccatagactgtcccatccaagctgaacaagtagctctcctaggaggggtaaaaaacaaacaacgatctgctcagcacagcgagcaacttcctcaccaggtgggaaaatctggacctgcctcataatgattttctgtcatgccccacataagcaaatgctgcactaaatatacatcccaaatacattctatcagggagctggagcaacaccagtatttatgctcaggctaatgttctattacagggattatactcaactgaaataaaatgaatattctctagcacaacccaattgttctttatacagtttttaatgagattccgcccagtgtcacagcagtacttatgtaattactctatataactctgccagcaagaagggaatgaaatctccttatcagggtattgcaaaccaataacacctcagcagccagtctctttccatgcgctgctgcattttggatagtctgggagcacggccatcatgcagagggaacgcttgggtgaccaaggcttcagcactgcagactcgcttccaggaatgaacactgcactttcttgagatttcccaagaaaacatatgaaaagaaagcgagcctgcagcttctgagctgtgtcctcttcaattgggatgttcaaaggggcatgtgtggccagtatgcagccatgcggtcagcacgcagcttttgtcagaggctgctgaaggcagctttgctggaactctggaataatccacccaggaagggaagtgaatgggagaagaggcagatgcagatgaaaaattatttgtttggctccttgaggaaaactgtaagtcagcagaaagcagaattgagaaaaaaagtgcagctgagaaagaggctaatctggtcctgagaaattatctaaattaggaagatagcctctgccatccactgctgaagaaccccagaagccaggggctagacctcgagcagttccactaaggctttgtcctgtggtcctaagaatgactttttctctactggtaattccgctttagatgtgataggagccttgagctgccccaggggctatgaaatccaagagcacagcacagggacttcccctctaccccaatgtccagtgaaggaattcagtcagaaggacttagcagcatagtcttggtatctgctaaagagttctcagggctttcccaggggagcaaaactgcacagattctgcaaggtaaaacatggaggaaggacaggaccattgcatcacaaagtccttgctggctgctttctgggattttctctggtagcatccccatccctcaagcatggctcaatccttggtggtggagatgggtgggagagggagcagaattaggaagcaagcatcactcctactccacaaccaaaagaaaatcagcaatgagaagaaggcttggtcagatagcaacaggaaaacataaatgaagaatcactactgttatggcctacattgtagacattgttctttacagtcagaccatatcgctcactaagccttgttgcagaactaggagaactatggtagatccttctttgatctttaccacagctatccctcacaaccacttccctcacaacaataaaaacctcacaccttagctataatttacactcctgtgccaacagagagtgataacaggtttccacaaggtwcttgtcatctgttacctccatgggtggtattatttgcacttaattgtgttaatagttaagactctagtaataaaaataaccttcaaaaggtattctcagctatgatgtgactttacagccttagacacaaaattcatggagaccagtaggatgggtattcttcctactttataaatgaagaaaaaataactcacagatgttaaatgactgcctgaagtttatggcacagtttaaactggttcccaggtttcttgatccttacccaagtcctcattctatgaaaaagttctgtgctacctgggtagaatgatcattacaagagaaatctgccagagctgagctgcacgtgagggaaagcaagmtacctggccaagccctgtcgatgcccagattcaattaaatatcatcaggaaagggctattcagtttgtgcatttctcatctcttctgctctcacgctttccctgggggctggcacagaactgcacagactgtgattcaggacgttcttctgggccagagatgcttctgcctgtttgcttacccaggagacgaaggcctgctggagggctgagacccaaagcagatgggcaagctcatcactgcactgggtactgtcctggcccacaaaggcaccatgtgatagtgactcaaaggttatatttacagaccccaaattattcagtgcctgtatatgcttccctacttcaaatgtaggggatgagtgacaggacaaagtgagagctgggtggccaaagtaagatgagtaatagtgaagggcaggcataaagatgactctcacccaacaccatcccaaaatgtgtaggtgataatgtgtgcgaggggaaaggggttgactcatcctggtttgccatatctgaacaacaagtatgacattttacttagcatttccatagcatctctttctacagagcttggcgcttgccacatccaccttctcttggcctgatgaaatacccttgtttaacaggggatcagagggagcaatccatgccctttaataagactgtccctatcatcctgcaaagcctcagatgaaatctaccttacatgagataagtgatataaagtgctacagtgcttagtacagcacctagcactcttygtttaacagctatttcttgtatgtgctagatgatatgctgagcattttacatagtaaataatcagaaaatggaagctattataataattattatctaaagggagtatgcctcctgttcctacatgctcccattgcaaatcaagctccttttgattgtggaacacaggagaaaaaaatgtcattttactgtttatgtgagtaaatttatttgcctttgatgtatcttgctaaaataaaatttgtcctcagccttaggtacactgtaaatgcatatgaagtaacaagaattttctcaaagtctcaactctttaacacggtctctcctttgtgcacagggatgtaaccaaaaagctaaacacagggcactcctcacccttggaaagtcacttcccaacatggtacccaaagagacatcttgaaagagacatgcacagttatgtgctccctctccagggaacagtcttctccagtggatgtgaaacaggctgtggcagctgcttagtatcattagaccaagggcaagtcacctgctctctcaggcttaaaataaagttatcatctcaagccaaaaatactcagcatttggccaataaaagaaagccaatgaaggcccagttatcacaagggatttcttattgatgagatttctacagtgaataactgaaagtgtgatttgtatgcatgtatggcattatggagaagttgatgaaagccaactgctttgtgaaaagggccattttgtgtgtgtgtgtgtagatcagcaaaccatcaaacctgaataagtttgtttttgttaagcacacaatttcttaatacatttcataagcaatcaacctctgagtgaagaacattagcctccaataaaagaacaaattattcttctatatgttccatgttttccaatgaactgtctctattctggttataatcaagtaaaaggcacccacttcagagatttttttttttttagggcatggtccttggctatacaagagaaccaaaatgttttcagagtttcagatgataactgaggatccatttggggttctggttttttggtggaagtttaccacaggtaagacaaaaacataaggctaagtaactagtacatgcaaacaaggaccacttataaaatcactcatagctgtacttattcaagccctggataaaaagggaaggctcatactcactatttcgactaataatttgaatatgattctatcacacttagagtagatccatttccagcctaatgcttggttttctctaatcttgtttattcttaattgacacaataatctttaggcaggataaggtattttctctcataaatttataaacctttacaaaagaaattactttgcggaaattacttcaaatgtcaagtaagtcaaggaacttaatcttggaattatgtttctatttttaatgttttaatccagacacagctttttttccctaagtctcctcaagtattgaaggtactaaatcagctctcatacaaacagctcttcagaagggaaataattggaattttcttcctcatttagttcttttaaattcaactactttgagggaagatataaaaataaataaataaaatcaaattgattaaaatacacatgatgtgagacgactttttttttgctctagtgttcaacatcttaattagaaacacctgctcaattaagaaaamtagattgaatggagaaatctcaaaaagtcattcagtctatgaccctgctcttgggtcacgggttaactaaagcatctctaaaatgtaattgcctatattagtgtttcttaatcaactttgcaacactccaaggcattaaacaaaatgaattttaaatcattttacttgttaaagctgctcatatgtacgtgtgtccatccagaaaggctggaaatgatgagttcatgaatttcagaagaagtaaagcaaggaggggattactgatgttcattgatagctggccattggttagacaacttaatgattgggccttttctcttttgtctctacaaagttgactgtactgcaatcccatttcttccaattctatcatctatgaaaatgaagatttaccatcatctaccttttatttattcttttatagataatatccacaggtagttawgtcagcctttttaaagggagtatcttcccctatcatccctttaaaaaactgatttatataacgttttataatttgcaaagtacatattcacaaaaatcctcagaaatttaaaaattattcttaaccttgtttacagatgtgagaactgagtgaggtcatgtgtcacctattaaaatatttgtgataatttctttctttctttttttttctttttgagttggagtctggctctgtcacccaggctggagtacagtggtgagatcttggctccctgcaacctctacctcccaagttcaaacaattctcctgccttagcctcccaagtaactgggattacaggtgcccaccaccatgcctgactaattttttgtatttttagtagagacaggatttcaccatgttggccaggctggtatcaaactcctgacctcaagtgatccacctgcttttggtctcccaaagtgctgggattatgggtgtgagccattaagcccagcctctgataatttctagttagttaggtggctagaaaatgttgagccaggggctcaagcccaggctttcaatttctaatctttggttctctccactgttctgtattagcctctcagaaggtattcagacatttgtattacctgatttagtttttctcagtgcttttaagccatgcagccccaaactaaagtaacactccagtaatgtgcagtgaaagcattatcacttttattttgaatgttgtgctcttgacagtcttttaaaagagcctctttcattgattattaattcaactaccagtctgcttttattcttaatcatttttcctgtgtttccttgttgctagcaagcaagtcagtatscttgcatacttacttaatttactcttcctccttaacacacagaccacttactgagtctttactgtgggcgagacactatgcttatgtcattttcacataactccacaaggtatatatcattaacctattttgcaaatgaacaacctgaggctcagaaaggtcaagtgtgtgtaacctattatttttttgaatatatctaagagaatctgaattttgtctttcaggtttttcttggtcttayttatgatacagtgtataytccccttttcttaattaaagaagcactaaatgtcattccaaataatgactcatttgtgcatacactaggacccagaatataagataagctgcccatgtagtttcatggctaacacagtggtcagcacacaggtgctgaataatgtactgagagctgctcatgcctttgaggaccatgccttagagtaccattgatggactgaaaatataagaaaaaacaatctagaaagaaaaaaaaatgaaaaaggcaaaagacagaagagaaagaagggggagatggttctgtagcctctgaagtaaatttttgtttttttgtttttttgtttttgaaacaaggtctcactctgtcgcccaggagcgcagtggcaacatcacaatcacgatcgtggctcattgcagcctctacctctggggctcaggtgatctgcccacctcagcctcctgagtaactgggactacaggtgtgtgtcaccatgtctggctatttttttgtaatttttttcgagacagggttttgccatgttgtccaagttggtctcgaattcctggactcaagcaatctgctcacctccgctgggagaccttggcctctcaaagtyctggggttacaggcgtgagccaccctgcccagctggtaaatgctttttaaaaggaagattcattgctttacattctatactcaagttcttattagtactcctattgcttgagctcctgttctttcccgtgtggtggtctctatggctatgtcacaaaggtggtgacagactccttagaaacagaaacaaacaagtattcaactgtgtgcatctctgctggccatttgtgtcattccagcccacacctggcatacaaacaacactgacatcaactctcttatgcatcctctgaagggagctgaaaaaaagccttctcaagccttaacacaaagactaaacttccctcccccacagattactgtgctttcttacaaattcaaacaacctctagtgaataattatttaagaagtctctctccttggacctcatagctcactgcctcaattcctctaaacagagccatctgttagccaaggactcaacatcaaaacattctttgatgagtcacaattaatgacaagtacaatgtgagtactgccagaatgataaatttaacactactcaaatattcatcatggactaaataaagagccttttaggtttcgaagacgaaatattttaaggtttataaagctgcttggctttaaaaataaaccaaatacagtcctggtagttcccaagaaatcaaatggatctgaggtagtgttagcaaagctgacattatgcgcctgaaaataatcataatttagattttaatagtcgatatgaatattttaatagctgatttagattttaatagctgcaactatagaagtcaggtgagcacaatgaactgactgggagatgagacacaagaactctgactctagctgggacaccaactactttacatccctagaccagatgattaccaaagtcccttccagggctaatactccatcactctgtgaatatatgatttagaaacatgcctaccttttggattcaaagaggactccactgacaatattttttgtgttaagattactgacatctgagatttttttttcctagacatttttgcttgttaaaagactagcaaattcaatgagtgaatttggtcaatatttcttttcccttttaacgggcctattgctcattgatactactgaaagggcaagttatttgcatccacacgctaaattttctcagtaaaatgatgatgatgatgataattttttgagacggagtttcgctcttgttgcccaggatggagtgcaatggtgcgatctcggctcaacgcaacctccacctcctgggttcaagcaattctcctgcctcagcctcccaagtagctgggattacagacatgcgccaccatgcccagctaattttgttttgttttgtttttttgagacggagtctcgctctgtcgcccaggctggagtgcagtggcacaatctcggctcactgcaaactccgcctctagggttcatgccattctcctgcctcagcctcccaagtagctgggactacaggcgcccaccaccacacccggctaatttattttttgtttatttaagtctcactctgtcacccaggctgcagtgcagtggcgcgatcttggctcactgcaagctctgcctcccgggttcatgccgttctcctgcctcagcctcccgagtagctgggactacaggtgcctgccaccacacctggctaattttttgtatatttagtagagacggggtttcactgtatccgtcaggatggtctcgatctcccgacctcatgatctgcccgcctcggcctcccaaagtgctgggattacaggcgtgagccacagtgcctggcctaattttgtgttttcagtagagacagggtttctccatgttggtcaggttcgtctcaagctcccgacctcaggtgatccgcctgcctcagcctcccaaagtgctgggattacaggcgtgagccaccgtgcctggtctaaaatgattattttttaaaaatgagatccatataatgaaaaccaacagttctccttaggtctgtttcgcaatcagtaaaagataaataagaaatagctcagcaataatgagcagtagaaaaacaaatgtaatttaaaatctgagtcccattttatggcttaaagctgagtagcaaaagtagacaaattgaagtctaatcttgtatttgaaaaaaacctaaactacatagaactgtggctttaaaagcatttgtgaagagaaagcaggaaagatctaaaattgacaccctaacatcacaattaaaagaactagaaaagcaagagcaaacatattcaaaagctagcagaaggcaagaaataactaagatcagagcagaactgaaggaaatagagacacaaaaaaatccttcaaaaaatcaatgaatccaggagctggttttttgaaaagatcaacaaaattgatagactgctagcaagactaataaagaagaaaagagagaagaatcaaatagatgcaataaaaaatgacaaaggggatatcaccaccgatctcacagaaatacaaactaccatcacagaatactataaacacctctacgcaaataaactagaaaatctagaagaaatggagaaattcctcgacacatacactctcccaagactaaaccaggaagaagttgaatctctgaatagaccaataacaggagctgaaattgaggcaataattaatagcttaccaaccaaaaaaagtccaggaccagatggatttgcagccgaattctaccagaggtacaaggaggaactggtaccattccttctgaaacaattccaatcaatagaaaaagagggaatcctccctaactcattttatgaggtcagcatcatcctgataccaaagcctggcggagacacaacaaaaaaagagaattttagaccaataatcttgatgaatattgatgcaaaaatcctcagtaaaatactggcaaaccgaatccagcatcacatcaaaaagcttatccaccatgatcaagtgggcttcatccctgggatgcaaggctggttcaacatatgaaaatcaataaacgtaatccagcatataaacagaaccaaagacaaaaaccacatgattatctcaatagatgcagaaaaggcctttgacaaaattcaacaacccttcatgctaaaaactctcaataaattaggtattgatgggatgtatctcaaaataataagagctatctatgacaaacccacagccaatatcatactgaatggacaaaaactggaagcattccctttgaaaactggcataagacagggatgccctctcttaccactcctattcaacatagtgttggaagttctggccagggcaatcaggcaggagaaggaaataaagggcattcaattaggaaaagaggaagtcaaattgtccctgtttgcagatgacatgattgtatatctacaaaaccccaccatctcagcccaaaatctccttaagctgataagcaacttcagcaaagtctcaggatacaaaatcaatgtgcaaaaatcacaagcattcttaaacaccaataacagacaaacagagagccaaatcatgagtgaactcccattcacaattgcttcaaagagaataaaatacctaggaatccaacttacaagggacgtgaaggacctcttcaaggagaactacaaaccactgttcaatgaaataaaagaggacacaaacaaatggaagaacattccatgctcatgggtaggaagaatcagtatcgtgaaaatggccatactgcccaaggtaatttatggattcaatgccatccccatcaagctaccaatgactttcttcacagaattggaaaaaactactttaaagttcatatggaaccaaaacagagcccgcattgccaagtcaatcctaagccaaaagaacaaagctggaggcatcacactacctgacttcaaactatactacaaggctacagtaacaaaatcagcatggtactggtatcaaaacagagatatagaccaatggaacagaacagagccctcagaaataatgccgcatatctacaactgtctgatctttgacaaacctgagaaaaacaagcaatggggaaaggattccctatttaatagatggtggtgggaaaactggctagccatatgcagaaagctgaaactggatcgcttccttacaccttatagaaaaattaattcaagatggattaaagacttacatgttagacctaaaaccataaaaaccctagaagaaaacgtaggcaataccattcaggatataggcatgggcaaggacttcatgtctaaaacaccaaaagcaatggcaacaaaagccaaaattgacaaatgggatctaattaaactaaagagcttctgcacagcaaaagaaaccaccatcagagtgaacaggcaacctacagaatgggagaaaagttttgcaacctactcatctgacaaagggctaatatccagaatctacaatgaactcaaacaaatttacaagaataaaacaaacaaccccatcaaaaagtgggcaaaggatatgaacagacacttctcaaaagaagacatttatgcagctaaaaaacacatgaaaaaatgctcatcatcactggccatcagagaaatgcaaatcaaaaccacaatgagataccatctcatgccagttagaatggctatcattaaaaagtcaggaaacaacaggtgctggagaggatgtggagaaataggaacacttttacactgttggtgggactgtaaactagttcaaccattgtggaagacagtgtggcaattcctcagggatctagaactagaaataccatttgacccagccatcccattactgggtatattcccaaaggattataaatcatgctgctataaagacacatgcacacgtatgtttattgcggcattattcacaatagcaaagacttggaaccaacccaaatgtccaacaatgatagactggattaagaacatttggcacatatacaccatgaaatactatgcagccataaaaatgatgagttcatgcactttgtagggacatggatgaagctggaaaccatcattctcagcaaactattgcaaggacaaaaaaccaaacaccagacgttctcactcacaggtgggaattgaacaatgagaacacatggacacaggaaggggaacatcacacaccagggactgttgtggggttaggggagggcggagggatagcattaggtgatatacctaatgctaaatgacgagttaatgggtgcagcacaccaacatggcacatgtatacatatataacaaacctgcacattgtgcacatgtaccctaaaacttaaagtataataataataataaaaagaatatcactagaaaataaaataaaataaaataaaataaaagcatttgtgaatgcaacttttgttataatcatagattaaggtgatgattcactgggtatagatcaactttaaaaagaccaatcacaagggatttaagaaatggcacactagtgggtcagactcaatcaaaagtccttataaatataataattcagtgatgcctttttccgtgttcatttctgtgataactaatccttttgtggctattttcctgaactttttttcttttttcaagcatgaaaacaacatagcattaaatattgaaataagtgaggccaggcacagtgggtcatgcctgtaatcccagccctttgagccatgattgtgccactgcactccagcctgggcaacagagtgagaccctgtttcaaacaaacaaacaaacaaacaaaaaaaaaaacaaaagaaaagaaaaagaaaaatgagtgctcataatgacagaatcctgatgtaacaaggcttttttttaattttggcatattagattttggcctctttcacatgttaatgctttttcttatgtgtaagcatgcacatattcagaatcctgccctcaatggagaaaagatattacctaaaagccaattccagatgatgacaattttcttgtgaccttgcattctgcctagtcttatattctcaagtattgacaacattgtgatttatgactgaagtccttccataccattgctttgggtcttgtctagaagaggcaaccttggattactaaataaatgaaaacacaatgacttatagcccacagttcagaagactcggagttggcaaacttaccatgactgtaggcaaaagactgcaggagaactaagtataattagggttgctgtgaaataaagggcaagcaaagaaagaggatatgactgagctatggtttggattgaagggaagtctccaaaaaagtatactgagggaactcacctagtatggaaaaggatagagcatggcctggggactcagtactttttaaattgacagggattccagcgatatttagcttataacccttattaatgaaagatgcacaaaagcaaatacagagtacagaggcagggcttgaaggaacgggcagagacttttcctgattcttctctatatttactgcattctatctcctgagagttaaaaacaactaygatcattcactttgatgacctgtcaaaaccatctgatgtgcactaggatgatatctgccttttactgatgacgtgtcagggactgtacatacactgcgcctaactttgcaaagcaagtcttattactgtatttctagtttatgattgaagaagctaagaaataaagaggtcaagtaaattaccaggatttcacatagctaatgtgtctaggttgggatttgaatccaggtatgtgtaacaagtaagactgcacctaatttcccaccatgccaccctctaaaagatgccatgcaaaattaatcttttaaaaagtcttttttttttttttttttttttgagacagagtttcactcttgttgcccaggctggtgtgcaatggcacaatctccgctcaccacaacctctgcctcccaggttcaagcgattctcctgcctcagcctcccaagtagctgggattacaggcatgcaccaccacacccagctaattttgtacttttagtagagacgaggtttctccatgttgtcaggctggtctcgaactcctgacctcaggtgatccgcccaccttggcctcccaaagtgctgggattacaggcgtgagccaccgcacccggcctaaaaagtcattttttaagatccaaagaagcacatatgagggtagtattaatatgctaagtatggctatcaggaactatataatcccagctcagtttaggtaatatttttccacaaatgttaatgaaagtgcctgctgcatgcaaagcactggaccttgaggcaggaagatataaaagtcacaattcttgccttttaagagtttatcatctgggctgggtgcggtgacttacgcctgtcaccccagcactttgggaggctgaggtgggcagatcacttgtcaggagttcgagaccagcctgaccaacgtggtgaaaccgcatctctaataaaaatacaaaagttagccggggcgtggtggtgcatgcctgtagtcccagctacttgggaggctgaggtgggagaatcacttgaacccaggaggcgaaggttgcagtgagaggagatctcatgccgttgcagtccagcctgggagacagagtgagaccctgtctctaaaaaaacaaaacaaacaaacaaagtttaccatctaactgggcaggataggaaaaaagtaacaatagggataattaactgcttaaaacaagaataaacataatattacaaaggaatacatgattaattgccaaaccaatcatatttaagactaagaaaagggagagattacatggtctggaagggtttaggaagactccatagaagagaaggagggatgaggctgatttttagggattgatagaatctagacagggagaaaagtagtactggattccaagaggagaaatggggaacaaaaacaccagaaagaaagccttttgctyagagccaaaggtttagaacatgaatggttgtgaggtagctggaaaggcaggttagagaccaagcactggagactttgaagggtaggttaagtaaattagatttaattccttgggcaatggtgattcagaaatgtttctgagcaagggagtcacatgatccaagtggtgttctaggatgatttttccagcagtaggttgcagaaagtttacagaggggcaggaagaacagttaggagttgcctataggagcatcccagaaacagagaaacagaagcagagagaaagaaaaggaagatatttcagtttcattctgatgctatagatttagaaagacatggacttgcttctggctggagctggtttaattaaatgtaaatttggaaaataaagcacaaataactttggatagatgcatagttcaattaaaaattatttggatttacagttttgtgtcattttacagattatacagcactttcagaaatatataaacatatataatcatatatatatacacataaatatataaacatatatatatatatatgtttgggatggagcctcgctctgtcgcccaggctggagtacagtggcacgatctcacctcactacaacctccacctcccgggttcaagcaatacttctgcctcagcctccggagtagctgggactataggcatgtgccaccacgcctggctaatttttgtatttttagtagagacagggtttcaccatactggccaggctggtctcaaactcctgatctcatgatctgcccacctcgacctcccaaagtgctaggcttataggcatgagccaccgcacccagaccactttcagaaatattaattcatttatctgcataacatcctataaggtaaagtttggcattatttccatttttcaaatgttgaaactgaggtttaaagacctgtggtaactaacacgaggctgcactgttagtacattttaagattgagacctgtatataatgggcttctgattctatatttcatgcatttcctatttttttttggtctgagtaatatctttaaatttttttttaaattttactttaagttctggaatacatgtgcagaatgtgcaggttatataggtatacatgtgtcatgatggtttgctgcacctatcaacccatcatctagattttaagccccacatgtattaggtatttgtcctaatgctctccctccccttgcccccaacccctcgacaggccctggtgtgtgatgttcccctccctgtgtccatgtgttttcattgttcaactcccacttatgagtgagaacaatgcatttcctatttaccacactgatctgaaaaaaaaaaaaaggaagatttttttccattttaggaaatcatcatttttagttttttcatggaatattttaaacatacacaaaagtgtatgaactcccacatacttatcatccagcttcaacaatgataaactcacaactaatcttatctttatctcatctgtaccccaaccgcccccaattacttgacgcaaatcccccacatcatgtcataatccttttaaatagaaggcctaggtgatatttttaagaagaattcaaaattggttgtattccttgccaatggagtatttcctatctttagcttcaattgaaaagctgaggtagatgtatgctgtcctgcagagcattcctattcgtaccaagatgtgagaagttgaagagcaaaataattgaccctttttctcagaagaatttcctgggaatttcatttttttcaagctacctctgaaatgaaaagtgaaatatatttcttttgttctcctgactcctattctgtgtgtttcttttttccaagctggaaagatgacagtcattaattgtacataaggtgcttgcagctttcctaaaggtggtttaaatagaatgccttgtatctatctactttattctactatgtatgaacgtgtatggaatatatgccgggtgttttattggctagtctaaaggaaattgtttttctttctgtaatttgagggaaaaacacattcctatgtttaacaagcttttccttcattgcaaaatgactgcttttgctaaggacactatcatttcacaatcatttattctcacattgcttagggaaaaaaatacctagaattttaaagttagtaacggaaagacactgaaaaaaatctttattttcacaaaaatcctatgttgttattttattctgaatttctgcctaattcatagactatgtttcctagagttggacaggactatgggtgaatgtagactgattatatctagaggccttaatactgatttagaggtaagaaaatagtttgttactggcatcccaaaatgaggtttaaattgccttcattctttttttttttttttggagacaggatcttgctctgtcatccaggctggaatgcagtggcacaatcatggctcactgcagcctccaactcctgggctcaactcctgcctcaatctcctgagtagctgggactacaggcgtacaccaccacatccatgtaatttttaaattttttgtagggatggggtcttactatgtggcccagccttgtctcacactcctgggctcaagcgatcctcccacctcagcctcccaaagttttgctgggattacaggcatgagccactatggtccagccatctttattcttcaatcattgagaattttacagccatgcacattcattcattcattcggtcatttatttaacagatatttactcaacacctaccatgcccagttctatgtgtgcttcygagcatataataatgaataagagagatatggtccctctcccatgggtggaacttcttcatataaattggtggaatttctatatataaatattgcaatcttttgattcccaaaaattgtcacatacactcaaaaagactggaagttcttataaaggactccttttaaacatcttagccaataaataacagccctgagaggactgtacatttcctataaccaaatccataagacttgccagacagaacatacgcctttgagggcctatactagttaactggatagtttccttgttaagaagagatgaatgatactattcctctatcctaagattttctggaggtaagaactatactggttataaatgtacttttattggagttacggaattttatttcttctgtgttctggtataagcatcctcttctctcagcaccctgcctctcattatgaaacctgccaactggccacacagaaagtcagccatgagagtgttctggctgagacacaaactgcatttgacaaaatgcaaatcacaaaagggaggatagaagaaaaagtgggaactggattttgtgcttaattttcttcaactactatattgtaatgtgattgatgaactagatggagttctaaaattaaaactagaaccaggtggaagtttcttttaagataaatctctattctcagaaacatcagaagacaacccaggctgctggcctgacactcatggcctagctactgccagcatttcttgacaatttactcttgttaactgctctgcacttctattctttgtctttgaaatgttcctctcccagcattctttggattggaggcagaaaaggcttagaagttgaaagcactgcatcaaatgttttttagtttatgccctctctcgcttcaacatatatggtatctagggtaacatactcttcttggatgtagcattttaccccattatttctttgttgctgttgtcgttgttgagacagtctcgctctgtcacccaggctggagtgcagtggtatgatcttggctcactgcaacctccacctcctgcctcagcctcctgaggagctgggattacaggtgtgtgacagacaccacacttggctaattcttttgtacttttagtagaggcagggtttcgccatgttggccaggctgatctcmaagtcctgccctcgagtgatatgccttggcctcccaaagtgctgggattacaggcgtgagccaccgtacctgccataccccatctatttctgaagttcatttccaagagcatttcttaggtaaatgagacgtctttttctccagcagaatttaattgcactctgtttgggtagcatattatagtaatatgataaaagaaatgagaatgtaaaagatgaaaatttcattggtgagtaagctgatgacaaggtgggaggaaaaaattcaggccctttagaaatttgaattcttgccaggtgtggtggttcacacctgtaatcccaatgctttgggagggcgaggaaggcgaatcacctggccaacatggtgaaaccttgtctctactaaaacaaaacaaaacaaaacaaaacaaaacattgctgggcatggtggcaggactgtaaacccagctactcatcaggctgaggcaggagaatcacttgaacccgggaggtggaggttgcagtgagctgagagcatgccactgcactccagcctggtgacagagtatgactccacctcacaaaaaaacaaaaaacaaaaaacaaaaaccaaaaaaacaaaaaataaaaaattttcaaggtgaagagaagatcattttaaaatatttgttttctgttataaaaataatactatccataaacctgtccctcagagagtacatctgctactattttttcttttgttcaaaaaaatttctgcctggtgcggtggctcaccagcactttgggaggccaagagggcggatcacgaggtcaggagttcaagaccagcctgatcaagatggcgaaaccccatctctactaaaaatacaaaagttagccaggcatggtggcacgcatctgtaatcccagctactcaggaggctgatgcaggagaatcacttgaacccaggaggtggaggttgcatctaaaaaaaaaaaaaaaagagtttctatgcaatagggttgaaatgacattatatgcataattttatatactgtttttaaaacttcgttttttcttctttttttgagtttcactcttgttgcccaggctggagtgcaatggtgcaacctcagctcactgcaacctccatctcccgggttcaagcgattctcctgcctcagcctcccgagtagctgggattacaggcgcccgccaccacgcctggctaattttttgtatttttagtagagacagggtttaaaacttcacatttaaatataaggatttttcagtccaggcatggtggctcatgcctataatcccagctctttgcctgaggtcaggagtttgagaccatcctggccaacatagcaagacctcatctctattaaaaaaatatatatttttatatatttatatacttatatataaatatatatatatataaagattttcagtagaaaatattttaatggtgcttaacctccaaagaaagatacaacaggcactgaatatgcctcagatgtagcagagctcacaccttgttattaagagagttcatagagcatggaagaccaaccaactccatctctctcttatcccctcctgcagcacatcacacaacatcatgtgggatggggttagggaggcctttaaatgcatcaatatattaaaaagcatatataagttattctcctttgggttaaatggaatttgtttgcttggattttcttcaccttactttattgagttttaattaaatatagctgtgaccatagactaatggacaataagatgtggcagggggttagcggttactaatctgatctctcacctgataagaaaacctttctatatctagtagatctggggcatctttgggtgaactataaaaaggtacctcttcctctgggtaaccaatgccaggatacatgatgtagttactgcagcactggctggatttcagccccagttgcccccttggccgggtgcccttgtacaataactaacctatacaactgtacagtcctaatctcagggctatggttttctagcctccacgtgcatgacagagagctcaccacctcatacaggtagtcccattcacctttgaasagttttgtggcaagttcttaataataagtaaggtctcctaggtaacttctagtgtgcaacttctacccactgaccctagctctgctttccgaaggataagagatcaactccacccaggcttctacatgattgcttttcagatatttgatactatcctatcccatgtcttccaagtcttcccttccccaggccgaatatctaattcttatgactggatcatcatatgacttctttctagattttagttaatatccttttcttgtttttcttgttttttttttgagacggagtctcgctctgtcctccaggctggagtgcagtggcgcgatctcggctcactgcaagcactgcctcccgggttcacgccattctcctgcctcagcctcccgagtagctgggactacagacgcccgccaccacgcctggctaattttttgtatttttagtagagacggggtttcaccatgttagccaggatggtctcgatctcctgacctcatgatccgcctgcctcggcctcccaaagtgctgggattacaggcgtgagccaccgcacctggccgattttggttaatatcctagttactttcttgtttgctaatgctaatgtttttttttttttttgagacagagtcttgctctatctcacaggctggagtgcaatggcacgatatctccgctcactggaacctccgcctcccaggttcaagcgattctcctggttcagcctcctgagtagctgggattacaggtgcccaccaccacacccagctagtttttgtatttttagcagagacggggtttcaccatgttggtcaggctggtctcgaactcctgaccccagatgatccacctgccttggcctcccaaagtgttgggattacaggtgtgaaccactgctcctggtcactaatgttctttaagtcagaagatcatattgagcatgatactccaaatatactgcagcattataatacagctattaaatcttaatctaaatgctatattttccttaatacaacccaaacctctatttggttttagagaaacttatataccattggcttatatccaatttgcggatatctagaatgccatttcaaacattctcctactaagtcagkcctcctcaatcttctacttgtacagtttaactgctggaactagatgcaggatttaggcctagtaaatttcttcttgttgattttagcccactgtttcagtatgttaggatcccattgaacatatcaaattaacttttttttttttttgaggttactccaaaagggatcagcttgatcttgaagttactctactgggtggagacaaagaggcactttcaatgcagagtgctaagtggaacagttggaatcagcagtagggtgctatgaaagcacacaagatggtcctctagtgaaagtgagaggcaaggaagaaaactttcccatgagaataaaaatctcaggtgactccttaagggtgaatgagagtttgccaaatgaaaagggtcatggaaagcaatctaggaggtgaacagcttgagcaaggatttgggattacagaaatttctgaatgccaatatcttttagtgtctttccctttttggactcctatccagttgtccagaaattatgtgctgcaggtgctcatttaattctctacttatactcttcctggacaagtttctataggttaaggctgcttgctttttatgccttaggatggtcccattccygcatctaccttcccttttctttctttgagaaagcattggagttagttaactcctacctatactctggcttctgtaagcttttctaagagagggcggtgccttatccattttggtgattctggttcctgacacagtgcttggcacaccataggtatttgacaaatgtttaaagtgttgaaaagcaaaataactattcacaaattctaatatgcataaacaatattctgaaagatacaaccagattcatgtagctctctgacttagacatcacaggaagcctactttgtagccaacagaaatcaaaggcttcctttttaataaaaatgaaacaaaaatttttcaagaatttgttacatgcagatccttttaattgttcaaagcaggttcacagaacactgactggggctcttgtggcttctgacaatcatctcccagagttgttgagcaatttgccaagttgcctgttggctcaaaggtgagaaccccaggctacctaagctctgcccagtgatgcggaattgtctctctcttctaatgtgctcagctggaacagaatcgcagaatgtccagagcagtgaaccatgaggaatgagagcagattagcttagcaaaaagataaactaggcatcgcccaagggacattgacaagtgaggtgacctcatgctttgctctcaaatcagagttctcaaaagtcatctaagctagaatatgccagggaataccagagcttcctattggcagaaagtaggagagataaaactaacaaggaatgaaagatgtaaagaggtatttgcctcaatatctaaattactatttcagaattcaagagccaaaaaagagaaacatctccactatcaataaaacaaacaaacacaaaatagacgaaacataagagaccataagatcacccagcagagatattcttggcaaataaaatgccgggccaatataaaagcaatagagaagaggaaacctgaagggccaataaacacttgaaagatgctggatttcactggtcgtcagcagtgaaaccacaatgagacaccactttacacacaagtgattagcaaatatttaaaactctaacaactcaaggaaaacaataagacgttgctgagagaaatgaaagaaaacctaaacagagggatatatcatgtttataggtttcaagattcaaaattgttaacatgtccattctccccaaattggtctatagagtcaatgcaatctcaattaaaatcccaggaggctttttttgtagaaactagcaaatgaattctaaaattcatgtggcaataaaaggatctagaatatgcaaaacaagtttgcaaaagaagaacaaatttggaggactaatatgatctagattcaagatattataaagctacaataaccaagacagtgtggtactgacacaaagaaagacaaatagatcaacagaacagaataaagagcctataaatagacccacacatgttcattttcaacaaggtgtaaaagggaattcagcagagaaaggaaagccttttaaagaagtggtgctggaacagcgggatatctatgtgctaaaaaaaaaaaaagggagagggagacttcaattcataccttgttccatatattaaaaaaaaaaaaacttaaagtggatcatagaccaaaatgtacaacataaaacaataaaatttatagaagaaaacatttgtaaccttggattaggcaaatacttcttaaatataacaccaaaaacacaacccataaaaaacaaataaatgtctactcataaaataaatggatatattagtctttatcaaaatttaaaactgcttttcaaaagaaactgttgagagaacgacatgacatgccaagaactaggagaaaatctttgcaaagcatttatctgatgaaggacttgcatgtagaataaaaagaaccctcaacattccataaaaaaacaagcaacgcaatttttttaaaaaggcaaaagatttgaacagacactttaacaaagatatatatggatggtgttaggaagagttttaaaaggaagaaagtgagagagaaggcaactcaatggccaaacaggtttatttacaagaataagcctgtgaggcatcccagtcaggaatctggctgagaccctgattgcttacaagctgacgtttttatactaaagtttcttttttttatttttgagacggagttttgctcttgtcgcccaagctggagtgcaatggtgcgatctcggctcactgcaacctctgccttccaggttcaagtgattctcctgcctcagtctcccaagtagctgggattacaggcatgtactaccatgaccaacttttttttttttttcttttgagacagaatcttgctctgttgccaggctggagtgcagtagcgtgatttcagctcactgcaatctccgcctcctgggttcaagtgattctcctgcctcagcctcttgagtagctgggattacaggtgcatgccaccacacccagctaattttttttgcatttttagtagaaacagggtttcaccatgttagccagtctggtcttgaactcctgacctcaggctatacagctgcctcagcctcccaaagcgctgggattacaggtgtgagccactgtgcccagcctcatactaaagtttctataggrgaggggttggggaagtgctagcaggttggaactgcagggggctggggaaggatgtggtaagggccaggctttgttgtggtcagggttgttactctctgttaaggtatgggtgaggttgacctttgctttgtttttggaaacactgtcactaaggtaggaaacacagtcaccaaggtggaaaaatggcatcactattgttaattctcacattcccacctctttgtattattatcatttaggaatagrgatgtagkttctctttgactacttcctgctcactgggggtggtgcatgggggaggtggccttcctctggtgatgaggtcattcattgttgctatagcaggaatgcctccttgatgtgttccgttatggtggtctgagcaactgaggttactctttctaaaataaacttttgaaaamaatttcatcaagcagggtaaaaacattaatattaagcagatgacaatgaaaggaccaattaaagggagtgcccaatggaggaaataactgaaaaagtcagcaggttgtttgggcaggcgttctgcaatttttctgtttggatattccttcttttaccaatctagatttatttgtaaagaaacagcattttcttgcaggaagagaaataggcctccctcttctacagtgaggatatctagtcccctgcgattttggagtactaactgttgctagggagtttatctggtcagcaaaggtcaacctcgcccatacctttaacagacagtaacaaccctgactacaacaaagactgactggcctttaccacatccttcccctgccccctacagtttcaacctgccagcatatccccaacccctccccatagaaactttattataaaaactttattataaaaacctccctatagaaactttattataaaaaaataaatcagggtctcagccagattcctgaccgggaccgcttgcaggcttattcttgtaaataaacctgtttggccgttgagttgccttctctctcacttccttccttttaaaaatcttcctaacagctggcaaataagcagatgagaagcagctcaatatcattagtcattagcaaaatacaaatgagataccaccacaaatacataccattacaaacacaaaagagatacagctactggaatggctaaagtgaaaaagactgaccctrccaagtgttggcaagcatttgtgcaggtactagaactctcatacattgctggtgagaatgtaaacatcataataatggttactaatcagggaaagaagggactgcgattgagttggggtacctgggcagggcttctagagtaggtggcaatgttctatttcatgatcgaggtgatgttcactttataatgattaagacgtacatttggttaacatgattttctgagtctccatgtgtttttgtaatcaaaaagattcacccaggctggagtgcagtggcgcaatattggctcactgcaaccttcacctcccgggttcaagtkattctcctgcctcagcctcccaagtagctgggattacaggtacccaccaccacatccagctagtttttgtatttttagtagagacagggtttcmccattttggccaggctggtctcgaactcctgacctcaggtgatccacccacctcggcttcccaaagtgctgggatgacagacatgaaccaccacacccggccaagttttcttttaaaacaaaaagttctttagcctttactctgttggataaatatagatttttgcatgttaagtttgcttaaaggaagatggaattctactggcaaaatactgtctcctaaatctccagtaagtaagcttgtacttttgaggacaacactatttttggcaatgtagaaaatgcttatagaaagggttcaatttgtggctgggcacagtggctcatgtctttaatctcagcactttgggaggccgaggcgggctgatcacctgaggccagcagttcaagaccagcctggccaacatggcaaaaccccatctctaccaaaaaaatacaaaattagccaagcgtcatggcaggtgcctgtatcccagctactcaggaggctgaggcagaactgcttgaacctgggaggtggagattacagtgagcggagatcacgccattgcactccagcctgggctataagagtgaaactctgtctcaaaaaaaaaaaaaaagggttcaatttgcttcccacagcatgttcgtccacctcctatacctccacactcttataggcagatattgatccatggttattcagatgcaaggaaaggccactagagtccattgttgaggcaagggactgggacttgaactcggtcttataaggcttaaaagtggcagtcttttctgagattcaaaatatgttattcctcatgaattggatgagggtcatggaggaaggccatttggaaataacacatacattactgaccaaaaagaaacatagatagcaatacacaaaactattggatgatttctttctctccagttcaaaagtccaaatgaattgtcatcaggcattagtggagatactctgaatatttttatatattttctgtttcataaagaatttccagaatgattgtgctttacttttacccactgttcttcacaaatgatagaaaagcctgggaagtgtccctgaatggttaaataatgagataaagcagaatgtttcttacttaaaaaaaattaaagaagaagcaacatagaagtcgggcgatgctgtgaaaataaagacttgaagaacaaaaccaactctaattggagaacagagtatttaaggtaaaggaaccaagacatattagattgtagttgaattccaagaccaatgtgctgctcagaatcctagatgttccatttgaattcctcctgtttttgcttcgaaatactagtctataaatctaattgattgtaagtgtgatttccctagatgcttgtttactcgtttaatgtagtattatgttgcttttaataaggtattcaggccctataaagtatgcttccaaaaaaatcaaaagctacacttgagtgcttctctaataaaatctacctctgcttaaatataggtagaacctcaactatgccagcttttctaataggggactgtcccactcctgcagaagtccttcagtaactgagaatgctggtggggtgtggggagatatccttaacatcattgctattagaaagttagtactagggaaaataactcagcatttctaacacaatatcctccattaagccttcaaacaaacatttccttatttacctcctaaagtcttttctgctaccatttaagtcatttgatctttagatgctttcttgcctctgattttaatgagaagctggcccttggttctctttcaatactccctggcttgtggtgctagatctttctactcttgacaccattcttgtctcttgacaattttccctcaattgaaagatatgaaactgagtatcactgaaaatttaaatacccaaaccacacatctgaaatctgattttttttatcttaaagctggtcccagttggaggtagcctaggagaccgaaaatacatgttatttaatgaaggagaatatttcagtaaagttaaagctgggcttattttggccagacacagtgggttgtgggtgctgctcatttttgtgtattcattatacaattgacccttgaacaatgcaggagttagggtactgaccccctcccaccaggtacagtaaaaaatctacctataaaattgtgactcctctaaaacttaactactaacagcttactgtggaccagaaggcttactgataacatagtcaatttaacacagacacacaaacacacacacatacacattttgagacagaatttcactctgttgcccaggctggagtgcagtgatgtgatcgtcactcactgcagcctctgtctcccgggttcaagtgatcttcatgcctcagcctcccaagtagctggggtttcaccatgttggccaggctggtctcaacctcctggcctcaagtgatccatccacattggcttcccaaagtgctgggattacaggcgtgaaccacctcaccttaacacatattttgtatgttgtatgtgtgacatcctgtattcttacaataaattagagaaaaaaaaattattaagaaaaccacaaggaagaggaaatatatttactattcatttagtgtaaatggattatcataaaggtctttatccttgtcttcatgttgagtaggctgaagaggaggaggaaaaggggttggtcttactgtcttgggagtagcagagatggaagaggtagaggaggtggaaggagaggcaggagaagccaacacacttggtgtaactttatggaaatacattgtaatttttgatttttttgctttttcatttctctaaaaatgtttctatatggtaccaattcttcttccaccttttgctttagtttcagtgcccatatcatagaaggatccacatcataaaagaagtcaaaagcattcttgaataattagaaaccttctgctagatggtctcatgtcaatttgctttctggcactgcttcttctacatcttcttcctcattgtttagcactgattcagaagcactcatctccatcgagttgtcttctgtgaaattctcaggtgtggtgtctgttaactcttgcagttctccaagatccatgttttaaacctttaaacctctaccctctcccccacttttctgccatatctacaatctctttcatgatttatttgattagctctgtcataaatcctgtgaagtcacgtacaacacctggatacagttttctccagcaggaatttattacttggagcttgatggctctcatgactttttctataatgatggcatctccaatgctgtaatccttccagactttcatgatgttctctctattggggttctcgtccatagggttgacatccttccatacagttctgtgtgaaatgagccttaaaggtccttatgattccctgacctagaggctgaattagagatgttgtgtttcggggcaagtagaccacttcgatgtctttggtgttgaactcatggggttctgggttgccaggggcattgtctgatatcagaagaactttaaaaggcagtcctttactagcaaggtgcttcttgacatcaaggacaaaacatcaatggaatcaatccagtaaaaggattcttgttgtccaggtcttctttttgtaaaacccaaagcctggcagctggtgttttttttcactttaacgcttgagggttagcagctatacagataaaggcagtcctgatcataaactcaactgcatttgtacaaaacagtagagttagcttatcctttcctgccttaaatcttggtgctcacttccttactaagaagtgtcctttgtggcatttttcccccagaatagggcactttcatctgcattaagaattcaatttttatacttcattaggggagaaatggaactttagcagtcctaccaagaagtttttaaagaacacattgggtctttataaactgtatttttaaagttttttttctaaagatagaaaatgaaaataattacctaaaatagacctctgatatggtttccaaagaacagaaggtatcttttttaaatcagggtatgagacttgctgtaaaatatttattgatgctaatgtgaaccttcagttggaaagaaaaaactaggtagtcacttgcaaactaaatttccccaggtatcttttttccaatctttttttgagatggaatctcatctgtcacccaggctggagtacagtggtgtgatcttggctcactgcaacctccacttcccggggtcaagtgattctcctgcctcagcctcctaagtagctgggattacaggcatgtgccatcacatctggctaatttttgtatttttagtagagatagggtttcactgtgttggtcagactggtctcaaactcctgacctcaagtgatccaccagcctcagcctcccaaagtgttgggattacaggtgtcagccaccatgcctggccccaatcttctaatttttaaagatactctttcccttctctttactctgagatctaatgtatctatacataagcaaactaggtgctttatatacatttttgtcccagccttcagtgtaaaccttaacttaaatcattaatggagacttttctggcaccctaagttgaaaagttataatggggaggctgtgaggattttttttcagcccttggaccattatttacactagtttccttgatctggtttcctcagctataaaaatacagtcctgtctcctccaaaagtctgttatcgccagcaagattcacaactgccaaatcacccaggattttgtatttcatttaagaagtctgacaatgcttttatgcacaatatgatacagccaaaaccacatttacctgggaatcaggaaacctgagctctagtctaaatctagccctaaacaaactgtgcaactgtagctaagttcgttgaccacttggggtctcagcagagaaaacaaaaattttggaatcagaattgaagcaggagagtactaaggtcctccccccatccaccgtctccacctctggctctaaaatgtcatgtcactgtgaaatgctctttcatcttcaggggcctagtgagaggccagggtcccaggcagcaagtgctagagaaaatgtaaggacaatttataaagaagtcccttgatctcagtttccctgaactatgcagctcttcagtctttaaaatggctacaagacacattagcatttcaaacactgctgttgcctgtgacaggtgaactcagggagattaggaagtagcaaaattctgtttttgtttttcttcaagccagaatgggtatgtaagcattaacgttgctattatacatactattcaacattccccattcatttttcatgaacttacacaacatatcaaagggatgatgctctactccttagtgcgtctctcagaattacaggcagactcatttcactctgtcagcaaacctgaaggccagagtcttcagttgtgagaatatcttatgcaaatagaaaaagctttacagaatagtatattcaacccctacccaaacccgcatccccatcttctcctctatacactgcctccggaaacaagsactgtgtgcacaagtcaaacagatacctaagcccccagtggacagcagcttaggcaccagtgggcaggcacagagcaggcagagggtaagcactggagcaggactggattaaggcctccagagctgctccaggcctccatagctcctactacctcaacaatccttgtcacaactgctttcccattcactacagagaaacttacttgagcatctctcttcagatattattgcacagattcacacagaaaaagaaaatcaccacaggagagtttgaaaaagatgatgatgaacgactttgattgtatcccacaggatggaaattaggttgaaagactgggagtttggggtgggcgcagtggctcacgcctgtaatcccaacgccttgggaggccgaggtgggtggatcacttgaggtcaggagttcaagactagcctggccaacatggtgaaatcctgtctctaccaaaaatataaaaattagccaggcatggtggcatacacctgtaatcccagctactcgggaggctgaggtgggagaatcgcttgaacctgggaggtggaggttgcagtgagccgagatcgcgccactgcaccccaaactgggcgacagaacaactctgtctagaaaaaaaaaaaaacaaggccgggcacggtggctcacgcctgtaatttcagcactttgggaggccaaggcaggcagatcacgaggtcaggagatcaagaccatcccggctaacatggtgaaaccccatctctattaaaaatacaaaaaaattagcctggtgtggtggcaggtgcctgtagtcccagctacttgggaggctgaggcagaagaatggcgtgaacctgggaggcggagcttgcagtgagccgagatcggaccactgcatttcagcctgggcaacagagcgagactccgtctcaaaaaaaaaaaaaaaaaaaaaaaagattgggcgtttggaaccatcagttctagttcctactctgcttgtaactgggaagccatgggcaagtcatctggcaactctggaccttagttctctcacttataaaatgagtaggtttgacaagacaatctctagtatatttgtcagatctaaacttctagtagtctatagtaagattactaagaaccaggaaagcatggtttatattataaatcaaacttggctataatatggagaacatttaaatatatagattctgaggccccacccaggacctttacagagtcccttacacaactgactggaccatatgaccaaaggataaggatgagctggctgggtgaacctgtgctggtattcaggaattgacattctgtgcggataagtattcacattaatgaatggagaaatgtctatttaatttgcaaacgatcacaagctagcggggcaaatcagtatttcaaacaaacttagagattgaaggaatggtcagaagccaagagcataaatgtcagagaggaaagatcaaaggtattgcccctggaggagaaagagaaacttcactaagatgaagttagtaaggcatatataccagaaaaagatctgaatgtcagagtagataactgaccaggaatcagaaaattagcagtgggcctgarggaatgcaggaattgactgaggttgtcctcactttgcatggttcttagatgaaagaatgtcagtccccaaacaacagggttgaaatttcagttgccatggtttattaactgtgagtaattacatgaagtacaaacttgattgctagctcttcagttcacaacataaataacagatgtgtatcacgatcagtgacaaatcacgtcacttctttcacagtctgtcggtgactagtcactgtgcatctgttattcagttaatgcacaaacaacaaagtgtgcrgtggggttgcctccttgtcttccaatgatgaaacccaaaaatgataactgaaagagggaactggctaacgaagatgaaaatgcagcaaagtaacaaaaagtggtaacaggaatgtaaatagggttatagaagaaatagctaactgtgagattattgacattgctgctatttaagggactctagatatgcaccagaggaacttagtgaaggcaaactaatcaatgtaaatgaggaaagtggttgtgacgaaacgtatgaagatgtcccagaggaagtgatgctggcaaaaacttcacattaaagaaactcttgcagatatttcatgacactgaaagcacaaagtgtaaaatattggaagctcatccaaacttagaagggagtatgatgacaattcaccaaggcacagaaaagatgttttctcagtatcataaactatatgacaaaaaggaggcaagtactgttaaagtacttgggatttttttttttttataaatacggacatacctggttttattgtgcttcacttcattgtgctttgtagatattgtggggtttttgttttttttttaaataaattcaagatttgtagcaagcctgcattgagcaagtctttcagcaccatttttccaacagcatgtgctcattttgtgtctctgttgcattttgttaattcttgcaatatttcaaactttttcattattatatgttatgttaatctgtgatcagtgatctttgatgttactattgcaattgttttgaggtgccatgaaccacacacatagaagacagtgaacataaccaataaatgtgtgtgtcctaactgctccactgacagggtattcctccatttccctccctctcttcaggctttcctattcccccagacaccacaatatgaggaaattaagccaattaataaccctactacggcctctaagtgttcaagtgaaaggaagagtcacatgtctctaactttaaatcaaaacctagaaatgattaagcttaatgagaaaaacatgttgaaaggccaaaaactaggcatcttgtgccagttagccaagttgtgaatgcaaagaaaaagatcttgatggatattcaaagtgctactccagtgaacacatgaatggtaaagtgaaagagccttcttgctgatatggagaaagttttaatggtctagatagaacagcggtcctcaacctttttggcaccagggaccagttttgtggaagacaatttttccacggaccaggttgcagggggtttcgggacgattccagcacattacagttattgggcactttatttctattattactttttttgtttttttgagacggagtcttgctctgtcacccaagctagagtggtgtgatcttggctcactgtaacctcagcctcctgggttcaagcgattctcctgcctcagcctcccaagtagctgggactataggcatgcatcaccacgcctggctaatttttgtatttttagtagagatggggtttcaccatgctggcaaggctagtctcaaactcctgaccttaagtgatcccacctgcctcggcctcccaacatgctgggattacaggtgtgaaccaccatgcccaacctattattacattgtaatatataatgaaataattataaattcaccataatgtagaatcagtgggagccctgagctgcttgttttcctgcaattatatagtcccatctgggggtcatgggagacagtgacagatcatcaagaactagattctcataaggagcatgcaatccagatccctcatgtgcacagttcacaatggggttcacgctcctatgagaatctaatgctgctgctgatctgacaggaggtggaactcaggtggtaatacaagtgatggggagcggctgtaaatacagatgaagcttctcttgcccccccaccactcacctcctgctgtgtggcctggtctgtggcctgggggttgaggacccctggacagaagatcaaactagccacaacattcccttaagccaaaacctaatacagagcaaggtctccagaattgaggcaagacccttttgcagcaaaaagattactactcactgaaggctcagatggtcattagcactttttttttttttttagcaacgaagtgttttttaaggaaggtatgtgcattgttgttttagacatatgctactgcacaatgaatagactacagtatagtggaaacataagtgttttttttataaggcatgcacttttattcaactggtctcaagtcagtgtacaggtatgccctggctacctccacccactcccaactcccagggagacaaaaagccttcatacatctcaagttgggggacaaaaaagtggggccatgaaagctgatcattcaaaataaaacaaaataaagaagtattaaggcaaagattaaaaaaagttgtattacataatttacatgaaagcaatgctatcacctcccctgtgtggacacgggagaggactgggccattctccttagagagaagtggggtagcttgtaggagggcaaggtacttcctgtaacaacacatctcacgatatttggaatgactattaaaaaaagaacaatgtacaatgaaagtccctggccacactgtagaactctgggggatgctcactccaaccaactgctgtcaccttcaccattccagtttttaaatcctgagtcgagccaaacaaaacaaaacaaaataaaaaaaacaaagtcatgccaatctcatcttgttttctgcgcaagttaggttttgtcaagaaagggtgtaacgcaactaagtcacagtccgcctagaagcatctgcggtggatgatggaggtgcctgactcatcatattcctgcttgctgatccacatctgctggacggtggacagccaggccaggatggagctgccgatccacacggagtacttgcgcttgggaggagcagtgatcttgatcttcattgtgctgggcgccagggtggtgatcttctgcatcctatcggcgatgccagggtacctggtggtgccgccagatagcactgtgttggcatacgggtctttgaggatgtccacatcacacttcatgatggagttgaaggtagtttcatggatgccgcgggattccatgcccaggaaggaaggctggaagagcgcctcagggcagcagaactgcttttgccgatgatgatgacctggccgtcgggcagcttgtagctatctccagggaggagctggaggccaccatggccatctcctgctcgaagtccagggtgacatagcacagcttctccttgatgtcatgcacaatttcccgcttggctgtggcggtgaagatgtagctgtgctaggtgaggaccttcatgaggtagtcagtcaggtcctgaccagccaggcacacacgcaggatggcatgggggagggcatactcttcatagatgggcacagtgtgggtgaccccgtcatcgtagtccatcacgatgtcagtggtaggccagaggtgtacagggacagcacggcctggatggccacgtacatggctggcctgtcgaagatctccaacatgatctgggtcatcttcttgtggttggccttggggctcagggggaccttggtcagcagcatggggtgctccttggcagccacacacagctcgttgtagaaggtgtggtgccagatcttctccatgtcgtcccaggtggtgacaatgtcctgcttgatggggtacttcagggtcaggatgcctctcttgctctggacctcgttgcccacataggagtccttctgacccatgcccaccgtcacgccctggtgtctggggcgccccacaatgaaggggaagatggcccggggtgggcatcgtcacctgcaaagctggccttgcacatgccagagccattgtcgacgacaagcatggtgatatcatcatccatggtgagctggcggcgggtgtggacgggtggcagagaggcgagggcaaggctctgtgctcgcagggtggacacggtctcagcagaaacataagttttatatgcactgggaaaccaaaatatttgtctgactttgcttttttgtgatatttgctttttgcaatagtctggaatcaaacctgcaatatctctgaggtatgcctataaataaaatttcttttctcattatttataatgttttaaattacagcttactaacattagttttactatgttttttcatttctctatacatttataaccaatagaaatagagtttcaaatgttttgacacacatttatgtatcacaaattttctcattgattattaagatcatatagagtcagctagcatggtaatttttggtctcacattagtgtgcaaagcaaaaactacaagtatttaggaacacgaggtgagtttttcactgtactaagtactcatcagatatttctacagcactgggtcctgtttaagctttacagccaaagattgccatggaaaatgaagagaagataataataacaggtaagagactaaaaaaactggccatagaaaaactgtttaaggaacttgatagattttagccactgaaaagacagttgaagtggtaatttaactatggctgatcttcaatgacttttacataagggataccgactagtcattatacatctctatagatgactgaacaaacaaaaaccaattttaactggaacatgatggatttgggttaacttaaaaatgaacttacagtgaaagaggtactatatatcagaacagatttcaaagagagctctgtaattttctttctgcaagtcctaaaatgaaaaattagttcttatccaattagaatggtttaagttttgaaaacaggcaagggaagatggactgtatgacctgtacaggtctctgccagagttaagatgctgtgatttttatcattgtagaactgtattttacccgaagctgccaattatttttgagcactgtacttaaattgttctttgctttgcacattcagctccctttctcccagatcctctccagctaaagggcattagattatggagtggaactctgatgggaaaggaaagctgcagaacaatccttttttctgtgaggctctgtgatggggactgcagtggctttgatgtacgcagctcccacagcatcggtgcatccatacacatgagccctgaatgcctgggacaggtctttgctgctgctgctactgctgctgctgcattctgtgccctcagacagtactgctccagagcacctgcctgggtttgaaatatggatattcattataaaaatccataaattcattgccaaattgggcatattaacaccctcccaggacaaggcatttacagggaggacaaatattgaccttttgatctgtctttggtgctgataattcttgaacattaaactagacagttcttgccacaaaaaatccacaatctcgtctctattaaaaatcatcaggcctaccaggtaagggattgatattttcaaacagggcactgatgtgttctccattctcctgttttctcaactccatttacgtattagctctgctaaactcgaatcttggtccaacattctttggagatggctcaataataaaatctctaacacagcgcagtgtcctagccctgcatccttttactaattagtaggtttccagaagaaaaccatgtgtcagaaaaaatccaaaccctgaatgctgatagctcccaacaagatgaagtatgagagaaacagaaactctttaaactataagttatttgacgataaggtatcttctattaaaaaaatactactaggaatatttgctttctactataattctggctttgaaaataataaagttggctttagaaatagagactacaaatattctccactaatgagtctcacagcagaaatgaaatttgttctttaatcaaacttccagttggagattgttctgagtttgtttttgttttgttttaatctgacgtggagttttagacttgagaattgtctctatagcaaaaatgtaaagtattggttggtggttgggcattcctgaatatgtccaaatatttactgatgagaaggttgtaaattcttttttttttttttgcaagggactggagttttatatttatttttatttttttgagatggagtcttgctctgttgcccaggctggagagccgtggtgcgatatcagctcactgcaacctctgcctctgggttcaaacaattctcctgcctcagcctcctgagtagctgggactacaggtgcatgctactatgcccagctaatttttgtatttttagtagagacagggtttcaccacattggccagactggtctcgaactcctgatctcaggtgacccacctgccttggccgcccaaaacgctgggattacaggtgtgagccgctgcacccggctggactggagttttattattactcaaatcagtctccaattcttattttatttttagagatggggtattcctctgcccaggctggagtacaatggcatggtcattgctcgttgtaacctcaaactcaggctcaagtggtcctcctgtctcagcctcccaaagcactgggattacaggcatgagacaatgggcactttttctttttttgatgtagatgtttattgctacaaactcaccccttagcactgcttttggtgcattccataagttttggtattttgtattctatttttgtctcaagatattttaaaagttcccttttaacttcttgacctatttgttgtttagaagcatgttgtttaatttccatatatttggaaattttctaaaattcctccagttcttaacttctagtttcatactttggtgggcagaaaagatatttgatatgatttcaatcttcttaaactcatttaaatttatttagacttgttttgtgctctaacataatagtttttttgttttgttttgtttttgggatggagtctcattctgttgccaggctggaatgcagtggcacgatctcggctcactgcaacctggaactcccaggttcaagcaattctcctgcctcagcctcccgagtagctgggactacaggtgcgtgccaccatgcccggctaatttttttgtatttttagtagagacaaggtttcaccttgttggccaggttggtctcaatctcttgacctcgtgatccgcccgccttggcctcccaaagtgctggaattacaggcgtgagccactgcatctggccctaatatattatttaccctggagaatgttccatgtgtgctagagaagaatgtatatgatgttgctgctggatgcaatgttctgtatatgtctgttaggtccattcgatgtaaagtacagtttaagtccaatgcttccttattgattttttttgtctggatgaaatgtccattgcttaaagttgggtatcaaagtcccctactattattgtgttgcgatctatctctcccttcaagtcctttaatatttgtttaatatacttaggtgctccagtgttggtgcatctatatgtataattgttatagtctcttgatgaactgacctccttatctttatataatgaccttgtctcattttacagcttttgacttaaagtctattttatctgacataagaatagttactcctgctttcttttgatttctatttgcatggaatatgttttgccgtccttttactttcaatctatgtgtgtccttaatggtgaaatgagtgtcttgtaggaagcatatagttgggtcttgttttttaaattaattcaaccattccatgccttctgattagagaatttaatccatttacattcaaagtaattattgataggtagggacttactattgccattttgttagttgctttctgattgttttgtggatccttttttccttcttctcttgctatcttcctttgtgatttattttctctagtgttaggctttgattccttactttttattttttgtgaatctactataggcttttgttttgtggttaccatgaggcttacacagaacatcttatagttataacaggccattttaaactggtaacaactttgaatgcgtaaaaaaactcaatacttttactctacctgcccctcatattatgcttttactatcaacatttacatctttttatattgtgtattcattaatcaattattatagctattattatttttattttacttttctgagagaaggtctcattctgttgcccagcctggagttcaatggtgcaatactggcctcccaggttcaactgattctcctacctcagcctcctgcgtagctggtactacaggcacatgccaccacacccagctaatttttttattttttggtagagatggggttttaccatgttggccaggctggtctcgaactcctgacctcaagtgatctaccaacctcagccttccaaagtgctaggattaaaggcgtgagccactgcaccctgcgcttagcatttttaaatagttttgcctaaccttcatgctaaagatataagtaacttacacaccgccattacaatattattctgaatttgactgtgtacttacttttaccagtgagtttgtatgttttaatgtttactaattagcatcctcttctttcagcttgaagaactccgttcagccgttttcataagacaagtttggtggtgatgaactccctcagcttttgcttatctgagaaagcctttctctctccttcatttctgaaggacagcttccaggtattcttgttttctcctttagcactttgaatatagtcatccctcagcatctgtggggaattggttccaggaccctttgagaataccaaaatccacagatgctcaagtcccttatataaaacaatatagtatttgcatataacaacatatgcatatcctcccacacattttaaatatctagattactagtagtacctaatacaaagtaaatgctatgtaaatagctgttatgctgtattgtttagggaataatgacaagaaaaaaagtctgtacatgtttagtacagatgtaaccaatgtaggcttaactacatttgtgatccatgattggttaaatccatggatgaagaccctgcagctacaaagggctgaagcctgatttcaaagaggctggcctggtgctggggtgtgcctggagcctgagtttgtgggggcaggctgggtcctaggtccacaggagctggcctggagcatgggtcaccaggagtggtcctggagacatggttcatggagactgtcctggcactggtgtctacaggagtgggtctggaccatgggtctgctgaagcaggtttggattctgggtccactggaggttgggtctatggggaytggcctggagcctggggccagcctggtattagggcaggaatgaagcttggatctgtaggggctggtctggagcctgggatcatgggtactggcatggtacctggaatcctggggactggcctgaagactgggtccatggggatatgcctggaggttaggtctggaggctaggtttttgagggctaatgtaggtcctggagccgtgagagccagcttggaaccttggtccacatggatgttcctagagcctgtgtccatgggttccagcccagtgctggggtctactgggatgagcctggaccctggatctgctagaacagggctgaaccccagagctgctggagtgtagggctgcagaggctcccctacagggtggggtcacgaggatcagcctggcctggagcccgtgtctgaaggtgatggcttggtgcctgaggcctaggcttctgccgtggcactggggcaggcttaaagcctggggttgtgtgggctgacctgcctctgggctgttctggaacctggggtgggcctgcagactaggtctgcaggggctggcctggaggcagggtccactgagcaggcctggagcctggggctgcaggatctagcttggcactgtggtggacttggaagcctagtctgtaggtacaggcctggagtcagggaccatggggcctacccagtgatgggttttactgggacaggcccagtgttgaggaatgaggcaacgtccggtactcactctccttccctcacacagagggtatctttctccatgctgtgctgtctgaggtttggggaagtgtgacgagggtaacgtaaaactgtctttcctgccctcttcaatgtatcttttcttatttctacatgatacctcattgctgtactccctcatctgatttccctagttcttgtgaaggtattttcatgcatggatagttgtttacattgatatttctgtgaggtgatgagtgctataaagttcaatttcaccatctagctgatgttcaaaccctcagtttctctcctatagattcttactgaattgatctgagtggggattgccttttttttttttttaagctcctcagctgatttttttttttttttttttttgtataccagtttgagagccattgttctggaatttgctgctcaaagtgttctgcatgttgaaaatgcagaattttaggctctatcctggatctactgaaagcagaaaccatcttttaacgagatccccagatgattcattttcacattaaagtttgataaacactgctcttgaacagtgtcaaccttggctatatattagaatcatgtggggggcttttaaaaaaatgatacatgcactgatatttctttaaagctttccaatgattaaaacatgaatatcactgaactagaatgtacaaacacaaatatctgctcaggtatactctagtcatgatgagaagaaagaaaagagagaaagtttgaactcccactttcaagaagacagacacaggggacctaccttaacagaagaatgctgctagcaccagaaagaaaatgactcttatgatgataaaggcctgaagggtaactcccaaatttcatttcacaatactctaactactatgcttgtttacggcatctttgctctacctctctaaaaccagccttcattgttgtcctgttctctgcgcactcctctccccaatccacacccaaagattctactcttgagattcctcaagaaaacatatttttgactctagggaacaaaaacggatcaagctcaaaagaaattccccattctgcagtaaggttgcaaaggatatattcttaccaacacattctcttgtggttcatctcattcccttcagggtgcctgctggcaatgacacaggataccagaattgctgatagaacctagtctgtctccataggagaaactgtctccttgcctgttgtctccttgcccctgagctttcttgatgtagttctactaccaaagtgagtggatttttcccctgggcctgatttctattcttaagtttttatattattgaaatctaacagtggcagttgcctccccataatctagacaatgcttgcaaatgatgaaaaggaaacacgtctatctatctctactctctatagaaaaatcagaatgatcatgcacgccacaagaaacaattaacagtttcagtccatatgacttgtgttgtttccaaacaaccacaataaaaccataatgasaacaaaaatatatgttcttcaatgttcatgacattgagatctccggtctacttccagtaggcctcttaaaggcctctttttcctgtcttaaaaaaagttattatatatatttaaggtatacaacatgatgttatattatatatagtaaaatggtcctttgtgtgaggtatttcctacatcacactaaagagactttgttagataatataattaacatcttcaactggttcaatgtggaactaaggtattgtcatcagggatataacgatcatagctgcttacaggtggtatatgatctgaagctatgattccttctccacaaaatggggataaractatcgccttttagttctgctatcaagattaaatgagataatagatacataactttgtaaattgcaaagtggtctacaagatttagatatgcttattattagttggtaggaatgagtgacatatcctggaagacaagtaaagaaatcatttccaggacacagcaaaagtattaaaggacagatgaagttctctgatggcaaatctctgcacaggtgaccaagggttctatttctagtttcctattaaaggtaagaggcaacactagacattgtctttgacattagtttcaagcaagcagactgatcagaggcaatgcatatgtgatccaacactccacagagagggtgtctgtcaattctgtcatgaccattaggctctctaccttattcagtttaagtacatacaaatccctaaactccactgccattcaaactggcagacactaaggcttgagcactaaagggaaaacaaggggtgctttttcagatctaataatggctggccagaggattctatccctggcagcacagctgcttctaccaggaaattgatgagataagcttgtgagatgatggctgatttcacatcaggaagttcagtatgatttgaatgaaagactccgcattccaagactccgccctgccgtgagataggcaggcctatttctatccagctgctctctaccatgcaaaatgacgtcactttctagaacacagacaatctctgggaacaacctgctggcaagcaagcaccaaaacttctggaaaaagaaaataagctgtaatcatcaaatgctagggataggaaacaaacagacgataatttcattcctcagctgttaacactgtttyttctctcttcacaagttgctttcatttttatttttttttcagacggagtctccatctattgcccaggctggagtgtggtggtgtgatctcggctcactgcaacctccacctcccaggttcaagtgattctcctgcctcagcttcctgagtagctgggattacaggtgtgtgccaccacgcctggctaatttttataattttagtagagacaaggctttgacatattggccaggctggtctcgaactcctgacctcaggtgatctgcctgccttggcctcccaaagtgctaggattacaggtgtgagccaccgcactcagcctttaattataagtgtgcagttcagttgtgtcaagtacattcacactgttgtgcgaccaatctccagaactcttcatctagcaaaatcaaaactctacacccatttaaaaacttttttcctagtatgcaattcattattattatagtcaccatgctgtatattcggtctccacaatttacttatgactgcaagtttgttccctcttaccaacatcttcccatttccctacccccacacctgactcctggtaactacttttttactctttttatgcgtttgactttcttagattccacatatgtgagatcatgcagtatttgtctctgacttatttcactcagaataatgccctccagttgcattcatgttgtcacaaatggcaagacttcctcctttttacaggctgggtagtatttcattgtatacacatgtgtgtgtatctatatatgtgaatacacacacacatatacaatggaatatctatatcacagatatatgtgtgatatacagatacacacatacatgatataccattttatatttgtgtgtgtgtatgtatatatatatatatatatatatgccatgcatatatatatatatatatatatatatatatatatatgtgccatgatttctttgtttttgtttttttggagacagcatttcactctgctctgccaccctggctggagtgctcattgcagccccaaactccttgggctcaagccatgcttctgcctcagcttccctagtagctaggactataggcatgcaccatgcccagctattttttatttttttgtagagacagggtcttactatattgcccagggtggtcttgaattcctgagctcaagtgatcctcctgctcagtctcccaaaatgctgagattacaggtgtgagccactgcacctcaccctaccacaatttctttgtccattcttttgtgaatgaacacttaaaagattgtttccatttcttggctattgtgaataacgctgcaatgaacatgagagtgcagacatctcttcaactcatttcctttggatatatgcccagaagtgggattgctggatcacatggtagttctatttttttttttttttcttgagacagagtctcgctgtatcccccaggctggagtgcagtgtcacaatctcggctcaccgcaacctctgcctcccgggttcaagcgattctcatgcttcagcctccagagtagctgggattataggcaagtgccaccacacccagctaatttttgtatttttagtagagacggggttttgccatgttggccaagctgttcttgaactcctgatctcaggtgatccacccaccttggcctcccaaagtgctgggattacaggtgtgatccactgtaccctgtggtagttctattttaaaatttttgaggaacctccatactgattttcaaaatggctatacttttttagtatttggagatagggtctcactctgttgcccaggctggagtgaagtggtgtgaacacagctcagtgcagcctcaacctcctgggctcaagcaatcctcccacctcagccacccaagtagctggaactataggtgcgagccaccatgcccagcctcaaaatggctatactaatttacattcccattaagagtgtacaagggttcccttttctcaccgataacaagtattctcaccaatacttgttatcttttgtctttcttataatagccattctaacgtgtttgaagtgctagctcattgtggttttgatttgtatttccctaatgatcagtgatgttgaacaccttttcatatacttgttgaccatttttatatcttccttggagaaatgtctattcagctcctatgcccatttttaaatcatgttatttgtttttctgttattgagttgtatgagtctcatatattttggatttaatcccttatcagatagacatatggactataaatattttctcccattctgtgggacactttttcattttgttgatggttccctctgctgtgcagaaactttttaatttgatgtagccctacttgtttttgcttttgttgcctgtgtttttagtgtcatattaaaaaaagtattgccaagactaatgtcatggagctttccccctatattttcttctaggatttttatggtttcaggtcttatgtttaaatctttaatccattttgagtttatttttgtgtatggcataagataaagatccaattttattgttttttttttttttgagacaaaaatcactttgtcattcaggctggagtccagtggcatgaacacagctcactgcagcctccgcttcccacactcaagtgatcctcctgccgcagccccccaagtagctgggactacaggcacatgccaccacgcccagctaatttttttgtattttttgtaaaaatggggtttcaaaatgttgtcttgaacccctgagctcaagggatcctcctgcctcagcctcctgagtagctggctaattagcacccggataatttttgtaattttagtagacacggggtttcaccatgttggctaggctgatctcaaactcctggcctcaagtgatccacctgcctcagcctcccaaagtgcgagccaccgcacccagttcattctttattttgatgccaaaagactcctcggtttggccacagtgagccccttcaagttgtttcctgtccttttgacatgtcatcattacttgagcacttttcaactttctagcacaataagatgtcccaggcccatcttaccctttctctgccctggcccagaatcagctagttctcaaaggcacctgatttttttagtggagagtggcatttaaaaacttacatctgggtgttgtgtgatcattgttattggaggctcattcgtcrcaggccttctcagtaatgaagttaagaaagtatgtttgagggtgtatatttatatccatttctgtatctcaatgttaaaaaccatgggtttacactaatatctctaattctattccaatttcaaagggttcattctgtagcaggatgagctgcagacaagaacccctcagacaccgagttgtgaaaggaaagggctttactcagctgtgagcatcggcggactcacatctccaaaaaccaatctccctgagtgagtaattcttgtcccttttaagggcttacaactctaagggggtccgcgtgagaggctcatgatcaattgagcaagcagggggtatgtgactgggggctgcatgcactggtaattggaatggaacagaacaggacagggattttcacagtgcttttccatacaatgtctggaatctatagataacataacctattaggtcaggggtcgatctttaactaccaggcccagggtgcggcgcggggctgtctgcctgtggatttcatttctgccttttagtttttacttcttctttctctggaggcagaaactgggcataagacaatatgaggggtggtctcctcccttaattctagtctcccccctttccatacttgtaactcccttttctaacaatgagagacctacctcctattatcctcactttacttatgtgctcagtcccaggatacaaggaaagaattcccaagtcataccacagcagaagactgaactcttgatcttttgttccaaatggggtccacccacagcctaycccatttcagttgatggcaactccatccttctagttgctcagataaaaaaccctggaatcatcctggagtctttactctctctttcatactacacatctatctaatctgtcagaaaatcctatcagttctaccttcaaaatgtattcagaatctaaccacatcttaccacctccaccactatcaatcaccctggtccaagccaccaccatcgtcttgggcctagattgcacccagctagtctccctgcctctacccttgccccttaatcagtctgtcatcaacatagcagtcagggtagtgcttttaaaaatgtaagtcactttcaatcactcctcttaacattccaatgatcacaaaacactcagatgtaggttgttaaaaccctgcgatggttccctatttcactcaagagtaaaacccagagtcctaaaaatgtccctataactttctggcctcacctcctattactcccttcatcatcctactttactccaaacacaatagcctccttgctatttgtcacactctacagctataatcttatttatgcccttggctatgattcctctgccagaaatgattattttacttccttcaagtgttcaatctcacttcaacaaggcccacactgactaccgtatttgatacgtatacttgatattacaaccacccatccaactctagcagtccccattttccttaccctactctatgttttcgtattctacagcacttatcactttctaatataccatatatcatttactaatttttttatgtttattattcattgcttattctccacccctggatcactgctagaatttatgaggacatgaatttttgtctcttttgttcactgaagaagaaaggggcctagaatggtgtccagcaagctgtagacactcaacaaatatttgctgatgttaaatgaataaattattaggaacccagcattatgaattgtttcaccccctattttggcagcatggtttgactaaaaattttctgtaaaacaatttgatttttaatctataatagcaatttggaccaatagctctcatatttatttttcaaaccagcattctctccaagaggaatgtgtccttacaagaaatttagtaacacacccacaccagtgagccaaggtacttcaaatgaatgttaaatcaaacttccagagaaaatgccatagtttttatttaacatgtatgtatacctatgtgtgtacatatcagtacaagcatacctcattttattgtgcttcactttattgtgactcacagatactatgtttttgtttttgtttttgttttaataaattgaaggtttgtggcaacctggcatccagcaagtctactagcaccatttttccaatagcacatgcacacttcatgtctctgtgtcacactttgttaaatcttgcaatatttcaaagttttccattaatattattttttcttacggtgatctgtgatccttaatgttactactatacttgctttggggcaccataagccatgcccatagaagatggcaaacttaacaaatgttttatgtgtcctcacagctccatcaaccagctgttcccccaactcagtccctctctttgggcctccctataccctgagacacaacaatattgaaattagccaattaataacctttcaatggcctgtaagtgttcaagtaagaggaaaagtcacatgtctttaactttaaatcaaaagctaaaaatgattatgcttagtgagaaaagcaggttgaaagctgagatagactgaaagctaggcttcttgagccaaatagccaaatttgtaaatgcaaaggaagagttcttgaaggaaatttaaagtgctactccagtgatcacatgaataacaggaaagtaaaacagtcttcaggctgatatgcagaaagttttagtggtctggatagaagatcacacaagacacagcattccctttaatcaaagccaaatccagagcaaggccttacctctcaattctgtgaaggctgagagagataagaaagctgcacaagacaagtttgaagctggcagaggttggttcatgaggtttaaggaaagaagccatctgtattaagtccactctcatactgctataaagaaatacctgaggctgggtgtggtggctcatgcctgtaatccagcactttgcgaggccaaggcaggcagatcatctgaagtcaggagttcgagaccagcctggccaacatggtgaaaccccgtctctacaaaatcagccgggcatggtggcatgtgcctgtaatcccagctactcgggatgctgaggcaggagaatcacttgaacccggtaggtggaggctgcagtgagccgagatcacgccattgcactccagcctgggcaaaaagagtgaaactccatctcaaaaaaaaaaaaaaaaaaaaaagaaaaaagaaatatctgagagtgggtaatttacaaagaaaagaggtttaattgactcagttctgcaggctataaaggaaatacagcggcttctatttcttgggaggcctcaggaaacttacaatcatggtggaaggcaaaggggaagcaaggcatctcacatggccggagcacgaggaaaagagtgaggggaaggtgctacacacttttaaacaaccagatctcatgataactcttatcccaagaacagcactagggggatgatgctaaaccattcatgagaagccacccccaccagatccaatcacttcccaccaggccctacctccagcactggggattatctttcaacatgagatctgggcagggacacacattcaaaccatatcaccatctccataacataaaagtgcaagatgaagtagtaagtgctgatacagaagctgcagcaagttacccagaagatctacctgagatcacttatgaaggtggctacaacagattttcaatgtagattaaacagccttccactggaagaagatgccatctaggactttcatagatggagtaaagtcaacgtctggcttcaaagcttcaaaggacaggctgactcagattaaaggataatgcagctggtgactttaaactgaggcccaatgctcatttaccattctaaaaatcccaggatctttaagaattatgctaaatatattgtgcctgtgctctataaatgaaacaacaaagcatgggtgacagtacatctgtttacagcatggtttacagaatattttcagttcattgttgagacctgctgctcaaaaagaaaaaaaaatcctttcaaaatattactgctcactgacactctacctgattaccaaagagatctgatggagatgtacaggagattaatgttgttttcatgcttgctaacatccagttggtagcccatggatcaaggagtaatttgcactttcaagtgttattttaagaaatacatttcataagactatagctgcatgaatagtgattcctctgatggatctaggcaaagtaaattgaagaactgaatgccatcattctagatgccattaagaacatctgtggctcatggggagaagtcaaattatcaacattaacaggagtttggaaaaagttgattccaacccttgatttcaagctgtcagtggaggaagtaactgcagatgtggtagagatagcaagaaaactagaattagaagttgaacctgaagatgtgactgaattgccgcaatctcaagatcttatggatgagcagagaaagtggtttcttgagatggaaactactcctggtgaagatgctgtgaacattgttgaaatgacaacaaaggatttagaatatcccataaacttagttgataaagcagtggcaggattggagaagattgactccaattttgaaagaagttctactgtgggtaaaatgcagttaaacagcattgcatgctacagagaaatctttcataaaaggaagagtccactgatgtgccaaacttcatggttatcttatcttattataagaaattgtcacagccaccttcagcagccaccaccctgaccagtcagcagctgtcaacatcaaggcaggaccttccaccagccaaaagattttaacttgctgaaggctcaggtaattgttaccatttttttttttagcaacaaagcatttttaaattaaaatatataaatgtttttttccagccataatgctattacacacttgacagactacagtatagtgaaacataacttttatatgcactgggaaaccaaaaaatctgtgacttgctttattgcactatccactttattgcggtggtctggaactgattctgcaatatctccaaggtatgcctacatatatataaacctctgcttttaatgatactgtgagggcctagaatttcatttggagttaatgtacacatttgacaaacttgactgttttgagaacaatgtttttaatccctcaagttctctgtctgctgatcaaaatggacattaacatcctaacatactttgcattttcctagtatctacaaggccagatatttttatcttttaattttttgaatttttaaaatctaatttttttaattaattaactaatttttttttttttttttttttttttgagacagagtttcgctcttgttgcccaggctggagtgcaatggcgtgatcttggctcaccgcaacctccatctcccgggttcaagtgattctcctgcctcagcctcccaagtagctgggattataggcatgtgccaccaccccggctaattttgtattttcagtagagacggggtttctccatgttggtcaggctggtctggaattcccgacctcaggtgatccacccgccttggcctcccaaagtactgggatcacaggcgtgagccactgcgcctggctgctaattttttttaaagagatggggtcttgctctgttgttgtggctagagtgcagtgggatgatcatggctcactgcagccttaacatcctgggctctagtgattctctcacttcagcctactgagtaggtggggacaatcggcaattttttttttttttttttttttttgtagagatgaggtctccctatgttgcccaggctggtctcaaactcctggactcaggtgacactcctgcctcatttttctgaagtgctgggattacaggcatgagcctgtaaggctttatttctagaagcctttatttcatgtagaaggctttattttattatttttttgagacagagtcttgctctgttgcccaggctggagtatagtggcaccatctcagctcactgcaatctctgcctcctgggttcaagagattcttgtgcctcagcctcccaagtagctgggactatagttgtgagccatcacacctggctattttttttgtatttttagtagagatgtggtttcctcatgatggccaggctggtcttgaactcctgacctcaagtgatctgcctgcctcagcatctcaaagtgctgggattacaggcatgaaccaccgcgcccggccacaggcttttttaacatgtggtgcaccaaagatttttgtatgtaaaattttgtgtaaatgtattttcattgtggaagctaatacttgcatcagattttcaaaggattctctgacctaaaataagttaagaatcacagcattaaacttgtagagttcctccattaaaaattagcttcccaggccaggcgcagtggctcacacctgtaatcccagcactttgggaggctgaggcaggcagatcaccaggtcagaagatcgacaccatcctggctaacacggtgaaaccctgtctctactaaaaatccgaaaaatatgccaggtgtggtggcaggcgcctgtagtcccagctactggggaggctgaggcaggagaatggcatgaacccgggaggcggagcttgcagtgagccgagattgcaccactgcactccagcctgggtgacagaggagactccgtctcaaaaacaaaaaacaacaataacaaaaaattagcttcccgacgacaggaaccatgtctgtcccatcatcttatcttagttcctaccaagtagtaaataataaatgttgaacaaataaaaataaggaaatgaataaagaatggatgaacaaatcactaatttattgcctcagctcacactatctcttctttgcccagctttctaagggttgggtcacagtagctcatatgactgataatgagtcagagaggtaataagacttgctcaatgcagttatcactaaacatggctggggggaacctttgtaggagtgaaaaagaaatcttaaagatgcaaaagacatttgtctttctgtacatttttaaagtaacatgtggctgggtgcagtggctcatgcctctaatcccagcactttgggaggctgaggcaggatgattgcttgatcccaggagtgtgagaccagcatgggcaacatggagagactctgcctctacaaaatacaaaaaattagctaggcatggtggcacacacctgtagtcccagctactcagctggctgaggtgggagaattgcttgagcctgggaagtcgaggctgcggtgagccgtgattgtgccactgcactctagcctaagtgacagagtgagactgtgtttgaaaaaaaaatccacttttatggagtttttttgaggcataggtttcctgggggctttggggtgctgtgtacttctaggtactaagaggaaaggcccagagaacaggctgctaagagcttgctccaggtcccaggcttaaggggaaaaggtaatatttattacccttaaagttccctgtttggctgtccaactcagcttataaaagtaagaatggagacagaaattcaaataagaattctgcccaggagtaaacactgtggatctctactgcatctttttggaacctgagtatattagacagagcacagaggctactcttccctaacatcataccctgaccttcaaaggggtttaaacatttttattatccaatttctgcattatgctggccataaagaatcatttctatttataagggaattatccactaagattgatcaggctattgttgaggacagattccatctctggaatggctgcatctattctgctgagggaactttctgccatggatggcttggcaatgaattaccagaaatactcaagaggaaagcaagttgccttctgtctccactttacacacagcagaaaacccaagtggttatggaatacagtgaattacccagaaacaatcagttaccagaagctctctaggattacagtgatgactaacctcagagatgaagccttccaagaatctcttctcaatcttttttccttttctttttttttttttttttagacagagtcttgctctatcacccaagctggagtgcagtggcacgatctcagctcactgcaacctccatctcctgagttcaagccattttcctgcttcggcctcctgagtagctggctaattaataactggctaatttttgtatttttagtagagacagggtttcaccatgttggccaggctggtatcaaactcctgacctcaagtgatccagctgccttggcctcccaaagtgctgggattataggcgtgagctaccatgcctggcctcaagaacctcttctctaaaccagacctacaaatgatattcttgacaatggaatggattacttgaagcacagaaaacagaaaggaagttaaacaaacatgaatacaacagggaactcttccatatagcttttatgctgggcaaaagagccctaactgtgggcagaagttgttcaaacttcattactcaacgttaaaaaaaaaacgcttcagtgggtacctactatgtgtaaagcatagcactgggcacgatgagagaactagggtgaacaagatgagaagagtccatgatctctaatactagagataaaatatgaacactaataactggaatgcaggtggaaaagaggtacagataatttagaagagacagaacatttggctagtggcagtggggtcttgttgcttctgcttggtggattaaggaaagaaggaaagaaggttagggccttggatgcccagctaagtaggcttcttttctttttcttttaatttcccttccttcttttcttcctctctccctccctttcttcctctctccctccctttcttccttcctaatactttacatccttaaaagttttaagtagagaactgaagacgataagaactgctctctggagaaattaatacggtagtagtgaagtttgtagcaatgggaattgagagacagagccaacagatgtttaggatataaatcaacaggtccaggcaactaactgttgtggggatcactaagagggaagagtcaaaggtgacttggagaatgctgatgtcattcaagaacaggtgcccaggagagaaatagaagaaggtcggacagatgatgtgtggttctggacacaatgaagtgttagtgaagccacctgacaggctgttggaaatgtgcgactgaagccctgaggagaggtctggattgctgaagctatagatgtgagactattatgcatacaaatgagctgatgccatgaaagtggatgagatcatcaagggagatagcaaaggaggaggaaagagaagggtaaagggcagaaccttagggaatacttgcatttaggataagaaaaagaccctgatgacgccatcaaagaaggaatcatcagagcagtaatctgagaatcagcagactgtcacaaagcaagaaagaggctcaagagggtgtaggaggtcacaacagaaaatgctacccagaggtcaaaaaggatggggcttgagaaaaatgccagcgagacatcgaggagcatttttcactagacttttggtgggatcagaaatcagaggtttcaagtgcaacagctaaagagggaacaaatgggctattcaattcatatttgttggtgtccatctgtctttactgcttgactcttctttttccttcctgaactcaccatctgttcactttcactgctatgtgcaaatttctaaagaccttcattttaaggattcaacagatactgacaaatattgacttaataaatctccctaagaaatcctagattcctaaaagggtgactgcttgttcacattttgtttctcaagcaaagatatcccaaagacaagtgaaatggactgcggatagagagggctgactgtaagtgcaccactgaataaatgacacttccaaagtcttcctgactatcacagagactctaaacttttctaaacactctgcagatattcttttgacacatctaggctttgcaaaaccatatacctaatcacatttagtaagaagctttcttagaacttaagtgtatttagccatttcaagtctacagtagaatacggcattaaatgataaagttcccctaccaaattaaataagggtaactgttctattcatagatgaaagaaaaacataacaaattttggtatgcctctttcaaaaccggtcactaacttcccaaacatcttcactgaacagatacggtattgagaagtgttgtgggtggcacaaaattacaggatatgactactaatgttatgcaccaatctcaattaacagggggtacacttgcagggtacataagtataatctgggtttaacataatcttttgggttcacctaaaacattattggttactggcaagttattgggttttttttttttttttttttttgagatggagtttcgctcttgttgcccaggctggagtgcaatggcacaatctcggctcactgcaacctctgcttccccggttcaagggattctcctgcctcagcctcccaagtagctgggattacaggcatgcrccaccatgcccagctaattttgtatttttagtaatggtggggtttcaccatgttggtcaggctggtctcgaactcctgacctcaggtgatccgccctccttggcctcccaaagtgctgggattacaggtgtgagccattgcgccccgcctattgtatcttaaaaagtagattctcattatgaaaagcacacattgatttctgaaagtcaattattttgtcccagtactttgagaagctgaggcaggatgactgcttgaggcgaggagtttaagaccagcttgggcaacatagcaagatcctatctttacaaaaacattttgaaaaaattagctgggcgtggtggcatgcccccgtcatctcagctacatgggaggctaaggtgagaggctcacttgagcccaggagtttgaggttaagtccctaagttacaaaaaagatatatttccaaagttcttcagtaacttaggtacttagaaattcatgagcattttctcactgattcaatgatattaataatgattaggtcaaatcatggacttaaccatggtggtgatttttatccctagagattggtataatatcttgcacatggtgttctaaaaagttgctgaacaaatgattgaatgagtcaacgaataaagtgtaggcctatactattctgaaagtaatacaaactattaatataaaaatgtttcctttgaaaaatatgttctgaattccagcttggttgtaaagaacaatctctcctatggttcattctctaattttggtggttgaatgaggacttctttcccagctatgacattaatttcatattaagtttcagttaccctcgacattttcttacttccattggggaggccctataaggaaagttagaggaatgaaaggaaatagatgatgatgaggaggagtgatgcaagtatctggagacaccttctttttttttttttttttttgagacagagtctcactctgttgcccaggctggagtgcagtgctgcgatctcagctcactgcaagctccaccccctgggttcacaccattctcctgcctcagcctcctgagtagctgggactacaggtgcctgccaccacgcccggctaattttttgtatttttagtagagatggggtttcaccgtgtgttagccaggctgatctcgatctctggagatactttcaagagagacactcatcagggctggttgaaccaatcctgtcatcatttgttcaacattagcctaactggaacaaggtgaggacagagactggcatgagagggggtctaggtcacagaagactgcagctgtgatggggggaaaagcagtctgaggaaaggagtctttctgtgcaagcttatctaaggctggtattcatccaaacaaaagtagtatagtagagaggttaagtgtaaggactcgggccaaactttctgggttcaagtctcagccccctactttttagctatgagatgtcagactaggtacttaacctctctatatcccattaaaatgggtataataagaatatctacctcggctgggtgtggtagctcacgcctgtaatcccaacattttgggaggccgaggcgggaagattgcctgaggtcaggagttcgagaccagcctggccaacatggtgaaatcccatctctactaaaaatacaaaaattagccgggtgtggtggcaggcgcctgtaatcccagctactcaggaggctgacgcaggagaatcgcttgaacccaggagatggaggttgccttgagccaagattgcgccaatgcactccagcctgggtgacaagagcgagacttcgtctcaaaaaaaagaaaaaagaaaaaaaaagaatacctacctcaagagttgttaggaggattaaataatttaacagtatctgagataccctgaaagctatatgagcattaactaaacgagcacatcaggcatgtgtaagttgctgattacatgttatgtcaattataaacttagttaacttttaaaactataggtttcctagggatgaaagcacaagaggaaattaaggtgggtatggtttattaaatatcagtaaaaaccatagtactatcttcaatcatatgtgatccctgtttttcaccccaaaagaaaagaaaaaaactatgcctaaccttgtgccaaatcaccacttaggactaggaatttttaaatggtaccatgagacccaagcaagccttactgaaacttttttttttttttcaagacagggtctcactctgttgcctaggctggagtataacagtgtgatcataactcactgcagccttgaattcctgggctcaagtgatcctcctgcctcagcttcttgagtagctaggactacaggcaagcaccaccatgcctggctacatttttaccttttggtttttacagagctggggtctcattatgttgcccagatgggtctcaaactcctggtctcaagtaactcytctgtcttggcctcccaaagtgctggaattataggtgtgggcaaccgtgcctggccctgaaggtattttaatagtgcattttcttctaataatgagaagaatataaaatatatcttcttttttgacagtgttgctctaagaaaaactattcaaaatggactctatttaagagtacaactcatttcactaagtgaaataaggtcattctttttaatttcagaaaagtctgtgtccaaacaaatgtcctttggacccttagtacagaaattgcaataatttttgagacaaaaacttcagggttgggctgccaagtccacatgctttctttcatggtttgccagcacaaagagttactaggggaaaatgttcattaaatgagaaaggttacgtcatactgaaggactatgcacttacagatagatggcttgcctttgcccagtattcaaggatcagagtagctgtcgttttttcctttactgcagaattattattttaagtaaatgaaaggttgatttatatctgcattacatttatcatcttgctagagtacagagtaaggttcagaatacaatattcagatacagggagtgcctagatgtggagaagttcccggtttacagataatctccaacagaaaaagactaacaccttgccttcccaccagttcataggacccaaagaagcattatctcttgcttcaaaaccyagccacttatcagttatgcaaatgaacctcctggttctctcatcctctacagagcaatctaattaaacagcaacatctgcaaacccagaatgctgacaaaatgtggcagatctggtcagaaaagaaaaaacctaccaaaactacccataatatttgaccaagagaactgagcaatctagtgggaattataccactgaagtgttttactaagaaaccatcagagtccttataaggtagttaatatttrtatatacgaataatgtatttcttcattataccctgaaacaggccatagggatgcagcaatggcattgtggaaactaccatttctggcaaatgaagacttggaggttgggcgcagtggttcacaactgtaatcccagcactttgggaggccgaggcaggtggatcacctgaggttagcagttcaagaccagcctggccaacatgcgaaaccctgtctctactaaaaatacaaaaaattagccaggcatgttggcatgcacatgtagtcccagctacttgggaggccaaggcaggagaattgcttgaacccgggaggtggaggctgcagtgagccgagattacaccactgcactccaacctgggcaaaatagtgagactccatctcaaaaacaaaacaaaaaaaaaatgaagacttgggttcgagtctagctactacaattttataaatagagtggccttggataataagagataataataataactgttgtagttcacataatttttttttttttgagacagggtctcactcggttttgcaggttggaatgcagtgataagcctcccgagtagctaggactacaggtgcttgccaccacactgggctaattttttgtagaaacaggtttttaccatgttgcaggcttgtcttgaactcctgggctcaagtgatctgcccacctcagcctcccaaagtgctgagattaaaagcatgaactggccgggtgcggtggctcacacctgtaatcctagcactttgggaggctgaggcaggcagatcacgaggtcaggagatcaagaccatcctggctaacacggtgaaaccccgtctctactaaaaatacaaaaaattagccgggcctggtggtgggcgcctgtagtctcagctactggggaggctgaggcaggagaatggtgtgaacccgggaggtggaggttgtagtgagccaagatagcgccactgcagtctggcctgggtgaaaaagcgagactctgtctcagaaaaaaaaaaacaaaaaccatgtaccatggcacccgacctctgatagaatttttgagatcaaatgagatcatgtatctgccagtattttgtaaacggttaaggcctttcaaattttattttttattattgtgattacatttaactatttatttagtacattagtcactatggattttaaacacagtacactgtgtacactgataaatcagttgccatgtattgagctgattttgggcaagtcattgatctaatagcattaatccccaaatatttcttttttttttttttttgagactggctctgtggcccagcctggagtgcatggtgcgatctcggctcactgcaagctccgtctcccgggttcacgccattctyctgactcagcctcccaagtagctgagactacaggcgcccgccaccatgcccagctaaatttttttttgtatttttagtagaaacagggtttcaccatgttagccaggatggtctcgatctcctaacctcgtgatccgcccgcctcatcctcccaaagtgctgggattacaagtgtgagccaccgcacctgatcaaacatggctttcaaaccctgctgcagtcccactgcacaagagctaattttttatattagcctaagtcccactgcctaggaaaggctaaatgtttatccttttttgcttataaggaaagagaaaatggaactctgcacatctatattagcatttaaatcaatattttatctgagaatatgttaggcagcaggattatttaagttaatgttatctacttgaaatatttgttcaaagcacaggctggcatcaaagtatttaatatggtttagatcaagggattagactgtgacttaatgcaaataaacttcaaaaagcacttttgacgaaagttaatataaatggaatacataaacataaactatcattcttcctcaaaggaacagttaagcagtatacaccaatctgtttgtttcatgcctcagtgggatttaggtattctaaaaagggaggggtaactcctttagtaaagtgtcgagctactcttaatggctgtctgcataaagtgatgagaaaaatttgattaagtttgggcatgtgagtaattaattctcagcaaggaaatctgataggggcctttgcaaatagaacactgaaaaaaagtatcactttgggggcataatcattaaaaatgtcctgtcactaagttctcaatctattcacttgtttaattctcagtccacaggcacaggtctgtggctgcacccctaagaattctagtctgactcaaggagtgagacaaagtgtacagggcaggaggagaaagccctggcttccatggccctaatcctttctttttccattcttctttatcatctggtcaaatagagacttttgccctgtaaatcccaagccagcactgtctccttgtcctccatgttttggtcttactgacctaggcagtttatttccagagaaataatttttggcatattaaaatagctaagagggagagagatggctaacagtcgatgtgggtatacatttcttttcttttcttttttttttagatagagtctcactctgtcacccaggctggagtgcagtggctgatctcagttcactgaaacctctgcctcctgggttcaagcgattctcctgccctagcctcccaagtagctgggactataggcatacaccactacatccggctaatttttgtatttttagtagagacggagttttgccatgttagccagactggtcttgaactcctgacctcggkgatccacccacttcggcctccaaaagttctgggattacagatgtgagccatcatgcctggctgatgtgggcatatatttctaatgcatttatgattgcctgttttctgcagaccatatttcacccaattttgtaaatcctagagtttatatttttattagcacagctagtacatacagtgactatctattaaatgcttactgatgatgatctaacaccatcatccaagatgccctggaaaataatatcaaagaagggtttttaataatcagaaaggctagtcaaaatatctttggcatcctgttaaaaaaaaaaaaagaaagggccaggcacggtgcctcacacctgtaacctcaacactttgcaaggccgaggctggtggatcacctcagatccggagttcgagaccagcctggccaacatggtgaaaccccatctctactaaaaatacaaaaaatttgctgggtgtggtggtgggcacctgtaatcccagctacttgggaggctgaggcaggacaatcgcctgaacccgggaagcggaggttgcagtgagctgagattgacccattgcattccagcctgggcaatgagagcaagagtctgtctcaaaaaaaaaaaaaaaaaaaaaaaaggaaaagaaaagaaaagaaaaaagaaagaaagaaaaaaaagaacaagcactaaaatccttggcacggtgtctaataccaaacatttcccacttaatttttctgttctctaaatgttgtatttgttatcattatgagcagatatgcatcttttgagtgcaagaaatctatttctgtaatattttccagaacacctagcactgaaccaggcaaatgagactgcaaaatatttatttataaagaaataaaataaatatatgttttctttgaatgaaacaaattatctatatacgaatccttatctctattagagtcctttaaccaaccaacatatgaggtaaatacattcagtatatggtatgatatcatatcatatcttttttttttctttttctgagacagggttttgctctgttgcccaggttggagtgcagtggtgcgatcttggctcaccatttcataatatatcttaataagaccactttacatctgcttaatgctgcttgttcataaagtggtttcagctttgttatcacgtttgctcttccctcaccccagtattgtagcagcataggtctgttgtcctcaatttacagatgagaaattgagacactgagaagttatayatcttcatttgttcaacagctaggcacttttctaggtgccagatttacagtgatgaacaagacagagttcctgctcctaggatgcttactcagtagtgtgtttgtaaatttttaaaaactagctcctcaaatgtgggtcaccatgaatgtatgaattagtatattttttaacaactaagacaaaagtaaagcaaaaaactgtacgttggagctttattaatttattaatcatatgagtgacttctttgctaaatcaatgaataattttcccatactggaagaatatttctcaatcttttgtgctattcacaagtaatagctatagagaatgaattattaacattttcttcatcactttcttgagtctagacaatcaacaaaacaataaatcaagccctgatttgtagtgtttgttgatttcagtggtgtaagtacttctatcacaggtaatttcaagctatcaacatgaaaycactgaactcagagttggcgaaaaaatgcagtggtacaccattacataagatttccatcatttagatataatagatacaaatatctcaagagaatagataaccataaaatgattagctttgtgtatttattttgtttttaatataacttggcctggtgcagtggctcacacctataatcccagcactttaggaggccaaggcagctcatttgagtccaagagtttgagaccagcctgagcaacatggctaaacccagtctctacaaaaaaatacaaaaattagccaggtgtgatggtgtgcatctgtggtcccatctactcgggaggctgagatgggaggattgcctgagcctgggaggcagatgttgcagtgagctgagattgcaacactgcacaccagcctgggcaagaccctgtctcaaatatacatatatatgtaagtttttagttcatatagtttaatttttaataatttctgtgccttaaaaccagctcataaaaggtaactaactcagcatgggaggaaatatttgcaatgcatatagctgataagggattaatatatataacatataaggaacacctacaactcaataacccaaaaggccaaacaattttattttaaaaataggcaaagggcttgaacattttcccaaagaagatatacaaattgccagccagtgagcacatgaaaagatgatcaacattaccaatcattagggaaatgcaaatcaaaaccacaataaagtactactttgcatctactaggatggctattactaaaaaaagagaaagaataacaaatgttgctgaagatgtggagaaactagaactcttatatatgtaaaatgatacagctgctatgtaaaatgttatggtcgctcctcaaaaattaaacatggaattaccatacaatccagcaattccacttctcggtatatattcaaaagaattgaaaaccaagattcaaacaggtatttgtacaccactattcagagaagcattcttcacaatagccaaaaggtggaaacaacccaaatatccatcaacaaatacacaaaatgtagtatgtaaatacaatggaatagtatttagccttaaaaggaataaaattctggtacatgctacaagatagacgaaccttgaaaacattatgctaagtgaaataagccagacacaaaaggaaaaataatgaataatatctacttacatgaggtacactcagtaaattcatagggacagaaagtagaagagtggttacttgggtctgtgaggagggagtaatagtttctgtttgggatgattaaaaagctctgaaaatggataatagtgatggcttcatgaccatgtgtatgtactttaaaaatagctaaaactataaagtttatgttatgtatattttaatataatacaaaagagggcaggcggctgggtgcagttgctcatgcgtgtaatccagcactttggcaggatgagattgggggatcacttgaggccaggagtttgagaccagcctggccaacatggtgaaacaccatctctactaaaaaaaaaaaacatacgaaaattagttgggcgtggtggcatgtacctgtaatctcagctactcgggaggctgagacaggagaatcacttgaacctcggaggcagaggttgcagtgagctgagattgcaccactgtactccagcctgggcaacagagcaagactctgtccccactccmccagaaaaaaaaaaaaaaaaaaaaaaagagggcaggtaatcatgaatattcttacacttgaataattttaaaagaaaaaaagctcatgagattgccaaaaatttaacaatcgtattttgtgggccaggataggctggttccaggattccagtgagcttactttccttctaatggagaggaagaaagagacttgctcagggacacatgtgaaatggaagagccagccctgactctagaccatctgagtagtctagcactatttccacagctgcataccgtttytcatatagtcaagtaactatcagattaatgttacaaagttttgggttatatgcatttgttacagaatggcttcaggtagatcagaaaaatgaccctggaggttaagaacatggtgatttggaaaaaagcaatggggcaaatttgaaggagaagaaatgttggggagaggagtgagaggagctcagaggtccagtagcttatctgttagatatgtatttatgcaaaaataggggcaaggggacacaaaaagccccagtctttgggccacaccagttatgtacactcctgggttgaggtcaggggtctacaagagacgttcttgcccctgaaatgtagttaccatctagatgatacctgaagacactcccatttcccctcaatttccccaggtcccccagtatctccccatctggaggttgttacaggaattgcttgcaaatgaggcagtgagagttataacctgacataggagtcctaagctataatgttgaaataacattttactcagaggaaatgacatgtacaaaggctcagaggccagacaagtaagccaaggggctgtggacagaaaacagggaggtggcaataggcagaacattacaaagcaccttgagcttaataatacggaactttctttgtgggaaagagcctgttttagtacaaaaccttttcatttatttcttttaaagaaataagctcctctcaacttaaacgtctagacttaaaaactgtagagtgtatttttaaagcctcttttaaagtaaattggacttgtttgcagtccatacacattcccaccagtgatcctccagtagtctaaaaacaaaattacaagaattggcaaacactaaagtcttcagtaatataaaatttacagtatttgaatgtcactttttactatattaaaatggatcattttaaagctcaggttattaactgattataaattatggaacattaatgctttcaggacacaagggcagtactttgtgaatttctgagaatcagcatgatatcaagaaagaagataacctttctttaccttcctaggtctcgttttccatatctagtggctggcctaacaagacctgccttgcaaggttgttggatgtgaaggatatgaagtatatgtagcacctagcaataaataagcactcagtaaattgtgactgctattaccattgtgaacataaatgaaattttaattcaataaacatttgttaagtgttacaatgtacagttggaatctaggtttctttcatcttttgttttacattattaatattttaatcatagagaaaagtacagaaaataaacaccagatgtgtggcagatcatttgttttaactccctatgatttttttttttatgattttcgactgtatgaaaatatcacaatttgtccatccccctcataatattggcactaaacatgtctcctgggagaatttctttaagatatatattaagaagtggaattgctgagtcacagggtatgataaccttcacaacaccagagtgttctccagagtggcatatcattttcttttgtacctagcattgtgcattttaggtgcattctcatttagcaaaactacatgtcaggcattttaatttttgccaacattacaggtttgaaatggtatctcatcttttaacttatatttccctaattgctaataaagttatcatttcatacgttttttcctattacaggttacccttaagtaaacttcctgttcatttcttttgatcatttcttaaattggggaattggttcattttttaaaaattgatttgtggaattttaaaaacatattctggctctgaattctttgccagtaaaataaaatacgaatatcttctcaaagtctgttatttttatctttgtttatagtaagcatgggttttctcatccataaaatgtaaataaaaacatctacttcatgtgataaaatacctgaaagctcttagtcaagtgtcaggcacagattatacattcagtaaaagtgagtttcctccatttgccctcaacctacatcctcactcaattcataagtgagtaataggggaatggtttataggtatgagatctggagagtaacagatttgcttttaaatctcaactttaccaaactagctgtatgaatttggcccacctagctcaagctctttcagcctcaacttcctcatttgtagaagtggggtagtaatacttaactcacagtggtattgtgaggaatagagtttaatccagtggctggccaacagaaagttctcaacatatggtagctgctaccaccatcaccattattaggggggatacaaatatatacaaataactataatatagaacaaaatatcattaaaactccctatgaaaaaaataattaaatgctattggaatgtagacatgggaagaggtaacgtctagctaggggttaagagagagtgaatggaggcttcatagaggaaatgccatttaaatggacattaaaggaagttagatattgataagaaggatattctagcaaacaaaagagatgcatgggagaatgtacacacacacatatatatacacacacacaaatatatgtaattatatgtattatatctaatatcttatacatctatgcagtctgccaaagtataggaacaactgagtaagtcaacatcagaagcaagtcttcatttttcaggttattagggtactctatgcattaaatggtaactcataatttaattagtattctaagtataaatgtgaaatgctgttgactttggaataaaatttggtacagtaggatctgtggaagaattagagctgggagtgttaagaaaatagggagtattaaatatgaatagtatacagaaagccaacagatatggatgcccactgaatgacaggtgaggagcctaccactcttgagagccaggcttggtggctgctcacttaccgcctttctgggaatcagcaacatatgattttctttgttaaacaggataagttctgaaacctgatccaggaaaatcacaccttttctcattcactttacttatacaggctctggcaattatggtcagcctaatttccttccaccctccttaattcctttttttggtggggcagggtggggcagagtctcactctgtcacccaggctagagtgcagtggcaccatctcagctctctgcaacatctgcctcctgggttcaagtgattctcgtgtctcagcctcctgagtagctgggactacaggcatgtaccaccaagcctggctcattgtttttgtatttttggtagagacagggtttcgccatgttggccaggctggtctcaaactgctgacctcaagtgatccacccgccttggcctcccaaagtgctgggattgcaggcatgaacccccacatctggcctctctctttcttgatagaaacaaatttcattcagtatgttttgtcttaagcaaaaagttccactcattaccctcttctgtcatacctattctacgatttaaaatagcatttgactgtattaaaatacactagattaactattactgtatttctcatgttctatctagtttttttccctttccacatttatagcacatgaacaattactttaaaagtgatttggccctacattgttgcttttcttcacagcttattatttatttactcaagagaactgaactacgaatctgttatcagattcagttgcaagccctgtctatcacaataaagtatccgaagttaggactattattttttcttagcaaacccaaggtttgagcatgatgaaatgatttttctcaaacagaaaatggtgggcagttctatatacaaaccagaaatatatcagcagggaaattccaaccactcaaatccagaggaatcctaagcatttctaaaggaaaaagctactatatttttctttttccaaaatttattctgctcatggtgattaccatgtgtgcacagattagctaaaatgatcactgtgggatcaacagttctttcttcattgtctaccagttcttttgcttgcctctggcgtaagtaaataaacaggtgtattcaccactaaataaatcttacatgtttacaaattcctaaaatacaatgcaataaaaaatagcaagaagaatctgtggtgtttgttggaatctgagctatatcgcttgcatccacacaaataaagacagaaaggatcccatggttgttcacaaactgtggacaatgaccctgggatcacaacccagaattaacccaccactgaatagggttagtaccttcttctctatattacgtctctataacaatgtcacaatcttaaaataagactttctatcctttaattactaattttcacctggatatgctgtatgcatagcatttatttccataacgatggtcacttctttctccagagcaaaaaacaaacacaacaacaacaaaaacaaaaaaaacccaaaaaaactagaggttagaatattttccatatttagttcctcttgttatgtaacatggaatatttggaaagaattaagtcagctttgctgcagtaacaaccccaaatcttcatgtttataaggacaaaattttctcactacagtgcagtttggattcaggtcaggggcagcttggtttctgttacatgactcttattctgcgacccttgcagaagcaacagccctgattttggtcatgccactttcacggcagaaggaataaagagggctggtggaaacctgtgctgactttcttttctagtttttttttttgtttttttttttttttccgagacagagtctcgctctgttgcccgggctggagtgcagtggtgccatctcagctcactgcaacctctgcctcctgagcgattctcttgcctcagcctcccgagtagctgggactacacgtgcgtgccaacacaaccagctaatttttcatatttttagtagggacagggtttcactgtgttagccagaatggtctctatctcctgacctcatgatctgccctcctcggcctcccaaagtgctgggattacaggcatgagccaccgcgcccggccctgtgctgactttcaaaacttctgcccagatgtggtctatatcatatctgttcacacgtcactggccaaagaaagtcacacatttaagcctaacatcaatggggcaaggatgtgtactcctctcataggaggtgttgcatatcacacggaaaaggaagggagaatgaacaagcagagaaaaatataatctatgacatgcaggaaaacagtagtttataagcgaaaagtcatcttaaagacttttccaaaatactttttctcccttttctatatcaaccaacatgcccatacaaaagggagtgtagaggagatattccatccaactataactgccatgctaggtctatggcaagagaaggatataatgtaggaaaaagtccttccagacttccagactatgcgagatggaagtgcagcaaagcaacactgatttcctcagcctggagataaatcagtttgttaaataagtgaggataaaatcaaaggccaagtgcccactccttcttcatgtttgggagtctagagaagatcaactctcaggcagcctccaccacaacatggtgcacagaaacagtgactcagcgttgtagcaggtctggtagagaagtgtctgaggttcaggtttcctgagcccccatagttcccataaggcacagatactgagagattataagaggatgaactggatggcagacacaccagaggctcaggggggtgcaaccagaagtcagggggaggcccaggtagccagagtgctactgggttctgagcaagcagcctacagccacatatttcagccctaaatgacagcagaacaagcagcactaaagtggatgagggaccttgcccctgagaccaggagacacctatggccatcatttatgacactaccccaagggactgtctgaattactggatcagtttaagctttaaactagactggatatttaggtaatttttctctcctggtctcaggataaaggctgtaaagacattgacaaagaagtgacattttctctgaggaaggctcaaagaaatagactaaaccatttctattttatttaccactacatccactgctttaacagtgcctgacataagtaggtattcaacaaatatttgccaaatgaaggaatgaataagaggccatagtgagaggaaactgatcaactagcaaagctatgatagaaataccaggcaggctgaattgaaaaaacaatgccagttccattttggcaccaagccaaaaaagtccccacttcactcctaaaacaagtttgtaacctttatggaatggctcctgccaccatatttaacttacatttggttcactgtttaaagcccttcggataacactgctgcatccttttgcttcaaggaaaaaaaaaaaaccagaaccacaaatagctgtgcaggatttcgaccttgcagtcacaataagaaagcagcaataggaaccagaatgggtgatgtctgaaccaataaactaactctggtgtttagcagcaactttattttacctgccccaggataatttcagtgttaaagctattaaacctataggtattctagtggctaggattagtaaacagaacataacagggaacagtacagagaaaatatggtaactaaaatacaagcttatacaggattgaggtggagacacaggctgacatatgctgacatggtaactaaaacacaaggctatataggattgaggtgcagacatattcaatcactgtactttccacagtaaatttgtttctcaacactctagcaataacattaaaattacctatcaggctttaaaacagaacagatgcttagagattccgattcagtaggtctggggtggagcatacgcaatgctaatttttagtaacgtctcaggtgattctgatgcatggccacagcattctgcaagtgagaacacctgaagaacatcatcagtaaacactgaaagaacttatgaatgaaaagcctctttgaattatatattttttgagtatggactatgttttattcatttttgtactctagcctccaatgtttctggtaattaaagaataagtgaacaaacaaatcacaaattctctgccttggtagcctgatgctctcaaagagactggaacatgggaaacaaaaaagttgacagctgatgttgtaaatctgtacttcctggaacagaattcctggcataactttaggcagactaaatgggaatgaacatgtgtgatcattacaacactgattttttttttttamaaaattaatttttgttgaactggggtgaggggtgagggaaggaggggaaattggtgctctaataagatttacgtatccaaatcccatacccagagtcagattatgaagagcagaatcacaaagccactccatttataaatcctgattctgccctctactgtttgtttatttttgtatttacttctccttgagcaacagtataatgtacaactgaaaatacttagtgttactgacaagatttataattcagcactactttatgtgttaatgacttcaaagccctggatgaataaagcgaacagggattgactcagtgaaacttctagcttcctgtaaacttcattcattctcaagcttaatggaaacaaaaccctatgctaggaaaaagcaagtatgtttccctttctgagtctccctagttaaacactataatcaatggcaactccaccttgtagcaaagctcagtgataccatggatcccattacaatccccaaaaaggagaaggtgaaggaggaggaagatggaagtttggcatggtttgactctgtctccacaaaatctgcagtctttctgtcaccctcacacttgaagttacgtggaaaggaagaagagggaagtgctggatgagagaaacttaagagtgcaaagtctgaaaaagataggagagagaataatggtctgaactaaataggcagaagaaatctattctctattaaaacaacaagaatttgccgaagcaggttttccaaaagagaccagaaaaagaaaaaaaaaaaagaagccctaaagtgatgcaggaggagtgtcagtcagtctgactgggtctcctagtcaaaagctctggccaagtgactagatactcacatgctctacaaccctagtgaggagtgctttgggctcccacctgcctggatggatgggtgctgcacactcagctacctgcttgggtgataaaaataattagaatagtggtgtagatgaaggttgaagtccttgaaaagtgcaagaatataaagttctgcccagggcccctcttccacaggggagaaaaaaaagccacacacaactggatattacagttatcccatcatttctctatgaaaatataaaaacaaaattaatgtttgtcttagtccatttgggcttctgtaacaaaataccataacctgggtggcttataaacaacagaaatttatttctcatagttctggaggctgagaatctaagattaaggtgccagccattcatggtgtctggtaagggccctcttcttggttcatagatggtgccttcttaatatgtccttacatggtggaaggggagaaatctggtatcttcaaccccttataaggtcattaatcccaatcatgagtactctatcctcatgacctaaccacctcccgaaggccccatcttctaataccatcacactggggattaggtttcaacatatgaattttgcagggtacaaacatgttcagtccatggcaatgttaaccccttttggtcctatttcacgtagtccagtatttggtggctattttcatgatattccccaatcatcttatccttacatctgccttaactttaagattacttgaacgttagagaaactaaaaatggggacatctttcatttttatcaaatgattattctgctccaactctatagattatagatgcaaatctttatggatcaggtcccttgagagctattttaaaattcaagcagggtagaaaataattcctgcaagtctacagtacccaaaacagcatagtactggtactaaaacaggcacatagaccaatggaacagaatagagagcccaggaataaggctgcacatctatgaccatctgatcttcaacaaagctgacaaaaacaagcaacggggaaaaagactccctattcaataaatggtggtgggaaaactgtctatccatatgcagaagatagaaactggaccccttccttacattatatacaaaaatcaactcaagatggataaagacttaactgtaaaacccaaaactatgaaaaccctggaagacaacctaggcaataccatcctggacataggaacaagcaaagatttcatgacaaagatgccaaaagcaattgctatgaaagcaaaaattgacaagtgggatctaattaaactgaagagcttctgcagacacagcaaaagaaactgtccacagagtaaacagacaacctacagaatggagaaaatattttcaaactatgcatctgacaaaggtgtaatatccagcatccataaggaacttaaatttacaagaaaaaacaaacaaccccattaaaaagtgggcaaaggacacaaacagacacttctcaaaagaagacatacatgcagccaacaagcatatggaaaaaaagctcaatatcactcatcattagagaaatgcaaatcagaaccacaaggagataccatctcacaccagtcagaaaggctattattaaaaagtcaaaatataacagatacttgtgaggttgtggagaaaagggaacacttatacactgttggtgggagtgtaaattagttcaaccattgtggaaagcagtatggcaattcctcgctacaaagagctcaacagcagagctaccattggacccagcaatcccattactgggtatatacccagaggaagataaatcattttgccataaagacacatgcatgtggatgtttactgcagcattattcacaacagcagagacaaggaatcaacctaaatgcccatcaatgacagattgcataaagaaaatatggtacatatacaccatggaatactatgcagccataaaaaagaacaaggtcatgtcttttgcaggaacatggatggagctggaggctattattcttagaaaaataacacrgttacagaaaaccaaataccacatgttcttacttataagtggtagctaaatgataaaatataattttgctaattatagctaaattataagaacctataaacacaagaaggaaataacagacactgggtctacttgaagggggaggatgcgaggagagaaaggagcagaaaagataactattggatactgggcttaatatctgggtgatgaaataatatctacaacaaacccctgtaacacatgtttacatatgtaaaaaaccttcacatgtgcctccaaacctaaaagttaaaaaaaaaataaagtttttcaaactgataagaggcaaattctcttttaagaggcatttcaataaatatcccaaataatagtttttgttcaagtctcttttttgatatagcataaatgaacttaatattttcatatataattttcattgtgtatattcacttgaagctttcatttattccattgtttacacttgctttgtaagatttttgtacagagaattacaccagtaaacaattctaatatttcgaaaatggttttagttctgagctaatttcaaaaacgggaagagaaaaggcagtagaatataatgattaaaatcatgggcataaacatcaaactccttgagttcaaattctgattctgaaacttagtaactgggtgagttggggtaagttgtttgaactctcttaggctagcttcctctacaacatgagtgaaaacggtttgtccctaagattcgtaagaattaaataagatcatttatgtttgaggcttggcatactgtctggtatttattaagtgttcaataaaaggtgattaggattcgctcttatttatttgatctagagtataaattttcccatgaagcatttatacaggaaaacacaataggccacagacaaggcatctctgatattggtcatcagaaagactccaggagtctgcccagtcacatggggttctggaatttagccaggctgctgagtggaaactgttactcttgtttccttggcaatagtctgggcatgagaaagatctcaatttttgataatcaaaagtcaatgaaaaatatgctccttaggcaggtgtctaattgaatgttgtctacttgaaaagtacagtgatacaattcaccataacagggtcttaaaagtttactaatcacacaggaatgattactgttcattcaacctcctttttcagcaatttattttttcaggttttctagttagaattatttgactacctacttatatggtctgttaccctgaccaagtaatacccatgtgttgtctttaaaggttcacttggtctacacttgggttcacggacttctaaatgctgggaaacaaagttacattcctctcacttgccacctgcattagtttctgcttctgcatcagtaaattttgcaataaaagattattgtgaaataagcacatattccctttcatactcctttgggagttaatggggttatgtgcccatctatcttaggaaaatatttcccccttacttagcactgtctggagcaggaagacgtaaggcttgtctaagtctgtgccccaacctccaagttgcatcctcagcaacttcagctaattttagatttagctctttttccaggctttgggcagtctgaaacttgggagctgaggggggaagagaagagttaagaagccctagtcaaacaccgatgagttctacatgaggctcattctagccctaacctaacaactgggtgcttctaactattttccctctacccaggttagagatctctccaacctgtccacttgtatatccaatcccttctttttgatacctcagtccctaaagctggttccctgaaacagtgaatgttccttgctccccatttccactggcctatcagaacacttaattcttgttagaattctgctgttttcactttctatatttgcttaagacctggtactatatttaaaatttctgatgtagcatatgcagcagtttccagacttcagtccaaaccccaaagagcctgcaatcatggtgtcacaggtgactcttccggggctaagtcacaagatatggttccatacccaaaaaacactctacataaccagtggttttaaaatttttcttgtcttgccatgccatgctgacaaaaggccataaagaccttaaggaatatacaattgctagcaattaaatcaaccttgaacaggttgtataccacttaggtctggtctgagctcaagttttgaacatttacacatctagaacattctcctaagtgttactctggtggtgtaaagaagcaacacgtcagactttgcctgtgcctgactggctgtgagtcaaacacacagtatcctggatgactgctattttggcatttgctagaatgtcttttgccaaattcctccagcattcatttgaaggcatcaaaatccgttttacctcccaaagagtatttgatttttcttggccaaaaaatgcctgttatgatgtacttattaatgttgctagggtaaaacagaagtaataaaatttggagacccttttggatctgtcagggatgtgccattatgcaaatgtttcttattagaggttggtacctgactattttttctttggaccaactgccacctgagcagtgttgatcccattttttaaaaatctatgttttatattttatgtttatatatcataaaacttgagtagccccatgctactttgaggcatttaagaaggtgacatcaggtactttktattcatcagctgggaggtttttattttgtcctgaagccaaytaactagaatgactaaaaaatgttatacatgtgctcctgacagatcttcctcgtagtaaactctctctgaaggcactgcttggatgaactaagtgagaaatgtatgctgacctaagaraagcctctggccagagaaactgcgtcatatgtcacaaaaattaaaggaacaaatcctaacgcagcattgcccataatatgtactgagagggcacttgtcaacaggatcaaaacaagaccagaaatgcctactccaaactctgtggtttgtttcagacataacaacccttaagctagtgtcagaggataagggcacatttctcctgaccaaggttgaacttctctcaagttttttcttttttcaatctcttccagaactaagttccttcaattagtccctcttcaccctcacgcacctgctcaacattctcttatcttcaaattaaaaaaaaaaaaccctcctgggtcccttctaattactatttctgactctgtctttgaaaatagaggagagaagttgtttagagagtataggcaccggcagctgggcccttgcagccgattgggctcaaattctcatactgctatttgcatggctgtgtgattgcacaagttacttaacccttctgcaccacaatttcctcatcaataaaatggagctgaaaattgtagttgatcatagttattaagaggattaaataaaatcgtatgtgtcaagcacttagaacaaaaatcaaactgagttttacatattcttgaactcactagcttgtagattctcttggatttttctaatacaaaatagtatatcatctgtaagtaatgacacttgtttctttctaatccttatacttttttgttttgtgcatcggccttcagtacagtggtaaagaagcagtgctggtgagcatcctgatcatattcctgactctgccacttcttttggatcttcttccctacttggtcactaaaaggttctggtaaaggactctaatgaaattcttgttgttaaatccaacaggtacttttcaatcattattttgcctgactgttaggcagcactcaacattacaactacagttttttttttaatactttaagttctgggatacatgtgcagaatgtgcatgtttgttacataggtatgcatgtgccacggtggtttgctctacccatcagcctgtcatctacattaggtatttctcctaatgctatccctcccctagctcccccaacccccgacaggccctggtgtgtgatatttccctccctgtattcatgtgttctcattgttcacctcccacttatgagtgagaacatacggtgtttggttttctgttcctgtgatagtttgcttagaatgatggtttccagcttcatccatatccctgcaaaggacatgaactcatccttttttatggctgcctagtattccatggtatatatgtgccacatttgctttatccagtctatcattgatgggcatttgagttggttccaagtctttgctatggtgaataatgcctcaatacacatacgtgtacatgtgtcttttctctttttttttttttttttgatatggagtcttgctctgtcgccaggctggagtgcagtggcgcaatctcagctcactgcaacctctgcctcccaggttcgagcaattctcctgcctcagcctcccaagtagctgggactacaggtgcatgccgccacacccagcttttttttttttttatagttttagtagagttggggtttcaccatgttgaccaggaaatggtcttgatctcttgacctcatgatccacctgcctcggcctcctaaagtgttgggattacaggtgtgagccactgtgcccagcaacatgtgtctatagtagaatgatttataatcctttggttatatacctattaatgggattggtggtcaaatggtatttctggttctagatccttgaggaatcaccacactgtcttccacaatggttgaactaatttacactcccaccaacaaaagcattcctatttctccacatcttctccagcatctgttgtttcctggctttttagtgattgccattctaactggtgtgagatgttatctcattgaggttttgatttgcatttctctaatgaccagtgatgatgagctttttttcatatgtttgttggccacataaatgtcttcttttgagaagtgtctgttcatatccttcacccactttttgatggggttttttttattgtaaatttaagttctttgtagattctggatattagccctttgtcagatggatagattgcaaaaatgttctcccattctgtaggttaactgttcactctgatgatagtttcttttgctgtgcagaagctctttagtttaattagatcccatttgtcaattttagtttttgttgccattgcttttggtgttttagtcatgaactctttgcccatgcttatgtcctgaatggtattgcctaggttttcttctaggattttatggttttaggtcttatgtttaagtctttaatccatcttgggttaatttttgtataaggtgtaaggaaggggtccagtttcagctttctgcatatggctagccagagcttttttttttttttttttttataacaattctcagtggctgtcaagatggctgaataggaacagctccagtctgcagctcccagcaagatcaatgcagaaaacaggtgatttctgcatttccaactgaggtacccagttcatctcattgggactggttggacagtgggtgcagcccacagagggcgagctgaagcagggtggggcattgcctcacccgggaagcacgaggggtcaggggatttcccattcctagccaagggcagccttgagagactgtaccgggaggaacagtgcactgcggcccaratattgcacttttcccatggtcttcacaaccggcagaccatgaaattccctccagtgcctggctcggcaggtcccacccccatagagccgagcaagctaagatccactggcttgaaattcttgctgctagcacagcagtctgaggtcgacttaraatgctcaagctttgtagggggaggggcatccaccattgctaaggatggagtaggtggttttgccctcacagtgtaaacaaagcctctcgtaagtctgaactgggcggagcccaccacagctcagcaaggctgctgtggccagactgcctctctaggcagggcatctctgaaaaaaaggcaacagcctcagtcagggacttacagataaaacccccatctccctgggacagagcacccgggggaaggggcagctgcaagtgcagcttcagcagacttaaatgtccttgcctgacagctcttaagagagcagcagatctcccagcacagcattcaagctctgataagggacaggctgcctcctcaagtgggtccctgacccctgtgtattctgactggaagacacctcccagtaggggccaacagacatctcatataggagagctctcgctggcaactggcaggtgccactctgggacaaagcttccagaggaaaaaacaggcagcaatctttgctgttctgcagcctccactggtaatactcaggcaaacagggtctggagtggacctccatcaaactccagcaggcctgcagaagaggggcctggctgttagaaggagaactaacagacagaaaggaatagtagcaacatcaacaaaaaggatggccactcagagaccccatctgaagggcaccgacttcaaagaccaaaggtagacaaatccacaaagatggggagaaaccagtgcaaaaaggctgaaaattccaaaaaccagaatgtctcttctcctccagaggatcacaactcctcgccagcaagggaagaaaactggatggagaatgagtttgacgaactgacagaagaggcttcagaaggcgggtaataacaaactcctctgaactaaaggagcatgttctaacccaatgcaaggaagctaagaaccttgaaaaaatgttagatgaattgctaactagaataactactttagagaagaacataaatgacttgatggagctgaaaaacacagcacaagaagtgcatgaagcatatacaagcatcaatagccgaatcgatcaagcagaagaaaggatatcagagattgaagatgaactcaatgaaataaagcaaaagacaagattagagaaataagagtgaaaagaaagcccccaagaaatatgggactatgtgagaagaccaaatctacatttgattggtgtacctgaaagtagcagggagaatggaaccaagttggaaaacacttcaggatattattcagaagaacttccccaacctaacaaggcatgccaacattcaaattcaggaaatacagagaccaccacaaagatactcctcgagaagagcaaccccaagacacataatagtcagattcaccagggttgaaatgaaggaaaaaatgttaagggaagccagagagaaaggtcaggttacccacaaatggaaacccatcagactaacagcagatctcttgacagaaaccctacaagtcagaagacagtgggggccaatattcaatgttcttaaagaaaaaaattttcaacccagaatttcatatccagccaaattaagcttcataagcaaaggagaaataaaatattttacagacaagcaaatgttgagagattttgtcaccaccaggcctgccttacaagagctcctgtaggaaacactaaacatggaaaggaacaaccagtaccagccactgcaaaaacataccaaattgtaaagactatccacactatgaagaaactgcatcaactaacaggtaaaataaccagctagcatcataatgacaggatcaaattcacacataacaatattaaccttaaatgtaaatgggctaaatgccccaattaaaacacacagactggcaaattggataaagagtcaagacccatcagtgtgctgtattcaggagacccatctcatctgcaaagacacacgtaggctcaaaataaagggatggaggaatatttaccaaggaaatggaaagcaaaaaaaaaaaaaaaaaaaaaaaaaaaaagcaggggttgcaatcctagtttctgataaaacagactttaaatcaacaaagaccaaaagtgacaaagaagggygttacataagggtaaagggatcaatgcaacaagaagagatagctatcctaaatatacatgtacccaatataggagcacccaggttcataaagcaaagttcttacagacctacaaagagacttagactcccacacaatgatactgggagactttaacacccactgtcaacacaagagagatcaacgagacagaaaattaacaaggatatccaggacttgaactcagctctggaccaaggagacatctacagaactctctaccccaaatcaacagaatatacattctgctcagcaccacattgcgcttattctaaaattgaccacataatagacatctacagaactctccaccccaaatcaacagaatatacattctgctcagcaccacatcacacttattctaaaattgaccacataattggaagtaaaacactcctcagcaaatgcaaaagaacagaaatcataacaaacagtctctcagactacagtgcaatcaaattagaactcaggattaagaaactcatgcaaaatcgcacaattacatggaaactgaacaacctgctcctgaatgactactgggtacataatgaaatgaaggcagaaataaagatgttctttgaaacgaatgagaacaaagacacaacgtaccagaatctctgtgacacatttaaagcagggtgtagagggaaatttataggactagatgcccacaagagaaagcaggaaagatctaaaatcaacaccctaccatcacaattaaaagaactagagaagcaagagcaaacaaattcaaaagctagcagaagacaagaaataactaagatcagagcagaactgagggagatagagacatgaaaaacccctcaaaaaaatcaatgaatccaagagctggttttctgaaaagatcaacaacatagatagactactagccagactaataacgaagaaaagagagaagaatcaaatagatgcaataaaaaatgataaaggggatatcaccaccaatcccaaagaaatacaaactaccatcagagaatactataaacacctctaagcaaataaactagaaaatctagaagaaatggataaattccgggacacatacaccctcctaagactaaaccaggaagaagttgaatccctgaatagaccaacaacaagttctgaaattgaggcagtaatagcctaccaatcaaaaaaagtccaggaccagatggattcacacccgaattctaccagaggtacaaagaagagctggtaccattgcttctgaaatgattccaaacaatagaaaaagaggaaatcctccctaactcattttatgaggccagcatcatcctgataccaaaacctggcagagacacaaccaaaaaagaaaattttaggccaatatccctgatgaacatcaatgcgaaaatcctcaataaaatactggcaaactgaatccagcagcacatcaaaaagcttatccaccacgatcaagtcagcttcatccctgggatgcaaggctggttcaacatacgcaaatcaataaacgtaatccatcacataaacagaaccaataacaaaaagcacatgattatctcaatagatgcagaaaaggcctttgacgaaattcaacagccttcatgctaaaaactctcaataaactagctactgatggaacgtatctcaaaataataagtgctatttctggcaagcccacagccaatataatactgcatgggcaaaaactggaagcattccctttgaaaaccggcacaagacaaggatagcctctctcaccattcctattcaacatagtattggaagttctggccagggcaatcaggcaagagaaagaaataaagggtattcaattaggaaaagaggaagtcaaattgtccctatttgcagatgacatgattgtatatttagaaaaccccatcgtctcagcccaaaatctccttaagctgataagcaacttcagcaaagtctcaggataaaaaattaatgtgcaataatcacaaccattcctatacaccaataacagacagacagccaaatcatgagtgaactcccattcactattgctacaaagagaataaaatatctaggaatacaacttacaagggacatgaaggacctcttcaaggagaactacaaaccactgctcaaggaaataagagaggacacaaacaaatggaaaaacattccatgctcatggataggaagaatcagtatcatgaaaatggccatactgcctaaagtaatttacagaatgaatgctatccacatgaagctaccactgacttgcttcacagaattggaaaaaactactttaactttcatatggaaccaaaaaagagcccgcattgccaagagaatcctaacaaaaaagaacaaagctggaggcatcacgctacctgacttcaaactatactacaaggctacagtaacaaaaacagcatggtactggtaccaaaacagatatatagaccaatggaacagaacagaggcctcagaaataacaccacatgtccacaaccatgtgatcattgacaaacctgacaaaaacaagcaacagggaaaagattccctatttaataaatggtgttgggaaaactggctagccatatgcagaaagctgaaactggatcccttccttacaccttatacaaaaattaattcaagatggattaaagacttaaatgtaagacctaaaaccataaaaaccctagaagaaaacctaggcaataccgttcaggacataggagtgggcaaagactgcatgactaaaacaccaaaaacaatggcaacaaaagttaaaattgacaaatgggatctaattaaactaaagagctgctgcacaacaaaagaaactatcatcagagtgaacaggcaacctacagaatgggagaatatttttgcaatctacccatctgacaaagggctaatatccagaatctacaaagaacttaaacaaatttacaataaaaaaaaaccccatcaaaaagtgggtgaaggatatgaacagacacttctcaaaagaagacatttatgtggccaacaaacatatgaaaaaaagctcatcatcactggtcattagagaaatgcaaatcaaaaccacaatgagataccatctcatgccagttagaatggcgatcattaaaaagtcaggaaacaagagatgctggagaggatgtggggaaataggaacacttttacactgttggtgggactgtaaactagttcaaccattgtggaagacagtgtggcgactcctctagtatctagaactagaaatacaatttgacccagcaatcccattactgggtatatactcaaaggatcattttagtataaagtcacatgcacatgtatgtttattgaggcactactcacaatagcaaagacttggaaccaacccaaatgtccatcaatgatagactggataaacaatatatggcatatatacaccatggaatactgtgcagccataaaaaggatgagttcatgtcctttgcagggacatggatgaagctggaaaccatcattctcagcaaactaacacaagaacagaaaatcaaacaccgcatgttctcattcataagtgggtgctgaacaatgagaacacatggacacagggaggggaacgtcacacactggggcctgtcagggggtggggggctaggggagagatagcattagggaaatacctaatgtaaatgactggttgatgggtgcaacaaaccaccatggcacatgtatacctatgtaacaaacctccacgttctacacatgtgccccagaacttaaagtatttaaaaaaaaattctcattccctttgtttccctaatatgacatgttctatgttcatttcctttttaagctttctgtcccagactgctttaaagactatacatcctctgagttccccataaataaaactgtgacacataactcacactataattcagatgtggagagaaaaataaaatttcttcatttcatttagaactaatctgactctccttcctacactcacaagttagtgggaaaaaataactaaatgttcagttcagtgtaaagtgtattcttattcaataatttacaaaattcaattaggtcaatttcagtctatcttggattacccagtcagatgtgtccaggaagtaaataattagcaaattccaccatttgtcctagatattttccaatttaaccttagatttttgaacgtggcatttatggcaaggactcattttcctgttatgctgtctcttttctaacgaaagagaaatagctgttaagttctgacattcacttcccctctctggagtatcttgactacacttaaatgattcataccaaaaggctgatcaacccacatcaacaagaatcaattaaaaaaagcaaaaacaggggaaagtggaaaagtttactatgcctatgtacatacttgtatatgcacgtataaattcaacatggaagatcagatgatttattaagaaatatcagttgacaataaaactagtaataaagactattcttcaatagacagtacactaatatagaaggaggagaaacaaaatgataggagtggttagaaagggcattcagagtgtaaggaaggggcagaaggagaagagcagaaaggagaaatgtagtatttgtcacccattctctttgataagygaatacaatgctgttgtatcctaaatatgagaacagctgactttaatatcaggtcaaagcactatctgactaataggaaatgcagttattccttcagctcatgatcagggcttgaacaagatctgttgtcatttgtcactctgtcacagatagttcagtggaattattctgtttcttctgacctacagttgtatagtctctttgctgctatcattatgcacagcactgaaatgttactttaaacagtaccttagaaatcagctctgcagtcatctccttgattaatttagaaacacccaacacctagcataataccctggacagagtacatactcagcaaataattcctgaatgaatgaatgaagttctcctttcattgaagaagatggagtgatgtcgtagtcttcctttcttaaatattccccaaagaaaaagatgtgaacattttaaatttaaccctgaataaggaacaagtaggacagaactcaagagaaaataaaaaggggaattaataaatagctacaaatgtgctaatacctcacagcaagaatggaagtagacaagccacacatagtgaaaaaataattttgatgacaaatgacagaaaatgcattatgcgctttattgcaccaaggacacttccatatccttacacatttccatacccatacacattttcatttatgtcttcaaggtttattcaatgtccagtgccaactcaaggcaaatagaaaagtacaatgggccatgcacaaaaatactggctcaagaggctaatatgaatttaaatttcaatcttccttcacagccgctttcctggtgtttgctagctgactctgacacacatttttttggctctggaattaaaatacaatgttggtgtaattacttttccaagaatagcaatggtcactataatttttctaagcagttcctaayctttttacattttagtgtttgcaaattcttggaaacaccacaatacataatgtaatacatttggaagttatataaggatagccaagttcaacttcccttaatctgaaaatatcaaaaactagacatccacatagcctaagaaaagattatcctataacttttctacactgaataccaactggaaccattcttagaagatattaattcagattttgctatagaggtctagcatgccagtatcatctttactgtgaggacgtcctcttaggaaataattcaactgttagtcaatgaaaaaactaaggccaggcgcagtggctcatgcctgtaatcctagcacttcaggaggctgaggcgggcggatcacttgaagtcaggagttcaaaaccactctggccaacgtggtgaaaccctgtctttactaaaaatacaaaaaaattaattgggcatggtggcgggtgcctgtaatcccagctatgtgggaggctgagggagaagaattgcttaaacccaggaggcagaggttgcagtgagctgagatcgtgccactgcactccagcctgggcgacagagcaagactgtctcaaaaaagaggggaggggagaggaggggaaaggaggggagagggaaaaagaaaaaactgtttaaacttcctctgaccaattactaggccagacacgggtgccctctggcctgctgtctgatttgtcctttagcttaatgttcctaggcctgtggaaagttttaaatgttatgtgttggtggggtgaccctttccctaccataaagatcaataaattttataatacaaacatctatgacaaacaattctttttcaaaaatggatttattgagatatactttacctatcataaaattcaccatttaaagggcacaattcagtgatttttgatatgtttacaacaatctaattttagaatatttttgtccctcctaaaagaaaccctgtatccattagctaattctcattcctgccaacacatttcctaatccctaccaacgcctggcaactactaatctattttttgtctctaatggtttgcctattctggacattttataaaaagggaatcatacgacttgtggccctttgggttttaccataactttttcaagcttcatctatgttgtagtatgtatcagtactttctttttattgcaaaatcatattctattacatggatataccacattttgtttatccttttctcagtgtatagacatttgggttgtttccactcttaagctattatgaaaaatgctgctatgaacattcattaacaaatttttgtgtggacatctattttcaattctctcggttgtcatcttaggagtggtattgctgggtcacatggtaactctataaacatagagtttaacttattgaggaactgccaaactgttttccaaagtggctataccattttctattcctaccagcagtataggagggttctagtttctccacatcctcacaagcaaggcttgtctatccatttaattatagccatcctaatgggtatgaggtggtatctcactrtcgttttgattttaattttccctatgactaatgatgtggaacatcttttcatgtgcttattggccatttttgtawcttgtttggagaaatgtctattcaaatcctttgcccttttgttattgggctatcttttcattattgagttgtaagagttcttcatatatyctggatatgagtcccttatcagttacatgatttgcaaatattttctcccattttgtgggttgtctttttactttcttggtgacatttgcagcacaaagttttttattttgatgaagtccaatttagctattttggttttttttgagatagagtctcactctgttgcccaggctggagtgcagtggtgtgatctcgtctcacggcaacctccgtctcccaggttcaagcgattcttgtgcctcaacctcccaagcagttgggactacaggtgctcactaccatgcctggctaatttttgtatttttagtagagacagggtttcgtcatgttggccaggctggtcttgaactcctagcctcaagtaatctgctgcctcagcctcccaaagtgctggaattataggcgtgagccaccatgcccggcctcattatgattttgatctcatatctacactaattttgaatataatcatatacctagaaatccactgctaagccactttgtacttcttggcggaaaggcagcatgcattattgctgttgcctacagatttaaaagttgggtcaatttaaaaacaaattgcaatagtgcaaccaacagggaaaccctgctaaaaatggctggcatgtgctaccagccatgtcttagttatccatagaaatgagggagatagcccatgcaactgaaatccacagatgatatgcaatctttatttcaaacatagttttaagctcccaaaccagacctctaaccagagttggctcccaaaccagacctctaaccagagttgttaagaagtagaccactcatttgactgagttttacttctcctggaatctgtaccaccatctgaccaatacttccacaagcttcaaagtagcttaaagaaataaggcacacaagagtataagtaacccaaataaaccttaagctggacagtgggctccttaaaaaacagagtaaccctagtgaataaagggctggctttgctcctccattccatattccagccatcaaaaagtcactataaaaagcctttgcaaacaatttatttataaataatatatttgttgagatgtaaaaatggaaagtgacataatcaaattaactcatttatcaaatgaggaatcaataagaaaaaaagatagaatagatatttgtttcatacaacattgttagaagcaataggtagaactagaatatctttccttgtcctttctgtcatctccatttgcatttaaaatccttcagtcagtcaacaaatgttatttaatacctactatgtgctggaagtacatatatcaataatatataactcttgacttagaggaatctgaaattattcaagtctaggtcaacctactaattcctctatgaaaccttcccagagttctccaattgggaatgatcttttccattactgattttggatagtattttatcaacatctttattggaaagttataaccctctactttatgatttagttgtttataaacatgtcttgtctccagcactaaacaataatcttcttgtgggcaggatctatgtacaagtaaccttcctgacccctagatcaccctgtatatgaccacaataaattttagtttagtgaataaactttttaaaaaaatcaaatttaggaacaccagaagattaatataaaccatatctttcacaaaaattatatctatgaattattaatgcagaagcttattaccttagtctggaatatcagctattctagtttccatataaatgatttcttctcatcttaagcagtgtgcaaaaaaagagagtggttacatctttagaatatttcagctcaagtaataaaattcaaaacactagaaagaaaaaaatgatagagaagttatgcttgaggagtatctgataactaaagagtatttttctttttcttttttcttttgagacagagtctcactctgccggccaggctggagtgcagtggtgtgaccatggctcactgcagccttaacctcctgagctcaagctgtcctcctacctcagcctcccgagtagctggggactacaggcacatgccaccatgcctggctccctttttttttttttttttttttggtagagatatggtcttgctatgttgtccagcctggttttgaactcttgggttcaagtgatcctcatgcttcagcctcccaaattacaggtgtgaggcacactggccttttttttttttcttttttcagacagagtctcgctctgtcgcccaggctggagtgcagtgggataatctcagctcactgcaacctctgcctcacagatttaagtgattctccagcctccaccacactggtagctgggattacaggtgcgcaccaccacactcagctaatttttgtatttttagtagagacggggtttcaccatgccggccaggctggtctcaaactcctgacctcaagcgatctgcctgcctcagcctcccaaagtgctgagattacaggcatgagtcaccgtgcccagcctggcctttttttcttgaatttagaaaatattttcctaaatctaccccaaatgggcaatacataaacctacaaagcaaataattagatcctaaattgactatttctcactggtcctgaaattccagagccctgttaaactcttttcatctttcacctcctaattactgtatacattcagtcacttttttttttttttttttttttttttttttgagatggagtcttgctctgtcacccaggctggagtgcagtcatgcaatctctgctcactgcaacctctgcctcctgggttcaagcaattctcctgcctcagcctcccaagtagctgggattataggcacccatgaccacactgggctaatttttgtatttttagtagagacggggttttaccaggagttgaagaccaacctggccaacatggtaaaaccccgtctctactaaaaatacaaaaattagcccagttttaaagatattacagttttaaagattgacagttgtaaacatagtacagacttccaatatatctgataccatttcctttcctattattaacatcttacattagtacagcacatttgtcacaataaccaatattattattttaaaataaaatccatactttattcacatttccttagttctaacctaatgctctttttctattctaggatctcacaatatattctgtagtcatgtctccttaggctcctcttggccgttactgttttttagattttccttgtttttttatgatcttgacagtttcgaggagtactagtcaagtattttgtagaatgtctctcagtggggatttgtctgatgttttcctcatgattaactgagcttataggtttttakaaggaggaagaacttatagggaggaagaactacagagataaagtgccatttttatcacatcatatcaagggtaatactatgaacatttatcactgttaatgctgatcttcattgcctggctaaggcaatgtctgtcagaattttccactgtaaagttaactctttttttttttcctctttatgtgctctattctttggaagtaagtcactatgtacagcccatactaaaggagtgaggagttgtgctccacctccttgagaacaaagtagttacatatattattttgaatttttcttcatgggagatttgtcttttctcccaattattatagctttttctagtctctccaatttattcagacttttatttatatcagtatggacttatgtatattggttttatactttgggttacaatgcaatactactttattttgttgctcaaatttttctggcattgaccattgggagctctttcagttggatcctgtgtccctttaacatacgcaaccattgtgtttcttttgagcacttactgtctggcactataagatgcttcaggcctatattgtatatttcctgtccccatcctagaatcagccatttctctaaggatccttcattcctttacctgagaatggtattcgaatctaagagccaagtgcaaggtgtacttgttactagttgggtactattgcttccacagccacttctttttacataacatttgtttccatttccagaatcaaaatattgctcaggacaccctgagatagtgcctaggaacaatattagagaccagaagtcctttcactctgattttgggaagcaccactctaatatatcagttttagtcccaacaaaagacaccatgaccatttcttaaacacagtgaacaattacactccatttaatacttatccagtggtatacttctctgtcccttatagaatcatagaatgttagagccagaaagggccttagagaatactgaattcatttgttcattcattcacaaatgtatattgagggtctagtatgtgctgggtagtatcctaggtgatggggatgtaacaggacataaaatgagacacactccctgtcatgagggagtccatggtctggtaagagagatgcatgctatttttaaaatatcacacaaataattacaacagtgtaactgtgctaagtgttacaaagaagaggtagatgatattatgagataatactgcagggagacttgatctgttgtggattaggagtcagggaaggcttcccagaggaagctaaaatcagatggaataggaggtaactaacttagagcatgaaaacaacttcaaacaaggggaaggcaaaagtttgcagcaggagagaatgtggtacattaaaaagctcagagagttagggggatactggcaaaagatgaacatggaaggaaagcaaccacagtagtccttgccagtcatggtaaagatttagtctttattttaagagcaatgggaagttcttgaagtaaagttcattagagttttaaggagggtgggatgggtagtgacatcttgaaattagtgttttgcaaggatcgttctggttgctgtgtggagaatgaatatgagtgggtgaaaagcccaaatactagtatttttactggaatagcagaaaaagatgatgctagagagcttggatgggagcggtggcagtggagatggagaaaagcagacagatttgagttatgtaggaagcaaaattgagaagactctgtgacatactggatatgaaacaagaataaggatggcttaaggcaagacctaggtttctagttttgcacaatcagatggacgatggatgatgtcattcattaataaagaaaacactgtaagaggaccaggtttgatagggaagtccacgagcgcagttcattctgagatatccaaatggaaaggctaacaagataattagatataaaaaaactgaagctcagggtgagaaatataaatttgatatagttactaattttatagatggtaactgaagctgtaagcacagataagatagtttaggaaagaattcagaatatgaaaagaagaggcactgagcaagacaagttattcacaaaatgagattaataatttccatttcatagaattatagtcaggattaaacgtcatcacatgtgtgaaagcaaatagcaaactgtaagcacccaacctttaaagcattgaaattgtgcattttataaaaaacactcctatggaatatatctatggttgtgtgccttctcatgttcaactgctttatgtaatgtatatatgatcacttatgtcttttaaaacacaaaatctctggcagttatagtaaaggattaacagctactaataacatgacaaacagtgttgttttaatgttatttcattttcctaatcattggcccacaggtgaaaatgaggcattgagggaagaaagcatcagggtgtgggagcagcttttatcccaacctctatcctattatcttccctgcaatcgtccgctctccagagccatttggaacaactgtttacaaccataaaagtcccaaacccgccagattttactagagtctcttcaaatacacattaactaattccacaacaaataacatcttgattatagaaactgattcttgagtgaatgcaaaaacatctaatacaaagaatggtttaacagcttgtaatcatcaactgaatgctattttcgtaggggttgtctgccaaagaatagaattattctagctataataattctatagaattatagctaattctattctttggagaatatattaataatcctctaattagattctacccatattttaatcatatgtaaactctttgggataaaactgtgagtgatatgtcagttttcaaaaaggtaataccagaatcacaaggatgaaaggtacacaaggatctgcttccaaaagagtggagctggctgggcgcagtggctcacacctgtaatcccagcactttgggaggccgaggcgggcacatcacgaggtcaggagttcaaaaccagcctgatcaacatggtgaaaccccatctctactaaaaatacaaaaattacctgggcgtggtggcatgcgcctgtaatcccagctactcaggaggctgaggcaggagaatagcttgaacccaggatatggaggttgcagtgagctgagatcgcaccattgtactccagcctgggtgacagagcaagactctgtctcaaaaaaaaaaaaaaaaaaaagagtggagctgtttcctaagattgcacagtttgtgcactgctcaaaggcacctggctataggatctgaaatgcagccctgcttctctcacaaagctttgtgaccaggagctagggtgggtagctggggtggaagttgtttgtgtcttattttatttttttacttggcccaggattaatgactctggcaccttatagactagtagtagcactgyagaagcatcaaacacaagaacaattatttggactccagaaaaacactggagtcttttataacttgatttgagtttagatagtagtctatgtttttacgacaaaagcaactactaaagtgcttttattaaatgattagcactatcctcagctactaagaggatctcatttgcttgttgaagccctgtaactgacactatactatcaacataaagtcactatacacactacaagctttactatgcaatgcattttaaaacattgaaaataaattaaaaatcaagtcctttaaattttaccaattattgctatgaaaaagccaccaaataggaaaaataactcttcaggaaaggaaatatgaaacattcttaaagtagctgtggtgctctgtggtacaaggtagatgtggcacaatcatctgcaatccaaaggcctcagttcaaatcttggcctctgatcttaactattgtgtgaccttaagtcacttaacctctttcagcctcagtttcttcacctatacattaactggattaaactaaattatttctaaggcctcctccagcactgacgattctctaattctataaatgtcatgattatacatctccttttctttgcgtgatcttcttcattttctataccaggtattttctaaccaccattttacctccttatcctggtacttcttcccatttgtccccaaattgaaataacctcctcccttattcattaatcaacatatgattctctctcatcttcaaacctttccaaacaagtaactttaacattttcatttgcagttattcactgaagaacttaaagctttaattacttctttgtccactgtccaaattctttctgacaacttggcctagaacaaatactccagcttatatttaggyagtcaacaagcatttaaaattcaaggtagtggggggattcccaaaaattaaagatacccaggaggaaaactagcatayaaacaaaccaggatagaaaaaatctgaagtaatatttaaatgaaagagagtagggcaaatacagtgaaaataaactctaaatagccagagcagcagaaatctcaatataggctagtcagttcatctgcaaagaagaataagaattgaattgactgaggaaatctctgcatgtggggcaacctacacagaaacccaggtaccaagcaattataattctgaaaagcctttccaggtgttttcttttttctagaaaagagagatggccaggagaacaagtttcctaatgacagttttagttacatgtttcaatagtctaaagagtgtcagccatagcagtgtgaaaaaatgtctcattagaaaaaagaacatgactgtcaatttaagcaattccttcaaatacactagttaaggggtcatcatgctcataaaggatgacttcagaaacctaggctaggaagggcactctcttggcaagtgtgtcagacgcctctccttggttctcctccacaccattatctcattgacccttaaacacctcctcagtttccctccacaccattgtctcatcatccctgaggacaaccagggacattgcaggagggaggaggaaatcttccctgttgactacaaattaactatatacccagagcttatggattctcctaccacttccaaacttggatgaaatccttcaccagggcatggaatctggctttccaaatggaagggcagcatgacaccactcagaactgtgagttcactctccatgactgacctttgataatgggaaacaagcagccagagaggagatgggcagataaattccctctccctctttgctcttatgaactgttctatttttttttttttttctcactctgttgcccaggctggagtgcagtgacacgatctcggctcactgccacctctggctccggggttcaagcgattctcctgcctcagcctccccagtagccaccacgcctggctaatttttgtatttttagtagagacggggtttcaccaagttggccaggctggtcttgaactcctgacctcaagtgatccacctgcctcagcctcccaaagtgctgggattactggcgtgagccaccacgcctggctgaactgttctatctatcctatctggagatattgcacatggtcaagcatatgtacttgctgaataaccagctgtgtctctttgaggatcatcatgacacaattgctaacatggtaatctaatcgccttgctttgcttctcaaagcttctcacttctcatctcttttccttcactcttactcttctgaaattgtaccaccaaataaagcttcacttaatttccagtcaggctcttgtttctagagaacccaggatacaacagcaacaaaatccaaaaggaagtaaagaaccttggattaggaatcgacacacattagttctaattttgctataattggttctgttattaattaactatttgatcttgaacaatgaacattctgaattctgtaaaatgggataggagttagagaagagggactaagcttcatgactgctgggtcccttccagttccagcgctttrtgatccttaggaattaaaaacctcaaagcctcaaataacccattagaaaatgggtcagtgtgaaaaccatggagtcctatatatcccaattcatttgaccacatccatagtttggatcagctttatgaaatacatctataacctaatcttagctctgaaacagggccattttcattatcatcagcagccaatgttatttgacgtgtaacagtatattctgcaacttaaccaaatctcacaaatccaataaaaccaggccacagaaggacttatgagaattacaagaccacatctgttctgaggagaagttataaatacaagaatatttcaaaaaaacaaatatcaagcagtatcaagtgaaggaagccagtcacaaaagaccacacatggtaggtataattatrtttatatgaaatgtccagcattggcaaatctatagagacagaaagtagatttgtggtttgcctcagaccggaagctggggaactgtggagtgactgctaaggggcatgaggtttcttttggaagtcatgaaatgttctaaaattatattgtggtgatggttgtacaactccgtgaataagcttaaagccactgaattatgtactttaaatagataaattgtatgatgtgtaaattatatctcagtaaagctctttttaaaagtaatgggctttgggaggccgaggtgggcagatcacaacgtcgggagatcgagaccatcctggctaacacagtgaaaccccgtctctactaaaaatacaaaaaattagccaggcgtggtggcgggtgcctgtagtcccagctactcaggaggctgaggcaggagaatggcgtgaacctggaaggtggagcttgcagtgagccgagattgcgccactgcactccagcctgggcgacagagtgagactccgtctcaaaaaaaaaaaaaaaagaagaagaagaagaaatggggctgttttattgtggggaatgaactggctcagaagcaaaaatgtgtgaggaacaaataggcatttttctgtaagaacagagcatttttaaagattttatcttttaaatggctctggaaggggaagcatatagtaactttatttctgtttgacactaaatttccccaagcaacaaagagccaggatctttgaggacaaataacaggaaaaacttaggaacctgtgcaactggcagagaagttttaatgtgagcaaatgcaagatgacacatttggtgtgaagaaccctcaactagcatcaatcacaaactacagaagggacctgggagtgagcggattattcaactcaacagaacattttggagaaagctatgatatacaaggtattatcttaagagctgtagtaaagagggaaatataaagatgatataaatagattcccaccccctcctcgatttcaaagagcctttaagggacagaacatgcacatttcaaggccaggtgaataaatgctatgatagagtctgcataggttctagaagggtaaagaaagccttcatagaagaactagaattttctctgggccttaaacatctgagaataccaagccaatatgctggataataaatacaaaaactaaattattctactcttatttaaaacaagagatattcttagtatgggtcactatatttctttctttcttttttgagatggagtctcgctctcttacccagactggagtgcagtggcacaatcttggctcattgcaacctctgcctcctgggttcaaacgattctcctgcctcagtctcctcagtagctgggactacagccgcacaccaccacgcccagctaattttttttttgtatttttagtagagacggggtttcaccgtgttagccagaatggtctctatctcctgacctcgtgatccacctgcctcagcctcccaaagtgctgggattacaggtgtgagccactgcacccagctagggtcactatattttataaggtaaagtaaaacttcatttatatagagacaggtttctggacaaatccctggtttcaaattcagaaacacctttaaaaaatagtatttaagtttcagatcaagtccctgaacacctggcaacaaaaatagccaaaagtgctaaagagctgcactggctatttgtaggaaaagccttcttccaatctgctgacaatgtgtacgacacaaaggagaagacaagaaggtaagtggagagagctgtcagatagaacagagattagaagcagaagcagaggttggaaatgatgacagagtaggcagcaaggttgcaagtagcagacactggcacataagaaagccagttacaaaagagggagaaaagaaactcattctacagcctaatccaacaaagagttaccagctcataagcagcccttgaaggcagcgagggaagacagcatgcaaagagtgcctaaggacatgctccttagtatccacactaggtggatacccagaagcgtgaaaaccaaggcagttcaagggcccaggggagaaggggctgtgacagtgctgagctctacagtgacaaattaaatcattcagcttcatgccctgcaccatatatatctacaacacagaacactgacattcctaaacatgaccttgaatcaacaatagattaaagtaagataaacattctctgtttaaaaaggtacatcttagaaatattcccttcaaaattaaagtcaaaatatttggggcagaaataataaaatcctcaactatacagcacacttatttttttagtccccaaatggcttaggcactgatgacctaggacaacagaaatttcattccataatggaacaagagggcagaaatgataattctatgacgactgcctaaaaaaagaaaaggtgagaagccacttaattacataaaataatgaaaaaggaaaaaaatccctggcacactaacttattcctcacatctgaatctgagaatacttggattaagggcttgagctctaagagaggaactgagacaggcccctgtgtgcaaacattttatatcccttaaaaatatataggctcagtgaacaggaggaaactgtttcttatttgtctctctatcctccacagtacttagacataatgtctagtatacaacataaactttcaaactgtaacactcttctctgccacttaacaactaaatcttatttcactgtgtacttgctgctgcttttgattagctcagaagagtaaggcagtaccctcctacatttttcagctcttgacacaaagatacatcaatggggaaatcctatgtccttcctgactccctactcttatgtgatttacagatgcaattttatcattatattctcttttctctcacttcccacaacctagacattccagcttttctcaatatcatagttacttaactctgactccttcacagtcaaaatctaggggcagatttcagggacaagtctcaatgcatttgggagagattatggtttcagtctgggcttaaagtagacaaactgtaatgtccatggatgctctcacagcctcagtcctaaagaaaagtgtagggttctcccaagcttcaccaagattactgctttttagcaataaagggcggccagtggtctctcactattagtctggccctttggctggactattatcattaccctttatgctttgaattgtttagagcttctgatataggccataaatgtgtaactactcatcccagtttgttatgccagtccaatttacctgctgctgtcagggaagtccataaagtttgacatttgacatttgaatcagaatgttaacttttcaaaaactattattactcgttgcattaaaataagctggggtgggtggttatgaatgttgcaggatctttgctttaaatttccagcctttgtcatggtcttttctaatggcgagatgcattaacatttcccatatggtgttaaatctgaaatacggccagcaatcactttcccccaccattttctgataccggacgtaatacttctctttcaaagatggcatgcacatgcttgctgaacaaatgaagtgtacaggtacatgagtggctagggacagttcattcttcctgaccatgtcttttgtgagatgcacaaagctgctaggcttccagatagtgaggtcagtgggaaatgtgagaaattgtaggttagatacaagtgcaggaaatacaatctgaacagccttgctgcaacatatttagatagtagtctgtatactctttcacagtgattttgtcatttattttcctgatgtaaataaagactttattttcttgtgtggtgatgcctttttactttgcaataaacatttttggcagcaataaactttaaaaagttcatgtttataaaaatttaagtcccaaatttccttctcaagtaagttgattatgaatatgtataccacacaaaatactgtatccaccatggggaccacagagatgttacttccaatattaaaactagaagacacggtctttctgaagaagtatcagtattacttcaaaagttagtagctacaggctgggcgctgtggctcatgcctgtaatcccagcactttaggagaccaaggcaggcggatcacttgagaccaagagttcgaaaccagcctggccaacatggtgaaaccccgtctctactaaaaatacaaaaattagccaggcatggtggtgggtgcctataatcccagctactcgggaagctgaggcagagaactgcttgaacctgggaggcagaggctgcagtgagctaagattgcaccactgtaccccagcctgggcaacagagtgagactctgtctcaaaaaaaaaaaaaaaaaagtatatgggagaatgtacataggttacatgcaaatactataccatttatataagggattttggtatcctcaatgggtcctggaaccaatcccccccagatacagagggactactgtaattttttttgtataaggagtatgataaaggttgaggttattgcacaaggatatccaatttttccttggtacctttgttaaaaaaaatcaattgactgtatatatgtgggtccatttctggactctctattctgtttcactgatgaatatatctatccttaagcctaaaccatacaattttgattactggtgctttaaacttaaaatcaatgacagtgaaatctccagccttttctttttcaaaattgttttggctattctacgttctttccatttccacatgatttcagtttgtcagcttcttttttaaaaaagccagctaggaagagtttgtatagaactagtacaacgtataagtaaatctatctaggaatacagttttatttttggttttgagattttaaaccattaattaaatttctttaaaagacataggactactccagttatctttttcttcctgggtgagctttggttgtttatgtctctcaagaaatgtcatttcagttgtcaaatttattagcataaatttattcatgtatttatgtattttaatataaaacagtctaaagtccaccaatgtataaaacaatttttcaaataaatattttgaaaattaggctttctgctcctcccgtttgacaacagcatcttcttgtgcagggccagctgcacccctgggacaccatggtgaaggtgaaggccagggtaaatgaatttagttgtactggtcacctggtcaccagggctgcttttaactctggcaaagtggatattgttgccatcaatgatccctttgttgacctcaactacatggtctacatgttctagtatgattccacccatagcaagttccacagcatcatcaagcctgagaatgggaaacttgtcatcaatggaaatgccatcatcatcttccaagagagagatcccaccaaaatcaaatggggtgatgctggcactaattacatcatggagtccactggtgtcttcactaccatgaagaaggctgggactcatttagacgggggaaccaaaaaggtcatcatctctgccccctctgtcgacgtccccatgtttgtaatgggtgtgaaccatgagaagtacaaaaacggcctcaagattgtcagtaatgcctyctgtaccaccaattgctcagttcccctggccaaggtcatccatgacaattctggcatcatggaagaattcatgaccacagtccatgccatcacggacacccagaagactgtggatggcccctctgggaaactatggcacaatggctgtggaattttccagaacatcatgcttgcatctactggcactgacaaggctgtgggtaaggtcatccctgagctgaacaggaaggtcactggcatgatcttccatgtctcccaccaccactgtgtctgtcagtcatggatctgatctgctatctagaraaacctggcaaatataatgacatcaagaaggtagtgaaacaggctacgtgcagtaaaactcatgcctgtaattctagcactttgggaagacgaggtgggtggatcagctgaggtcaggagttcaagaccagcctgaccaacattgagaaaccccgtccctactaaaaatacaaaattagctgggcgtggtggcgcatgcctgtaatccaggtactctggaggctgaggcaggagaattgcttgaactcgggatgcggagggtgtgatgagccgagatctcgtcattgcactccatcttgggcgacaagagtgaactctgtctcaaaaaaacaaaacaaaacaaaacacattgcctctacctccccctttagaggagcttagaaaaaataaaagtgaaaaaatcctactgaaataatatcagaaagcacactgtagtcttatattacctccatttcaaatccaactttcagaaaaggaagaaaactattttgggtaaccaaataacaagtcccttttaagtcccagaatttaaagatcactgaaaaatgaaaattatgtcttgtactcaagatgctctggaaattatttttgaattcccacaccattatcattaatggacaccagctgtgggctcacagtatcatgggtatattacacaataaaaacatagacaggatgtcactgcacatatgccatgcacacagcttggttctaactagcatcactgagaatagacatttattaaagaagatagtgtagcggttaagagcacaggctctggagtcagaccacctgggttccaatcttggctcagccacctatgcaatgtgtgaccttgggcaaattatttaagtcccatttcttcctttgaaataactcacaaagttgctatgagaattaaacgaaataatgaatatacagtacttagtatagtgtctaccccttagtaagcactcaataaatattaaggattatcactattggtactactgaataattataatgstaaagaggtcctggtaggactagggtttacaaaaatatatggcacagtttctcagctttcaagaacttacaatttagaaatcaattcaaaaagcccaaaaggaaggggtaatgaaggaaggaaaaataatgaagagtatcattttcctattaagacctgaaagttaataaaacaaaatcactttaagtcacccaacccaaacaggtaaatatttaatcgatttagtgtcatttgaacactcaacagagttaataacactatgcatatgatggaggttgagtacgatctagtacacaggttgacttagacagtttaatataaaagtttgggactgggtttatccttgagaatatattgattttggtcatgatattgatttcatgacccacccatccttaaagagccagctgagagactgctaccacctaccaaccagctaacagtagtcaataagcatataaactgacctacattttgtaagaaatatttttaactttaaaggtcaacttatatgcagtgctttagagtttacaaagttcctgcactcattactttttatctccataattgggagatgaacatgacatccttcacaacaattctagggccttcattcaaaacagatgatacagtttgtcagataaggtgactttatatcattttactcaaccagttccactttttttttactcttaatgttttgagattaaagagtaaatatgctatgcactgattgtttttcaaaaacaaaactgacattcagaaaaatgaggttttcaactccaggtgctctgatttgctgtaaagctaaagcataaattaccttctcagtttcacctcccactgtctaccccatgttttctgctttatcttttcaagatttttctccacagatgtaggtgtccaggttcttgttttcaatttaaatcaaaataattcaagaaatactcaattcaataaatcaattcaagaaatacctactasctctactagctctgggtggctgctggagaggtccacagataggtaagtctctgccttcacagaattcacaatctactttcaaaagctataatacgaggtcaaatagtaagggccacacagtcgtttacgatgtgatagggattcaaagattggagagcgccctctggtggaaggggaagagatgatcaacagagacttcaaggcatttaaattttacacagaatttccataggaagaactgaaggaagacaggcattctggggaaaaggcattacgcaggaaactagtggcaagggggtgttcacggaaaaatgagttgttcagatctatcagagttgagagaacatgttatgaagggctttgaatattaggctgggaggtcctatagataactcgatattaaatgagtcatcaaagtttttaggcaggagagttaggtgataagaactttactttgggaagattcatctgatagaaagtgtgtaagaagagtccaaggggagactttggagttggaggccactgagagggttactacaatattttagacgaagtgaaactgctctttcaagattaaaagtaaagggaaggagtcagagaggttggtagcttaaaggaaaaataaaattgggcaaagctccccctcagttcttttccttaaaggggcaacaaagacctgagattgtatgaaggcagaaaagaaagattagtagagaacaaaatattattgatgctagtggggagaaaaagatcaatcactgaattaaagtccaagaagaagagggatggaatggaccaggtggaggtattcattttgaaaaggaaaattcccgtaattcaaaagaaagagagtataaaagggaaaagagtgaaaatacatggaaacttattgagacagaggaagttgaagaatttatggcaaataatctcaactttctcagagaataggaggcaagctcatttgcatggagaactggggagagactaggtatgtgccatgaattaggtgtacttagaaaagacattgagagggatataatcatgagcaaaaaagtactggttaaaatattgcttagacaccaaagtaaatgcaaccaaataaaaaatagttaaaatggtcatattcaaaatgtaaagacttttgtgcttcagaggacactgacttaatcagtgttaggctgctataacaaaataccatagactgagtagtttataaacagtataatttattgcttacagttctggaagctagaagtccaagatcaaggcaccagcagatttggtgtctggtgagggcctgttcctcatggatcatgccgtgttgctgcatcctcagagggtggagggcagagacaagccccttgagcctcttttataggcatactaatcccattcatgatggtggagccctcatgacctaatcacgcctaaaggccccaactcttaatactacagcattggggattatttccaatatataaatttgagggaaatatcaacattcagaccatagcagacactaccaaaaaagtgaaaacacaacccacagaatgagagaaaatatttgcaaatttgatatctgataatcatctggcacccagaatatacaaagaactcttaaaactcagcaatgaaaaaccaaataatgcaatttaaaaataggcaaagattgaaacagatatttcttcaagtaaatacaaatggccaataagcacatgtaaagatgctcaacatcatttatcattaaagaaatgcaaatcaaaaacacagtgaactattccttacctaccaggatggtcatagtaaaaaacacaaatggacataataaaaaataacaagtgttgctaagagtgcaaagaaactggaactctcacatattgctggtggtaatataaaatggttcagccattttgggaaacagtttggcagtttctcaaacagttaaatatagagttaccatataacccagcaattaatttcattcctatatacccaagagaaatgaaaacatatagccacacaaacttgcgcacaaatgttcatagcagcattatacatgatagccaaaaagtggaagcaacttaaatgtctatcacttgatgaatgagtaaagaaaatgtgggatatccatataattgaatattatttgccataaaaatgaagtactaacattaatacatgctgcagtatggatgaatctttaaaacattatgctaaatgaaaaaagccagacacaaaaggccacttagtgcagaattccgtttatatgaaatgtccacaataggcaatttgatagagaaagaaagcagattagtggtttccaggggctgagggaatgggaaaatgggagagtgcagagtgactgctaatgggtacgagattccttttttgcagtgataaaaatgttctgaaattacatactggtgatgtttgtacaactttatgaatactaaaacccactgatttgtatactttaaacaggcaaattttatgacatgtgaatcttgtgttgaaaagattgctagcaagtttagatgacctgtattttgttccagatctattcagaatggaatcatgattttctcaggctacaacacatcatagaagtcagatgtgagggttactgtgaataaggtattgggaaggcaggaaggcagagtcaaggaatgaatagcacattgctgaaattgatatctataaagcccaggctctttcaaaatccaataataaaaacacaaacaatccaattagaaaataggcaaaagacatacaaagacatttcaccaaagaggatatactgatggcaaataagtacatgaaaagatgttcaataacattagcattaaggaaaggcaacttaaaaccatgaaatatcactacacacctatcaggatggctaaaataaaaaatagtgacaacaccaaatgctggcaaggatgcaaagaaactgaattattcacacattgtcagtgggaatgtaaaatggtacagccactctgggaaacagtttggcagtttcttacaaatctaaacatgaaactaccacataacctagcattacattcctaggcatttatcccaaagaaatgaaaacctatgctcacacaaaaacctttacacaaatgttcataacagctttattcataatagctgaaaactggaagcaatccagatgtacttcaacaggtaaaggttaaacaaactgttataccatggaatactactcagcaataaaaaaaaaactgttgatacactcaacaacctacattaatcttcaggaaattatgtggagtgaaaaaaatcccaaaaggttataaatggtatgattcaatttatatgacattcttgagatgactaaattatagaaatggggaaaggattagtagttgccaagtgtcaaggatgagagggtgagaggtgtctataaaaggcaataggagggatcatcatggtgacggaaatgttctacatcctgactgcaagcatcattgtcagtatcttgactatgatattgtgctgcagttttgcaagatgttaccatagggaaaaactgggtaaaagatacataggctctcctctttgtattatttcttacaactgcatgtaaatctacaattatctcagtttaatttttaaaaaatagctcaggttaagggggaggcaagacaaatcaaaatctggcatgcagttttcatattcataagaggattataataactactaaggaaattttttaaatgtatacaaagtaaggagatttgggaacacaaggtctcttaatgacaaatggtaatttaatattacttctaccactattgaaatggcttaggaactacaaatggctaaccatttccagaggatttattctcaagggaatgtgatggcataagtgcctcaaagggtaaattaatgatacctgaaacccataggaaaccagggctgggtgcagtggctcatgcttgtaatcctagctctttgggaggccaaggtgggaagattgcttgagtctaggagttcaagaccagcctgggtgacagaccaaaaccttatttataaaataaaaataagaaaaaaaaaaaaggcagatcctctaatgcaagctaggccctctcattgagagtctgcttctgttccagaatgcttgaacaaataatgcttgaacaaaagcttaaagaacaaatcacaaaagaatggatctaactaatagttatgtgaattagagatctgcagctatagcacataagttagcaaaactacctccagatttgaatctcacctcaccaatactgtgtgacctcagataagtaatctgtggagcctcagcttcctcaaatattataagaatcaaagagatgatatatacgccacacttgacatggtagctccataagctcaataaatgtttgctattattaataatcaaaaggggctagagtaattaacttatgtagtccaacatttcctgcatgaaaggaatcactcaacaacattcttaacatcctatccaacctttacctgaacatagctactgataggtaactcactgcttttcaaggcaatccattccaatgttaggcagctacaatggctagaaagttgttccttcgatttttgtcccaaatcatctctgtaactttcaaacgttagtcttggttctgcctttttaagctgccaaaaaaggtctggcccctcttctgcacagcatatcacatgtttggcacctgctatcccattgcctggcatatttggaaactagtctgtagtctgctcctctctcttcatgtgacccaagacacatctctctgagcctgcttcctcaacttgaaagtcaggatttcagatcaaataatctctcaggctttcttctcccagaagcaagagctatacttttacttatgtctttgcccagttattctgattcatcctcccaggtcagttttcagtccccacatccacttggtgccttcctctgagtacaccctagctggttagcatctttcttaaaatttgatgcccagaatagaacacaaaactaaagttctcacacctgtaatcccagcactcagggaggctgaggaggaagatcatcggatcccaggaggtcaaggatgcagtgagccatgatggtgccactgcactccagcctgggtgacaaagcaagaccctgtctaaacaaaacaaaacaaaacaaaacaaaacaaaacaaactaaagttctggcaacagtagtcaagtgtactataaaactctctcctccctacttaatacaatttagtttaagcatttgggactaacattttaccaccttgctttacggtgagcttacagctaattataaacttggggtctcttcccataaaatgctgtgttctctatcatgggtatccagagttgattttttgaacctaagttcatgattttatgtttatttatggttaatgtactcttttccatctcttccatcatttcagcctatgaagctacattggactcttgtgttattcattgcattagtcaaagtacattgactatattcttaataattaagaaaatatttttaaaatcgtttaatattccactatatacacaagtgcttgtatacaaaaaatgtttccttactattgatgctgagacggaatcttgctctgtcacccaggctggagtggagtggtgcaatctcggctcactgcaacctctgcctcctgggtccaagtgattctcctgcctcagcctcttgaatagctgggattacaggcgcccaccaccatgcctggctaatttttgtatttttagcagagacgtggtttcaccatgttggccaggctggtctctaactcttgacctcaggtgatccacccaccttggcctcccaaagtgctgggattacaggtgtgagccaccccacccagccgagttcttaaaactttaaaatttttcttaagggttctgattgtacaaacagacaaaacatgctttagacctatcgacctcgtaagttcttttttaaagattctaaaacttaacagtttctaagtatgacgtacaacagtcaaaataaggaacagggtatgcctctcartgtgttggaactgcctgatagaaaagaacccactccacactaccatataaatgtttgtacctttttgctacttgttataacagcaaatgattctcccttgttaatacagtaagagattttgaaacacagctagactaccttgccctctcaaggtggaaaaaaaagattactataaaaatttgctgttacagacaatttaaccagctttaaaatgctttagaattattactgcttacctccattatgaagccttccagtggaaagttctggatgtttttgcttttgtaggacaccagaacataccatgctgtattcctttatgtcatactaatattcatatgaagactgtgctcagattgaaagaaactctttcaactaattggattatgattctagatggcaaatattgtccctttcaaagataaaattgtcccaaatttgcgctagcaataaaaaaaaacaaactgtgttttccattatctatgttttatacctgaataaaatgaaagatcaaggctggacacagtggctcacacctataatgccagcactttgggaagccaaggtgggagaatttctcaaggtcaggagttcaagaccaacctgggcaacatagtaagaccccatctcaatttttaaaaaatgtttttaatagttgggcatggtggcacacactggaagttcctgctacttgggaggctgaggcaggagggttgccagagcctgggagttaaaggttagagtgagctattgatcatgccactgcactccagcctgggtaacaaagcaaaactgtctctaaagaaacaaaactaaaaattttaagataaaaaatagtaaaagtccatatttcaggtaaatcttacgtattcctctccctattgcatgatttcctgtttatttgcctgttccagagtttcaaattccttttcttgacccttccagacactctgcacacaaaaacatacgtgtataagagcaaacttaatattcagcccaaacaccttaaagttaattactaatatttataatgatgtgggtgtttgcatataattattgtccataagtgctgtagcaaatggattaatatattaatttgaagactgcctgctaaatggataaggacttgtaattaattttttttggaacaatcaaattatactgactacctattatattctgacatgttaataatagcagaaatgcaaaacatcatggacataggaatcttgatccacttcaaatccttgacctggccctgactgcatagtttcatccttggttttctttataggccttacaaaggctgatcccactgcccacaagggtcactctctaatggatgcctagtcctgatctcaagttaataacatgcactctcaagccattccctctcctggggccataaggagggtgttcccacatccttcccagacaaaaacaagtcctctatgacacctattcatatgaaatttttaaaatctaatagaattttgcagcttacgacaataaaacattggtatgaactgtgagttagatcatggggatatgtaatgacattatatataactagatataatacagtatttgttaaatgggattctatccataaattctgtccaaatttatgttaacagtaatccaacaccatgtattcttaaaaaggagccaagaacttaaggcctcattctagaataccctctccaagccctatcctatatatccaacctaaatagactctgaactgggaatcaattagtttggctttgcaggtaagtcatttctacctaactcctgaagcattaccatgtttatctataaaatgagtagtttagacaatattattgatttttagtctgcgtgttcagaatcatagaagcccccccaaagtaataattgggcctggaagttatttttatttcaaaaagcttatttgttacacaaatatcttttttttcttttttytgagctgcagctaaccaactgtaattttctcatattgaccagaagtcctggttggctttggtcagtaaaattaggaaacaaatgaattattatttaatcaatagagaataataaatatttcaaaatatggaggccatgagaaacagaaataattaacatgatctttggcaggagaaaaaatggaaatcacagagctgaattttttttttgttttttttttcttgagacagagttttgctctgtcgcccaggctggagtgcagtggcaccatcttggctcactgcaacctccgcacctcaccccccgggttcaagtgattctcctgcctattcttcatctaatatttactgtatactttttcctgtaccaggtttttcactaggtcttagggttacagggatatcattgagaagtccatggccacagttcaataaaggggatgaggtaccttctagctgctatggaaggtctatttatttgttaatggagaagttagttgctataagaaacttttaaacttcctcacaaggggtacaatacctcctgcctgcttttcatagtgacgtcagctttagtgccatcaccaggcatttcttaggtctgcatttcagaggtctagtactaataacctaagcactaaggaaaagaccattggggtccctctgagctataaggtgaagctagtgcttgggcagctctgggtgatgagcagccattacagtgcctttcccggtccaggccagctcttagcacaagtgactcctgagggaaatggctgattacttggctctgaatagtataaaatagaacatgtttgcttcttcattccacataataaatttctttttaaaaaatcacataggccttggagggtttctaaacatggctggtttgatacagagccatcataagtagacccagaaaatatcctctccctggcttgaacatcaacaattttaatgaattggatgggaaatgaggtcttagccaaatagatctcaactggaaattctaaagtggtgccaattttgaaggaaaatgaataaatttcttcaaacaagagactgctcaactcttgaacagtcatagtttattacaaatattaaaggagttaaggagatgtaagtttattaagcccctatttccatcattaaaaaaaagtttcccctcttaatttaagtgagtcctgtctcaacctttttgacatttataatacaaaacactccattgtaaatactcaaatgatggtataaatatagggaatttctccctattttagacagtactttccttttaacttagggtttagcaaatcaaagaaaacaggtatgtatgtagccatggaagcattcagagttgcctcccctgcatattctctgtttgactcattttttctatagacgttccacaggaaaaggagtgttccaactaaaaaccaaaaaactatccaaattcaattattcactcccctgatatgagagcaggagctcgtgaaagcacaagtcccgacaagcagaggaaaacactcagataaatgaaaagctctatgattgccattctaactggtgtgagatggtatctcattgtggttttgatttgcatttctctgatggccagtgatgatgagcattttttcatgtgttttttggctgcataaatgtcttcttttgagaagtgtctgttcgtgtccttcgcccactttttgatggggttgtttgtttttttcttgtaaatttgtttgagttcattgtagattctggatattagccctttgtcagatgagtaggttgcgaaaattttctcccattaaaaagtcaggaaacaacaggtgctggagaggatgtggagaaatagtaacacttttacactgttggtgggactgtaaactagttcaaccattgtggaagtcagtgtggcaattcctcagggatctagaactagaaataccatttgacccagccatcccattactgggtacatacccaaaggactataaatcatgctgctataaagacacatgcacacgtatgtttattgtggcattattcacaatagcaaagacttggaaccaacccaaatgtccaacaatgatagactggattaagaaaatgtggcacatatacaccatggaatactatgcagccataaaaaatgatgagttcatgtcctttgtagggacatggatgaaattggaaatcatcattctcagtaaactatcgcaagaacaaaaaaccatatactgcatattctcactcataggtgggaattgaactatgagatcacatggacacaggaaggggaacatcacactctggggactgttgtggggtggggggaggggggagggatagcattgggagatatacctaatgctagatgatgagttagtgggtgcagtgcaccagcatggcacatgtatacatatgtaactaacctgcacaatgtgcacatgtaccctaaaacttaaattataataataaaaaagaaaagaaaaaaaaaaagctctatgaacaagtatagaggctttctggtctccagacttaaaatgatacctcttatagtcatctctcagtctgagatgtccagaaatgggtatcttagagtgacccacagttgttaccaaaaatctcaattcaaccatcacatgtattctcagaaatgccagattcatctgcttggctagcacagatttattcttggatatagactgctatagggaaatgttgtgatgtctgaaataacaacactctcgccttgatactttccccagaaaacatttcttttgctcactctcttggaacattttccctggggaaatctataagtcaagcataacaggttatgacatatccatgtcaatgggtaactgaatacattttaggaataaattgtcattacctatcatgccttaatgttcatgtaaatcaaagaaactactttccacttaaaacacacagaaactattatttttccttttcttctcaagagctatggtgtactactctggagtaggaatattactagagtagcttgaggatttgtttgtttctgagaaaaatcattacaaagaaatgggcacttatttaaaatgttcttaaacacatggagaatatattcaactgcattgtcaaaaaactaaaccaaaactgtaagagattacaaaaagaaatgataaataactgcaagattaaaaaagaagacaacaatgactgcagcatgcttaagttcaaagcaaaagaaatttgataattcaaataaatacaaatattgatgggaaaatactaactttttaccttttaataaaaatgagtgaatccagaaaattcaaaaaaatgtgatcactaacaaatttagtaagcacctttccttcaaacagataggggaggaaacgaagtgactggatgtatgaagtaactaagccagaaaagttccttcaaatactacctattattgaacaagaaaaaacagacataaaattcttattaaaatttcactaaaaaacaattatcaaacatctgctatggaaagtaactgtgctagattacatgaagctcatgaagatgagaaggacttatctaaaagctctcatgatttatacatccttaaataacaaaaggtagcccctgaagatttggatttttacagcttgttaaagtggttaaactatgtatattttttatgtctatattacatacatatcttatacattgcagaataaaatccccaaagcttattcatttacaaagcaaaaaataagattattgagaatgggtgggaggggagtcaatctaaaacctttgctaaaggcaaatgctgaatagctgaatgctttccaatcaaacttttaaaaaattcaaaaggcatgataactgttttttcaaatgtggtttccttctttttctctacaaagaaaatatcttttcaaattctttatcctgtaatcttttattccccctaagggtttaaataataccatgtagccctatactggcttaaattatcagaccctgccatttatcctaaacttagatgaactagagaggattacttcaaaaggagtttttatataaaaatgtcatagaggacttcctataaaatacttcaaagaccacaagtaaaagtatgttactgtcctataattcacatagaatctcaagaatcccagagtcaaaacaatcttataaaagaaaagcaaattgatgtctcacatttcctgatttcaaaacttactagaaagctaccataatcaaaacagtgtggtactgtactgcataagaacagacatatagaccaaaggaataaaatagagcccagaaataaaacattatgctatgagaaataagccaatggccaaattatttttcaacaagaatgccaagaccatttaatgggtaaaggaagtcttttcaacaaatggctttgggatatccacatgcaaaagaataaacttggatccttatgttatacaatatacaaaaattaattcaaagtgcatcaaagatctacatataggagcccaaactataaaactcttagaagaaaacatagggaaaaaatttcatgccattagatttggaaatttcttagaccaccaaagcaaaaacagataaattggacttcatcaaaattaacaaagggcactatcaaagtctgccaaaggacataatcaacagagtaaaaggcaagccacagaatgggagaaaatatttgcaaatcacatatctaataagcaattgacattcagatatatagagaactcctataacccaataacaaaaaacatcccaattaaaaaataggtaaaggacttgaatagatatttctccatcaaagataaacagatggccaataagcacacgaaaagatattcaaaatcactaatccattaggaaaatgcaaatcaaaattacagtgagataccacttcacacctatttggatgactattatcaaaaaaaaacccaaaacaaggtaacaaatgttgtcaaggatatggagaaattagaatgcctgcactttcctcgtgggaatgtaaaatggtgcagccactgtggaaaatagtatagtggctcctcaaaaaagtaaacataaaagtatcatatgatccagcaattgagctgggtgctggtctacctggcctgtagtcccaactaagtggaaggctgaagcaagatgatccattggagccaaggagttcaaggccagcctgggcaacattgaacttgtctcttaaacaataaaacaaaacccatctgggtaagtatacccatatgataactatacccatatgatctagcaattgcacttctgggtatatacccaaaagaactgaaagcagggacttcaatggatatttgtacacccatgttcatagcagtattattcacaataggcaaatagtggaaacaatccaaatgtccattgactgatggataaacaaaatgtggtatatacacaaaatggaatattgctcagccttgaaaggaaatggaatattattcagtcttaaaaaggaaggcaattctaactcatgctacaagatggatggaccttgacaacactattcttggtggaataagccagacacaaaaggacgaatattgtatgattacacttatatgaggtatctagaataaattcacagagacagaaaatagaatggggagctactatttaatggatacagagtttcagtttgggaagatttaaaagtgctggggatgaatggcagtgatgttagcacaacaatgtgaatgttgttaatgccactgtactttatacctaaaaatggttaaaatgcttatgttatatatatattttaccacaactaaaaaaagtgaagcatgtgactgaggctataaaggaataagaaaataaaactttttatctcctttaattttgtttgaatttccaaacccaattttaaattaagagttcatatatgcattctttgtcttccaaaatttgacagtactgtgttttacaatctgtccttgtcataaagggtttgtaggtatatgggattatgtacgtatatataacaatgatcagttctcgtgtgtgcctaaaacacctgaattctacatttgcaacccaaataaatgatagctttgagaaaacactccatttttgtatgtgtatctacatttctaaatctacctttgaagtaatcagaaatggaaagtttacatttctctactcaaaagttgatgggagaggtccaaaaggcagttgactactcagatctggggcttacaagagaaaatgagactaggaaaagacgtttaggagtcttcagacataggagtattattttgtaccactttctggtatgcttattgtttgtatacttgtctctttctccataatagattatacactcttaaaaggcaatgaaacacctcactcagctatttgttccatgcagcattagcacatcatttttaacagaacaggtaggtcttcaataaattttttaaaaattgaactgaattgagtcctagacagagaaccctcaagtctttctccagctggtctacctagatgtgaaatttatgaatttcctctaaatcttggctaatcattttggttcatttgcaaatggaaggtcagaggtttgcgactaggccataatgcctatatttcagtctccattttactatatgagcatcattcaataaataatacaaatgagattttttttgttgttgttcatttggcaccatactctccttgcatacctaccccactgaggatcatggcatagagattcacagccaaaaataaggcaggaggtcaaggaaggctccttatgcaggaaggatattccctccttcccttttgggaacacttcaactaaccctattttagtttggctgctttgcctcatttctaaaaaaaattcattacactccatagcccttcccttgatgccctagttaattaagtttacataatttcctactgattagttttgaacagcttgttctggattttctctcctttaattttctgtctttactgactgcttaaaatcctcaactatgaacttgggaaagtctatgtgttaccacaaagttctctgttacacatacagaaagaaaagcaaatcggcattgtgattcataaagagatctgggatcaactatttcaggaaacagaaacttttaggtggaatccagtaacaagccagaaataataaacaccaggaagacacaagttatattctttcacacacaaaaatgaactatggtccagtcgtttacttatatttcacgtttactgagatcctatgggattctttctctgtgctttggaactcagaggattaataaaaagaattattaatatgtatttaaaattattgttcaaactgatttatatcctcctcarataaaattctgaactgacattttgtctgcattttggggccataaatgaatagcttacaaggtaatttaaaaatctacccattttggccatttttgtggctaatgtaaattgcgacataaccagtgaaagtttctaataatggaaatagtgaaaattaacaggtcagctgtgccacaatctggtccatctgctacatatagacagcctcagaggacaatgaagaagaaaagtgaacccaaaacgtcaacaccaatatcctaaggcctttcatgatccaagaaatggcaattggctgtgaaattattctgagacctgcttttcccaaaaattctttcattttcttggtactttagggacagtagaacaatttattttcaaaaataaattgaattttttatttttataaataccaaaattcttatgactgttcaaaatttcacacaaattctttcttgctcacattaactctacaaaacaaaggtaagggtccccatacgccactagctcatatcggaacacagaggggaaaagttgagtttaaaggttgcagcaaatctccttcaaaaacactctatctgctaatcgagaataagtctgcactggcaaaaccaaactaatatatttttaaatgtattctcaaatgacttttctggtggtgagatactctccaccccatatattgaactatgctaggtcagccagtattcttgctatgtgacaatcagtcctcctccctggagagaccaggtgtttgatttctggtgattttgtccataattgacagccaaatatgctgttttgtacaaattgcattcagtattctttcatttctattgaagactcccttgttttatatgccaagaaattctatgagacaggaagttcctttaaaatttgttttaaaaaatcagtttccacaaacagtctgaagatatttttttaactcagacatacataatcatttcctaaaagcatagctgaaggtcatattacacagtgatgagatgtcaaggaaaggaatacatacatttcaatttgcaagctcacaaataaatgttggtacttagaggaaaaaaatcacaggcttgggaatgaaagataagatatgaaacactagctaattggctaattcacaaggatagcttctccttggaacaagcataattcctattatgataagcactttgcaggtgtactgaaggaagaagagataaagtttgccaattaagtcagtgttttcccaagtgaattctgactccaacaatggtaccaaaggagtgtgatgcaattatgaacctaaatttcacaggattttgtgctgaaaatactctgtacgtgattcactgaaagtgctcataattcatgacaagcttctcaaacactttctgattatatgccttaaaagacagattaaaatgcccttcttttacctttggacctcagtggtcatatataaatatcacaggatatttcatgtgatttttagaaagtgaaaagagaactggaaatatgcaaatatcctactctctttggtatgctaggaagaagatgaagacatgtaatctcacaggacaaatctatatggtcccatttcttctaaatgcatccactaaagcaagaaaatttatttgataaactcctcttaaaatatttaaaacaaggatcaagattagatttcattttctcatgccagtcttgcatggttactaattgtaatattttaatgctatgtgtttaaatttggaggacagaattgctgtccattcatagtctggaacaattgtttctaacctctgtgatcctgctcaagcttcactactggctgatatacacctagccgagcttcaactgaacccaggattttttcccccactgcttttatttcattgttcttgaatgtcttactgcttttactgttattgatgttagaagttacaatgccttgctgtttaatgcatttgttgtttgtgttaaccattcaagacgctgagataaaagtggacttggaataaaacgggacacatgggatcaaactatggaaataataaaacattcaaaaacaatgataaaagcaaacagagaaaagacataaagacatacacagtttaaaagccattgtgtgttaaatcagtggttcattcagttcaatatcttctttctgtcagcagcaccagggtaagttttgtagtaaagcttgtcatttgtactgtttgatcttatcctcaaaaggcttgaaaggtatcctgaacatacctacctttcattaataatacattaaggatgtggtcataacctagtcttggacctgtcagtttttccatccagtaaattatttttatcttaattattaaaatgaataattccattatttgtcttaaaacaatagggaatctagttccaactctgccactgactggctatttgaccttgggcaatgtttaataacctctgtatctgaatgtcccacctatataatgaggcggctaatctcaaattttatgttttgactaccaaatttcaagaagatgataacacacctatctttacattatacataccccctgttttgcaagctgtaaacttcttctccctttgttttctctagccttcaaagaatcaatctctcatggtagaaagagaccgcagaaatcacctaatacaacccatgggatgcctgaatcaccattacagaattccccactaccagtcatcttgctcctgtttggatactattattgttggagagttttatgaactcccgaggcagcccactttattttcaactaatgccaactgttagaaattcttctgatatgaattcagatataaatgttgatataaatctatctccttgcaacttcctggttcttccctctggggcaacacagcacagacttaaaccttttttgtatattatccacatgatagaccttctaatactggaggaagctgtcacattcttataagttttctctcttctccaggctaataatcctttagcttttattccattgaattgtacactttaaatttaaattgtacactttaaatggtatgtgttgtatctcaaatttgttttttaaaaagaactatagaaatgtaagacacttcaattgttatatctctagtgaaaaactgacagcagctccaacaatacatccctgagctatgaaactcagaggccaccattccccatgggcaattataattctgccaaaagatcgtgactttgatatacaatctggggaagcaatctgggggtgtggtataaaccacatccagatatcattacacacaaatgactgtgatctgagcaccaagagatttacctatggaaatctaatatggctaccaggaaatgttcccctacgtacaaacttcactcagcagctgtcatttatatagattcttatttggcaattgcaacaatcagtttgttgtgaattttaaaaggtgaacaggtattccaaataaacaatgtggtttggagaatattcattaaatagatattatataagcactatgttctagagcctaggaatataaagatacactgaactcacttctagccctaactcctatttgagaagcaaagtggaaagacaggagattagacaagaaatataaaaaagacttatttctgtcaatagggtagaccagataacctaaaaagcctctgccaacaaaactcaaagaaacttcagaataaaatatagcaaacattttttaaaaatacatagctaagttttcaagaagataaggcaacgactcataggtcaaagtagaaaaattaagtaagaaaacagaagagaaagcaaatgacctgatactatggcagccctgtgggtggttaggatgccaatactggtcttgataaggagccacatagggcaagagaagccaaagaggggtatctcaaaccaagtctgggcattatcttataggcatagagagttgtaagaaaatataaaatagggaagcaatggttaattttgcattttagaaaaattactctaccagcagtatggctaatgaattttgaggtaaccaaacctgaggaagagagacaagttaaaagattattaataatcacaaacatttattgagccctattatgcaatcagaaggctaagagctttatatgtattatctcaattatgacaaccccatatatacattatcctctatcttatcaataatgaaatggagacttgaagacattaaataatttgcccaaatcacttagcaactggttaggtaaaatatactaagagtctgatggtttgaatggaaatggaagcttttttattatctcctgtcatattcaggagataattttaaaaggtagaaccaagagggcctgaagactgcaggaatgagagaaacagaggtgtttaataatgatacaagcaataatatccatatgtgttatacaatatctataaaattatacaagggatattagagtttcctcaataaactaaacatagaactaccatatgacatagcaattccacttctaggaatacactcaaaggaattaaaagcaggtgttcaaatacttacatatgaatgtttatagcagctctattcataacacccaaaagatggaaacaacccaaacatccatcaacagatgaatggataaacaaaatgtggtatattcatgcaatgaaatattattcagttgtaaaaaggaataaagtattaatacttgatacaacatggatgaaccttgaaaatgtagtatgttaagtgaaagatgccaaaggccacatattagataattctatttatgtaaagtatccagaataggcaaatctacagagacagaaagcagattagtggttgccaggggctgcaggtaggagagaaataggagtgactgctaagtgggtttccttttggggtgatgaaagtattctggaactagtgagtgatgaggttacataacaytgtaaatgtacttaatgccactgaatgatacactaaaaatggttacattggtaaattttatattatgtgtatttaccacaatttttaaaaggtgaatattggcctactgatagagtacttccatggatggagatatttaaagagtaggactgataggggtgagggacaaagattagtctgtcattaaaaagtaataatcatggcttttatgaaacatttgtattataaaagggatactgaccttaaaataaagcagtactatggaaaggatttccrttcactgtaaaaatcatcatcattcatggtcttgataatataagggcaacacaggacaacaatggctttatctgttagaaacagataaagaggtagtctctgcccttaccagtgtttttttgtttgttcattctatcacccaggctagagtgcatggtgcaatcttggctcactgcaactttcgtctcccaggttcaagcaattctcatgcctcagccttccaagtagctgggattacaggtgtgtggtaacacacctggctaacttttgtattttttagtaaagatggggtttcagcatgttggccaggctggcctcaaactcttgacttcaggtaatccaccccgccacagcctccctaaatgttgggattacaggcatgagcaaccgcgcccgcccaagttttaaaatagagtaagtagaactcacaaagagccctacattataacacgtaataacatataaacttaagagtaatgcagtcaacatatgcaatgaattcagaggagaaagtagtcaaggcaggttcctttgaaatatatgaaccaaaacattacggcacattctagtgcagtagtttaaagtataggttttcctgcaatattgaactttggctccaccacatactacctgcctgaacctgtgcaagttacttttcctcaatgtccttacctgaaacatgagaataataatagaacccatcccaaaattgttgtaaggattaaatgagatatacatacacatatttattcatttattttaaatgcttagaatagtgcctgaagcatagaaagtgctcagtaaatatcagctgctatcatcatcatcatcatcatcatcatcatcatcatcatcatcatyccaggcattgaagaaggagtaaattgcatttaggaataaaatttggtgttccagcccagcaatgttcaaactctttggggaatgcaaataaaatcaaaattgaaagcccaatagttacactgagttgaagtaaaactactctagctgaagtaattcctgtatggtgagtcacattgtctgagaattctgtcctggacttactcaaggagtcattcattattcagcatttcgtgaacatctaccatgtgctagtttttatgctaggctgagtgtttagagaggaaagatataggtcctgttctccaagaaagttacattctagttgagataggcaaaaactcccccaattttaaacatttttattgagatataattcacaatcccactcatttaacatataaaattcaatggtttttagtgtattcacagttatgcaaccatcatcacaatcagttttagagcattttcaccattcccgaaagaaaccatgtgcccattagcagtcactcctcactttccattaactctctccccaccagctctaagcaacccctaatctactttgtgtctctatagatttgcctattctgaacatttaatataaacagaatcataaatatatggtaaaaatccaacaactttaagaccactccacgataattatatttatttaagtaatatcaggacttagaaaagagaaatgatgccctgattcttgttccacatgttttgattccatgtgtgcacctctgacagctatcaactgtttcaggttatccctcctcatgttttctcttcttccttcccccaaaaccttgggtgtacagagaggtactcaggactgaagttaagaggagagaaaacaatactggaggctatcagttattcattccataccatatgccaggcactatgatrtactttatatatgtgctctcctttaattgtcacaataactctgggagacaaaaactactagtatcttcattttacaaaggaggaagctgagatttagaaaggttaactagctcgcccaaaggcacacagccagtgatgtcagagatgggatctgaaccctgttcagtctgactacaaagccgtaagaccctaagcccctaaactgttaagctctttcactcagtagtggttttctcctgacccagtcaaagtggcttattcttcaaggaactccttaatgtataatataaatggattcttaatattgctgataaactttcatatttattctctattttacagacttacattaaaaactcaggtttcaagagaaaataaaagttggccagcagactgatataatagaaagaatttatcagcacaggaggggacagaaagatggtgactctgtgtctccagatctatccatgtttctcacatttgtttgccctcccttttcccactctacagcatgaatgtactttataacctcagacatgcttttaaatctttgtgagtccatttttatatatagaacaagaaaataaacaccacataaaactattaacgatggttttaagtatatgtgtaatgtggaactgaccactccttgtcagtaccagagtttccaggagataaacaggcatgtctgcttgtcctttaaaaagtttttcagggctgggtatggtggtccccgcctgtaatcccagcactttgggagtccacatgggagaatcacttgagctcaagagttggagaccagcctggatagcatggcaaaaccctgtctctacaaaaaatacaaaaattggccgggcatggtggcatgcacctgtagtcccaggtatttgggaggctgaggtgggaggatgacttgagcccaggatgcatagcttgcagtgagccaaagtcatgccactacaatccagcctgggcaacagagccagatcctacgtcaaaaaaaaagttggtcacttcctaatagaaggcattttatttgggtggttttctgcagtcagagcaagcagaagcaaaggaactgggacataaaaaacagaatttcagtgaaagatgtctgtagtgcatgtagccaggtaagtcaagacatcagaagtgcctattataaagcaggaacaaagagaaagtggctgattaggcctaagggcctaatgaaactttgtcttccacctctctcactctttatcataaagaaagaacacagcaaaggcctccatcacagtatctctcagcagtgtacaccctgcatgcacacacacgtgcatgcatgctcacctccgtccctcacttcacttgaacttaatctatgtttagggagctcctacttgaattcccattttaaacttgtctatcctgaagttgaggccaagaatctgaaaatctgtggtataggtgaatgttagacacaccagggtacaattttagatcccatttataagctgcaaggtcataagcaagttatttaatctcctagatcctcagaatgcttgcccataaaattactgagatgatgtaaataaaatccctagtgagtactgctctctttagatgtcccaattgatttgtaactatatttcagaatatacaagatttagccacaatagctagctcaatattttaaaattaaagataaaatgttatggaagccctgtctaaattaccaaagagatgaataactactttttttttttttttgagatactttcactcttgtctgggctggagaagagcaatggcgtgatctcggctcactacaacctctaccttctggattccagtaattctcccacctcagcctttcgagtagctgggattacaggtgcccaccaccatgcctggctaatttttatatttttagtagagatggggttttactgtattggccaggctggtctcaaactgctgacctcaggtgatccgcccgcctcaccctcccaaagtgctgggattataggcgtgagccactgtgcctgggcgaataactgcaattttcttctgacaatgtgcatgtttaaattaagtcttatagtacttatttccaaagaaagtgctgtattttaatcactctatgtcccatgttttgaatttttttaaaagactactatgaatccttaccatgacaactaaattctttccattactaaagcctgcaaatacccaatctgagaaaatgggcaattcaagacaacctaacacaaccagcttggggaccctgcacaaagagcactgtaactatggaaacacctgttaatgaagttacactataaatcacagaacctgttccattattcaagtaccaagcatttgagatcaatttatagcaactgtaagctattaataatggtattctatttaatttgtcaaacacaattttctctctcaatgaaatctttaggaaatacttaagtatttttcttcaggagaagaaaatgttaaatccacctaagtgttacagtatacctgactggtggtttttaacctgtttgtgaaacaagcattatgaaatcaagcttatttagcacttggcatatgtttatgatattatttacattttacatatatagcctgatatatatagatatataygcacacacacacgcacatgcacacacacacacatatatatcctgtttcttcaaccaggttaataaattccttaagaacataaaacataacttataagtctccttatcaccagtgcttagtggaatgcccatgatccagtccttaatgaatgctttcctaactaattttagcttctcttttctaagcacaagagactttggaagaagataaatcacagcacattaatgtgaacaagattttgtgatgggaaaaatgggaatcagtaactgaatgaatcttatagtgctaagttccagaaggaggtatataagaaatacccttatatatatggtgtctggttcattaaatactcatcttttttccacaaacttttttttattgagaaaagaaactctaggccagtgctaactcttatcttaattttcttccatccatgggaattttttttttaactgacaggatttgctttttctctagaattgtgtgctgcctgagcctctactctcctctctccctgcttcccctcagtcaagagaggaaggaaaaatacatagtgcctatgtatgaatttaggatagaggtgaggcctgacatcctacatgaaatataaacagagcacctcactgtatgacgacatgggatgcaagagaagcagactttgaagtatttaagtttaatgctcccgatttttaatttaaaaagcaaggggaataactgcttcatatttttctctcataaaacagtaacgtgtaggtttctttcttttggtcgtcactctcttttgggaatctagtccctctgttttgggaatctagtcccttgattgaaagggtctctgcctctcctgtatgtctagtccttcagattccacttccacaatgttctaccagtcagcctccatcctttctgttctagctcagctcaaaggtcttcattaattctcagccaagctaccatattcacctccaaattggtctcacagctcccagtcttcccctataactcattctatttggtgctgccaaattaacgttgctaagatacagctgtgattcacgaagtcacaaatatttcttaagcacacactctctatgccagacactgtgctagactctaaagagtcagagaaaaagacacacagttgttgttgtcattttatctcatgaagcttacattctaatgatatactctgtgcaaaattcatcaacccactgccaatggaattaagtgtaatttcctcactgtgttcatcataggatatgagctaagtgatcctttccagatttatctcctactgcacccttgccctctgttctagtgaaatgggttttgctcatctagaattttgctacaaccatgctatttttttctgacttctgcacccagaatcctctcccacctctacccacatcaccttctagaaacttaatctaaatttcaaggcctgtctaaagtgaaatgtccttcataaagtctttcgctgaccccacatcctaatgtttctctccctatactgtcctcggaaacttttatcttactttgcattatagtaattgtatatttgttctatcctctgcctttttttttttttttttttttgagatggagtctcactctgtcgccaggctggagtgcagtggcacaatctcggctcaccacaacctctgcctcccgggttcaagtgattctcctgcctcagcttcccgagtagctaggactataggcgcgcaccaccacacccagctaatttttgtatttttagtagagacggggtttcaccatgttggtcaggatggtctcgatctcttaacctcgtgatccacccacctcaacctcccaaagcgctggtattatgggcgtgagccaccgcacccagccattactccctttttattacttataaaaattagcacagaaacttgtatacattagatagggagtatttttaggaatgtacatattttctaaactctcttccattccttccttcaggacaaaaaaaaaacaacttgatcttatcaggggtagggaaagggaagggcatgaagcaacaaggaagactggctgatgagcacttctcctgaagagttatttaatctgaaacttgaacttgaatgaggctagtcaggtgaagaagggtagaaatgactacatccattagattatgcaaaagcatggatgagagacaatacttggttgacaaaacactgcaaccatgctatcttttttttttttttttgagacggagtctcgctctgtcgcccaggctggagtgcagtggcgccgtctcagctcactgcaagctccatctcccgggttcacgccattctcctgcctcagcctccagagtagctgggactacaggtgccctccaccatgcccggctaattttttgtatttttagtagagacggggtttcaccatgttagccaggatggtctcgatctcctaatgttgtgatccgcctgtctcggcctcccaaagtgctgggattacaggcgtgatccaccacgcccggcccctaatatcttaatggagcaatacaacccagccccactgaaaaaaaaaataataaaagtcttcaccattatatatcataatacttgcatttttggggtgaatgaatcagcttgcaagaaccctctttctcaaagaccatacctccacattgcattccatatctccagaaacatatggactctggcatatgtgcttaccatgaacccaggatacaaactgactcaagccaggccagtcagatttcttctcctgagagtttggaattgaaatcatgacaacaaatcaaggcagtgtcttcatgagttactcaggtactgcagcttggtgatttttctaccaagtagactgtggaacaaagaaatcttgtctgtatatagataagaggcagatatgcaaacaaaagcagagggagagggagcatgggcacctcctaggtccgggctggctttccatttgtcccctaattccagtctctctctgaggcccagctgctcccattcttaggtctggcaacctctacatccttataataaacccctctttctgctaargctagctcgagttcttctcagacacctacaacccattagtcctaactaggacataaacgttttattgagccaccaaactcccactaaacagtgtgttggaattcctctagtatttatcaagctcctaccatgctcaagttattcatcaccagtgtacagaaatctaagagttttattttccattttatttaacattttcttttgattgtagcacaaattattttaggtcacacacttaaaagttttgtgtcataatgtaaacccaaagcctatgattcctgttttattttgcagctaatattcactctgagctactgatatatgaatatcaatattctgaaagacactttgggagataaaggggcaattagttcaaaagccatttttcatctctttaatcagaccaagttcatccacaaatttcaattgtgctgatagatagttttaggaaaattcattgagggacacattgaaatggcctctctagaaagctttgacaaaattattatatccatggatataacatgaccatgatccagtgattcacgatgcattactcactggacccctagggagccagccgacatagagtcccacccaacaggattaatataatctagcagcagagtatttctcaaaattacccaagcataagactcatctagagcatttgaaaacatacagattccacgagtccatctgagacctgatcagaatctctatgagacaggacttggactccattcatctaacaagcacctccaggggattcacaatttctttcttttttttttttttgagtcagggtcttgctctgttgcccaggctgcagtgcagtggtacaactgtggttcactgcaccctcaatctcctgggctcaagagagcctcctgcctcagtttcccgagtagctgggaccacagacatgcaccacgacacttggctaatttttaaaaattttttgtagagttagagtctcactatgttacccagggtggtctcaaactcctgggttacagcaatcctcccaccttggcctcccaaagtaatgggattacaggtgtgagccaacacgcctggcttgaattcacagtttctgtttagcatgactttaaaaatgaaccctgagcttcatgcccaaaagagagcccctgtcagatgttgctgaaggagctctgattcacctgtgctgcttcttctttcttgcattttcttaccttcatttaatgttctggcttctcctcaaatgtaccccctgcagcaggattctgtagcttttccagagttcagttactttattccctcctggcatggccaactggaaacccactaagataaaggaactgctcctataccttctccccattcttgccctagtccttccaactgtatgctgcactcaaaggcatgcctgactggatatggcctggccttgaaagcccacttccatccttaacagactccaggaaggctgacctactcttactacataagagtaaactggccgggtgcggcggctcacgcctataatcccaatactttgggaggctgaggtgggtggatcacttgaggtcgggagattgagaccagcttgaccaacatggagaaaccccatctctcctaaaaatacaaaattagctgggcgtggtggtgcatgcctgtaatccaagatattcgggaggctgaggcaggagaatcgcttgaacccaggaggcagaggttgtggtgagccaatatcacgccattgcactccagcctaagcaacatgagagaaactccatctcaaaaaaaaaaaaaaaaaaaaaaagagtaaattaaattatgtccatcattccaactcagggtgatccatttaatcacaaatgccacacttatgctatataaacactaaagcaatcgtagtagcataagcccactcatttaacaacctaaaacaaatgctacagtgtattactgaaggatcaatctagtacggkgtatcttttttttttttttttttagacagagtcttgctctgttgcccaggctggagtacaatggtgtgatcttggttcactgcaacctccgcctcctgggttcaagtaattctcctacctcagcctcctgggtagctggaactataggcatgagccaccacactcagctaatttttgtatttttaatagagacgaggtttcaccgtgttggccaggctggtcttttactcctgacctcaagcgatccacccgcctcagcttcccaaagtgctgggattacagcactttgtaagtgaggtcaccacacccagcctagtagtgtgtatctttaaaataaattttgtagaagggaatttgcaggagggcagtccttgacccagcccatttcacaaccacaaatgtgttcttaaggtcaatgtgcagtcaccactctgtattccagctgtcacacaggggtactactcactgaaaaatgtcaggagcaagaaaggagacagtgataagcagggatgatggtgagtgacccttgccatatctcacccttattgatgcttcatacaaaaaatgtggggtctgctttggaaagtacaaaaagcatgataatgaatcaacaaacacaagtagagaatggatgtctcgaagagtttattcatagatttactgataacagttaaataatgtaatgatgcaaaattataatgctatcattttagtatggaacatgcaggatttttttccttcacaaaagctagtgagagaacaagaagtccaacaaaaccactttgttctctgaaataaagaatacatctgatggttaaatccactttgccagagttgatgagtgagagtaaagtaaacctaaggggagaaaaaaacagctaccctcacctgtaggaacagcaagctttgtagaaaaattctgaagtgcctttagcaaagcctcactttgcctctgcaaaactgtgctcttgggagacttcagacaagcagtctgggccttagggcttatctgggtcagacctgaacccttagaatgacatggctatgaaagtgtccaggtcaaccagacaagaagaggggctcctgtactaaccttaaaagaagtaggaggtgctaccagagcagactatagggaagctctgaagaaagcagtgtacctcggggagggctctgcctttaacactgtatatagaataatatgttacagtgtataaacacaaatatatacacacacagaaccgtctatctgtgtcttggagattcagactagtaayttgtctaatgtgtgcaaactccttccrtgggcagaaggactgctactgtgtgcccagatgggtacataggacaaattatgtttactcaacttcagagaaaccatgccaaaatgttcttcccaaacaattgatttcaacttgttcttgttttcctccaatagcagcctgacaaactgttttatacatgcatttgacttttcaaaaatttgcatgcaatcatggcaaactcagcaagtctttgtgctccaggagctgcagaatggcctttgaatgacatgtttactgcatcctaatgtaaaatgtcatcttcttaaagtctgggagaaaggacctgcagcagcatgaacctggcctgaccctgtgttatgtgcatcagcaagagccaaatgcctaaagcagccagaaagtaatgccaygctcccaaaagttcagagtgacaaaamaaaamaaaaaaaactaaacaacaacaacaaaaaactaaataaaaagtccaagcttcaatgattatgttactctctgtcacctgactcttcaatgaacaggaagcatactctctactaaaagggatacaaggccgggtgcagtggctcacgcctgtaatcctagcactttgggaggccaaggcgggcagatcacgaggtcaagagatcgagaccatcctaaccaacatggtgaaaccctatctctactaaaaatacaaatattagctgggtgtggtggtgcatgcctgtagtcccagctacttgggaggctgaggcaggagaatcacttgaactcaggaggcagaggttgcagtgagccgagatcatgccactgcactccagcctggcgacacagcaagactctgtctcaaaaaaaaaaaaaaaaagagagagagagacataagcagaaaagcaatctatgacttagtttctgtcagagccttgagtctttctttatccacagagttagaaaactatgaacccaaactgcaaatgtaccatttcctcaccaatggtcatttgtcacttctgatgcctcttgaagagaccctgtcacagttgtgacttaaagaagactctacgttttactgcctccattttttacattctcttaattcctttaaacttcatatattagaataattagacaaagtcacctttttccaacatctacacacttcatgcaaagcaaattctcatttaaaaattatcttttgagcttttaaaatagactatttgctacttatataaagataattgatttgcaaatgaagagtagcaaactgctccccacctcctggacatgtttataaagttgagcaggacagcagtcatatatcaaaaacacgacaacattatctttcagtttcctaggttaagggcaacctcatcagaaactgttcaggctgggtgttacatggtttctgcatggaagccaatcaccttcacatataaacacctccctcacatcaatatgttgtagttctagtaagttcacagtcattttaataatcaagagaggtcgggaaattagtatgcacatgaccaataaaataaatagccacagttccctctaccaatgctcctcaaactttaacatgcatgcaaaccacctgaggatcttgttaaaatacagattctgattcagtaggtctagagtggggcctgagattatgaaatcctaacaaactcccaggtaatgctgctgctgcttctgctgayccatggaccacattttcaacagtaagacaatctaccatgacctctcttggaggtggtaatgtccaagtaatctctttgacacacatgaattcccatcatatgattatgaaaaaggagactgttaaaactgaaaaaaaaatgtggaaactgcaatcatgggttctggagaatggaaggaagaagtgaatttgggattcttggcccctattttgattcatatcattattctattatctgttcctcaaaatttgcttggcatcctgactccctcaagagagatggagattgtttgttgccaagggccaccagtatccaagatacaaaaagatacatcttttatcctctacttgcaagtaccataaagaggccagctctggggtacttttaggcttgctatggaggcagccacaacactatctctggcactagaaatacatctgaacaatctggaattaattatagagttgcaaagaattccacaacatctaaaaagataagcttgtatgagttcaaccgaactattctgattaagcaatttttgctagctttccttctttctgatttaacccagagcatttaacaagcactctgaaagcccccctacactctgagtctagccacacaaaagctgaaatccagtcatcctgactgtatctaatagcttcttcttctctttttttttttttttttttttaagatggagtttcggtcttgtcttgcccaggctggagtgtggtggcatgatctcgactcactgcagcttccacctcccgggttcaagtgattctcctgtctcagcctctcaagtagctgggactacaggcatgtgccaccacacccggctaawttttttttttttttaagtagagagggggtttcaccatgttgtccaggctggtcttgagytcctgacctcaggtgatccacccgccttggcctcccgaagtgctgggattacaggcatgagccatcgtgccaggccaactaatagcttcttaatcacagttttgcatcccaactctccacattgtcacctagcagcaaatggaatccacagcactataaataattagtgtatgtcaaactgctcataaatgcattaagattactaataaagaagcacataccctatgaatacagtatacttcctcctagtacaatatttaaaaatacaagctgttgacaagctgctcctctgaactaaaaaccacttctacattattaatattagtgacctcacatgggacccaagctctcttgtaacaacagaaagtgacaaccatcaatgagacacagtgcaaggaggtgctatctcccaaggcagatgtgaaccacagatagcttgacttctgagactaagattctttttctttacctcccaaagaagttgctgtatggaaagaaacccggtttttctgaattctttttattcattagactaaatggcctaaacaagggaactagttcctgcagctagaaataaactagtcttggggccaggcacagtggctcacgcctgtaatcccagcactttgggaggccgaggcaggtggatcacgaggtcaagagatcgagaccatcctggccaacatggtaaaaccctgtccctactaaaaatacaaaaattagccgggtgtgatggtgcacgcctgtagtcccagctactcgggaggctgacgcaggagaatcccttgaactcaggaggcggaggttgcagtgagccgagatcgcgccactgcactccagcctgggcaaccaagtgatactccatctcaaaaaaaaaaacaacaaacaaacagaaaagaaaaaagaaaagaaggaaataaactagtctttcccactctgtgatgccagggtggagaagtcagctttgtggcctggcagctattcacatgattctgaggggctttcccccagaaagaatataaagcaagcttgtggatagcaggcagggtatgaaatcaaaccaaatcaagtacaaatgtcacaagatacacatctttcccaaaatgtaggcatagtagagtatcttaaacactgtaaaacaatactaactccatagcctcattaactaacctacttactatgtatttcttgttgctaattcccttgggtgcctctggattccaggcctcttacagatgattctgaaactcctatgaaggtgaaaatagacttatcatgaaagctggtaagcctgcttcttttggatcttttctataaatgacaatgaatgtacttgttcccaaggtgaggatgaacaaacataagatgatgagtactgttgttacttcacaagtagatacattccaggtcctaggcaacttttactatattttgcagattactcttagttctttctaaatctctagggatggagcctgttactaaaggaaaggtggttatgacattgtttcctctgagaatgatgcctgaaccaactctatcagaaacacctgggtgcttttcaaaaacacagattcctgggcccaactttaagacagtttaaatcacagatttggaggtgttccagaaatctattttaaaccgctaccaaagtctagaaactctggcttaaggtattgcagggttgaaaagctttggactattgactagttgaaagccatgtaatttattcttatggtgactgccgtatcacactcaatggcagaagcagtccacttggcaccattatccattctttgcatacctttaacctcttggacatatccactcccctggaccacaaggtctaaatacaaaccagatgcagttgatcatgcactggcatgtagaaccttcagagaatactctgattagagaatgtgaggaatgtgtagttcaatgcaagaaacaaagatgaatcagctgaaaggtaagaagtaagcctggatgctacagtgtgaaaaatatagtcaaatccaacaagcatcagttgagttccactcaaggaaagattgagttctgagaaggaaggagttgtcaggaatattatcacataaagttaagtcaaaagaggacagaaggttttggcatgaaggaggtcctcaatctaagaatgtacttctggtaaacggatctgacaaatcaatggaaataaaagctaattgaaacagggctgtggagaaatcagggtatggaaatgaagatctcacaaacagactactcttccataggaaaaggaaagaaagaaattgtcctagcttggaattaaatatagtgtttgtttgaagatgggaggcttttcaggagttcccaagcagactttcattctgcctgcagaacaaaagggtaagggctcaaaagctaccatgtaagagttcaaaaagcctcccagtccacagcctacccaaaccactaaccaaatggatggtcagagttggacctaaggtctcactgactcacttgggaatcacttagacaagcaacagtataacaaaactggctggactcccagctgttcactgtgtgtgcctgaatgagtaaacaaatcagaaaggctcactagtcacagccttctgctctgaggcttggagacctaaaaggaatgaaaaggggaaattgataaaaggagatgacagctttggaacaaaagccttgcctacactcataaccttgggtactaggagagggaaaggaaggaattccaaaagtcatggtagggagattttcctcctattattcaaagaaaggaggacacacatggtcaattaggaagaaaaacctctttgtgcctgatacattggatgcattgtcctcatgccatttgccctaatgtaagaatagtcttgggaacacagccagcatgagtgtccacttgactcattagctgcaacagtaccagtctctgagaacttgtcaggtcagtatagaaggagctctgtcagaatccaaagtttctccagaaagaaggaagaaggaattaaatattaataaaatggtaaaagatatagaggatttttaccttcaaaggaaaaaatcattctattcaaattaggaaggagttttatggaatagttttgattagacatatactggtaaaatgtagtctttggcgttttaccttccctcacaacatgtattttcaaagttttcaatattcaagttatcactctaactgttgaaatacagatagatcaaacagctttatagagggataactcatatgccatacaattcatctatttaaagtgtataattcagtgggttttggtacatacataaggttgtgcgacctttgccataatcaactttagaacattttcatcaccccaaaaagaaatcctcccatatccattagcaagcaatcattccccatttcccaacttccttcttccccagtcttggaaaaccattaatctactttctgtctccatggatttgcctatgcagttatgcagctcatacaacattttggtcaacaatggatctcatatatgacagtggtcccataagactaaaakgaagctgaaaattcttattgcctagtggtgtcatagccatcataatgtaatgcgttactcatatgtttgtgatgatgctggtgtaaacaaacctactgcaatgccagtcatataaaagcatagcacatataattatgtacagtaaataacacttgataatagcaatgactattactgttttatgtattattatactatactttttatcattaaccatgtgtgttatttcccctgaagaccttccagtgggacaagatatggagattgaagacagtgataatgatgatcctgaccttgtgtacgcccaggttaatgtgtgtttgccttagtttttaacaaagtttaaaaagtaaaaataaattttaaatagcgaaaagcttatagaatatttttaaatgtttttgtacaactgtgcaatgtgtttatattttaagctaggtgttattataaaagaatcaaaaagtataaatattctaaaagttcatgaagttacagtaagctgagcttaatttgttattgaagaaaaaaatttttacataaatttagtgtagcttaagtgtacagtgtttattaaatccatagtagtgtacatcaatgtctgagaccttcatattcattcaccactcactcactgattcatccagagcaacttctagtcctgcaagctctattcatggtaagtgtcccatataggtgtaccatttttaatgtttcatacgttaaagatgtttgatgttttactgtacttttttatgtttagatacccaaatacttaccattgtgtcccaactgcctatagtattcagtacagtaacatgctatacaggtttgtagcctaagagcaataggctataccacataacctgggtagtatatatagtaggctatgccatctagggttgtgtacactctatgatgttcacacaacaaaatcaccctattctcagaacataccctgttgttaagtaatgacacatgactgtaactggaatcatacaatatgtagtcttctcgattggtttctttcatttaacataacgttttcgaggctcatccatgtagaaaacatatatttctttttattggcaatattgcattatatggatataccacactttatttattcatttctcagctgacagatatttgggttacttccactttttggctatcatgaataatgctgataaaactttcatagtagtaccatacatggtagtaaagagcctatatcactcaaattcttttcttttttttttttttttgagacagggtctcacccaggctggagtgcagtggcacagttacaactcactgcagcctcgatgtcccaggctcaagtgatcttctcacctcagcctcttgagtagctgggaccacaagcgcgcaacacctcgcccagctaatttttgtattttttgtaraaacagggttttgccatgttgcctaggctggtgtctaactcatgggctcaagtaatacacctgcctcagcctcccaaagtgctgagattacaagtgtgagccactgtgcccagctcaaattatttcaaaggtgtggaaggcaaaatttctttaaaacacctgtgctattcaaggtgccatcctagaagcagagtgaccaaggcgctaacttactgatcttgaacttcccagactgtgggaaatacatttctgttcttcattttttttagtgtgctagttgtaggaaaccatcagttagatttaaatggtggcaataaaaatgatgcagatttggtaacatgttttgtcatttatactgagttgagaatttaaaggtttagagttcactttactactatttatttgtagcttgtcatttttcctttcatgcctgtactgcttttagctctattagttctcaacttagtctttaaaaaaatggacctattttttaccttcattagcttcgacaagaaaacccataattactactgcccattagaactaaatggatggtgagtatttaccacacaatttcttcttattaagctcactacagttgccccttggggactggttccaggaacccccacagataccacaatccaaatgttcaagtcccttatataaaatagagtagtatttgcatataagctagcacgtcctcctatatactttatctttctgggttacttataatacctaatacaatgtaaatgtatgtaaatggttgtttaactgtattggttttttattattttttcttgtttttttcctaaacattttccatccacagttggttgaatccatggctgtacgatgttttaaaaagtacggttacattctgtttcctaagaaaacacttaactgtatttttctgtttacaaatgggtctgatacccaataattaaaattattttaataagccaaattcttcatgcatagaaagacgaactaataccacatatgtgctcaaaaataaataaataaataaatgtggggtttccctttaaggatagagtctaaactcctaaaaggctaaaactgactctctaagaactgttccctgccatatctccagcctcattgccactactctttaaacccaccctgcatgcagtaacagaggcctgcttgtgtttgcctgtacatattgcactctttgcttccctgtctttgctcctgctgcttcgtctagaaggcctcctacaaccatccttcacctgcctcattctgatttttaaaataattggttcagtggtcacctcctctaggaaggcttaataaatgtggttccagcctctcactgacccctcccctatcaccagtaacataatcacaagttaagtatacttccctctggactcccgtggtgtgtaagatctctgcacttactgactccaactgtacttatcctttgagaagtatgtcttcacctctaaactgtgaggcaaagttctgccaccgattctacacaactagtactgggactgaaaatacaaagctgcttaataaatgtttttagtttgctgatgaaatacattagccattctcaaactttttggtctcaggacccctttacactgctaaaaatgactgagaacatcaatgagctttgtttatgtggatgatatatggtatatttttaccattttagatgtttaaactgagaaatttttaaaatatgcatcaattcaagaaaagaaaagttaataaataacccttagcattttttgaaaatatctgtgactccaaggactctctgaaagggtgtcagggaccacccagggccccagcacaatggtattgtgggttgtttgtttcacaaattacaaaatgtattttcattcacaaacgaaatatttgagaaggttgataggcaaatgaaaagatataaaggaagggaagggggatacaaccttaaccatagctagagaaaatagctgaggacagagaggcaaagccaaggaagagtggtaataaagtagtataaacatcaccagtcttaggaaaaataataaagaagctaaaagtaattctgyaccaacaaaaccaaaaacaggaacgacacagaaggacaaaagtctgaacgaaaccttaagtaaaaattgatcttttgggtaggaaatrtaccactttaacaattctattccacacaactcccatctttttatctttctcagtcctcatatgctctttattacacatctcttctgcctcttttggatatctattctctcttgatttgtagttatcagccgaaaaatgctgctcaaaggttatatgattagaggggggaaagcaacagctctcatgaagctgcatgattggaattcaactgataaattttttaacattccattaaaatataaaaaatgttaatgagattttaaaattagaaatgctgaagttatttttacatgctgaaaatacattaaaaattactgttcttaaaatatgctgcataaaggccaggattggaaagtaatttggatttggctattgtgctagggtggtagaattacagatgatttaaattacttctttaattttgttatatcattgctcctacagcaacaaaagccacagaaatatgacaattaattctcaatttccatatgcctttggtcctttctacagacttttcagggatgtgcaattggtttggattttgttaagtagtcatgtgcactgaggtcaaaagcttaaagtctagaccaggggtaaacaaattatagactaaaccaaactgagccctcatacagtttttgtatagccctcaagctaagaatggtttcttacatttttaaaaggtataaaaacaaaacaaaattaaaaaagaataatagacaaaagaaattgtaaatagtctgctaaactgaaaatacttactgtctggacttttatttttaacagtctcccttgccaggtgcagtggtgcacacctgtagtcacagctactggagaggctgaggtggaaggatcagaggatcacctgagccccggagtccaaagccagagactctgagatctctttaaaaaaataaaaataaaaaaaataaggccaggcgcggtggctcatgcctgtaatcccagcactttgggaggccaaggcaggcggatcacctgaggtctggagttcgagaccarcctgaccaacatagagaaaccccgtctctactaaaaatacaaaattagccgagcgtggtgggtgcatgcctggaatcccaactactcaggaggctgaggcaggagaattgcttaaactctggaggcagagtttgtagtgagccgagatcacgccattgcactccagcctgggcaacaagagtgaaactctgtctcaataacaacaccaaaaaacaaaaaaacaaaaaacctctgggcacagtggctcacgcctgtaatctcaacactttgggtggtggccaagacaggaggatctctgaagctaggagttggagaccagcctgaccaacacagtgagacacctctaccagtaatttaaaaattagccgggcatggtggcacaagcctgtagtcccagctacttgggaggctaaggtgggtggatcccttgagcccaggaattcaaggccacagtgaaatatgatggtaccactgcattccagcctgggcaacagagtgagacttctctctaaataaaaataaaataaaataaaataaaataaaataaaataaaataaaataaaataaaatgtttgccaatgccattgccagatataaagcatttcagcttagtgcccrgcccataatatgtactcaataaaatgttagatactattgtgatattattgctgtcttctattatcattaatggttatgttccttgaataattttttaatttctaaaattggtctcatcacattaactatgaagtatcagtgccactgtttgctctttgcattcttttcatccagctttttcttatatatcttgatctctcctttcttttactgtggtaaaatacatataacataaaatttaccatttttctccttcatttttgaaagacatttccactggttatagaattctgggttgacagaatattttcccatttaaatatgtcacctattatcttctggtttgcaaggtttctttctcttctttccttctttctttgcttccttttttatttctttttagttaataaattttkttttttttaagagcaatttggggttcacagcagaattgagcagaaagtacagagttcccatatactcccctaccccctacatgaaacccacccccaactattgacatcccaccctacggtggtacatttgttataatcaatacattgattatgaacctacattgacataccattatcacccaaagtccatagttcacattagggttcactcttggtagtgtactttctctgggttttgaaaagtgtacaatgacgtatatccatcactgtcatatgatacagaagagttttactgccctaaaaatcctctttgctctacctaagttccctccttctttcctaacccctggaaaccactgatcattactgtctcaatagtttttccttttccagaatgtcatatagttgaaatcatatagtatacaacctgattggtttctttcactttgtaaaatgcctttaagtttcctccatgtcttttcatggcttgataacacagttctttttagtgctaagtgtaccatggtttatttatttattcaccttcttgtaactttgtgtatttactgtaaattttttgtatgtaatttttttgtatttattcaccttcttgtaaaataacctcctttcttctgaagaacattttggttgcttccaagttttgacaattatggataaagctgttataaacatccacaggcagtttttgtttttttagagacagggtcttgctatgttgcccaggctggagcacagtagatattcacaggcatttatagcttactacagcctcaaactcctgggctcaagcaatccctctgcctcagcctcctgagtagctgggactgcaggcccacagcaccatgcccagctacgtgcaggcttctgtgtggatgtaagttttcagttcatttgggtaaataccaaggagtgtgattgctagattatatagtaagagtatcttcaggtttgtaataaactgcttgcaaggtttctgagaagtctactttttgcaggacttcatatatttcacaactgcagtacagacagtcctcaatttactaccattcaacacagtaaatcactgatacaatcctctggcaactactttccattacctctcttaacacagaaaaagtgtggaccatctctacttttccattataatccatctctagcttcaatattttttcaccgttctagctactgctaaccctgaaactctcaaaggttagcattttctaatccctttaatgaagccatgctctagcacttccttgccttatgatcttcctcagattactgaatctctctaaacttgtttccccatttgcaaaatgaagataatagtgtgagaaattaaatgagaaaatgtataatctttgaaaagtgcttgcctattattgcccttttctatcactaatagctgattaaatattacatttataaccaattttataaagactcggatatctctcccccagttaagcatacaactctattataatgctacttccaaaggaaaaccaaattaaacttaagaaaaccacttccatttaattaaaatgccttttccagaaattcaacctgctgtaaatatgasgttctcctatgaactacaaaatctttcctttcttattttaactctcatgtatacatatatatgtaacatacatatatgtgtgtgcttctatatatatgaacctgatgattcgtgactgctcctgaacatctggccttccatctgcaacagggacagtgccagattcaatgcttagctaattttttcttgaacagactccattactcactcatatatttcactgactctgaaagaaccaagcaaatgatctgatggttttggtaattaaaaaacttcctgccagcacgcattttcagcaattgtcaaaagtattccagggtgataaactgctcctgcaagggcccgatcaatttatttctcttgatcatcaggttcaagggacttgtctataaaacaatgtccctaagaatattttaaagcaactgctagtatccttggaaggctcactgcgtatgcattccttcataacagaaaagtctcaggctgaaaaaggactcataactttctctcaactccaaaacatttaaagttgttcttaatcacccaatcggaaccctttgaagaagcagagcaagaagcgtcttgtttctaatctctgcaaaagaaatagatgctactcctagtactctctccattcttagtcatttgaggtgcacgaaggagctagggaatattggttggtgacagtcaccaatcagtatttcaaaagtcaacacgaggaaacccatacgccaaaactgatttgttgaatacttctctcttttcctttttttttttttctgagacagagtctcgtgctgtcgcccaggctggaatgcagcggcaccacctcggcaacctccgcctcccgggttcacgccattctcctgcctcagcctcccgagtagctgggactacaggtgcccgccaccacatccggctaattttttgtatttttagtagagacggggtttcaccgtgttagccaggatggtctccatctcctgacctcgtgatccgcccacctcggcctcccaaagtgctgatattacaggcgtgagccacagcgcctggccaaatacttctctcttttcatataaaaatgtcagaagtccctggagatagaagtatatcttatttttgtattttaaagttgtgctatattgcttaagtgcacaggaattatagtgaacttatactagaagttttatttaaaaattcctgttatatggttttagaaatcattttaagagaataaaagcctgaagggactgttaagaactccttatattatttgtgtactattttaaaactcataattcaatctttctaatttttaaaaaatactgaaacaaaaatgtaataaaaaaggaatcccttatctgccactgcaccttcactgattttttttttttttttagatggagtctcgctctgttgcccaggctggagtgcagtggcaccatctcggctcactgcaagctccacctcccgggttcatgccattctcctgcctcagcctccggagtagctgggactacaggcgcccgccaccatgccctgctaattttttgtatttttgtagagacggggtttcaccatgttatccaggatggtctcgatctcatcgagacctcatgatccacccacctcggcctcccaaagtgctaggattacaggcctgagccaccgcgcctggcctgtatttttagtagagatggggtttcaccatattggccaggctggtctcgaactcctgaccttgtgatccacccacctcggcctcccaaagtgctgggactacaggcatgagccaccacactcggccaccttcactgattttttcctttcatatttctctttataagtcttctattaaaatgaaaatgcttcagagataagttaagcttcattagtgaatacctttgtatttagccagatgagaagggggtcttataggaatggttctacataaaacctttctttaacttttgcccttctatctgcagctgtcccagagaagatcaaagggtaccaaacttgcaggattctccctcacaaacagggtatgactatatccccaagaacacctcttgacaagctctatgccacttataccaaatagggtgaccctgctttcccggtaggagcaaagaaagaaatttcaaaagaaacaatctgcattgtagggttttgctcccttctcatttcgcatcactaagtccactgcctgattctactgcttatcttggaaacatggactttgaagtcagaaaatctcactttaattcccaaccctgttacttaatagctttgtttttcactttttaatttttgtgggtacacagtaggtgtatatatttatggggtatatgagacacttgatatctctcatgaggtacatgatatgagcatgcaatgtgtaataatcatattatggtaaatggggtattcaccctctctggcatttatcctttgtgttacaaacaatctaattatatactcctttagttatttttaaatgcacaattaaattattattgactgtagccactctgttgtgctatcaaatactaggtcttattcattctttctaacaactttttgtgcccattaaccattcccgcttcccctcctccccacttytacctttcccagcctctagtaatcatcttactagctttttgaccttgaaaaagtcacttatattctctgatcatcagtttctttgtttttaaaaatgggaatcacgacacmctcgcagataactgacacagggtctgaactggataaaacaacatgatatatgtgaactttatttgcataactatgaaatattaaacaaacaccagattaatcgacatatgagaacaaagtatactcagaatttagaagacaaaactaaacatgaatctagaaagggtaaacatataatggatggtatctctatctataacagtcgtccaccataaaaagaccatttgagttcctctagcccaagtccaataaggtaattaggtatttcagaaaaaaaaatgacatatataaagacrtaacctaatgatactgaaattcatataaagaatgtattaacagaagacagtagtataaatggagtttttagaaagaaggagggggttataaaaagaatttcgcagtattcacccaacactgtccaaggaaaatggatactgactcagcaggcattatgattttgagagacaaatgttttgtactataaagcaaacttaatacatcagtcctcgctaaggtataatgaaatctccttcaaaactactgcttcctttattctgagtctgtgttcaccaagccactttctgattactaactggatcagcaagaataaaaaccagacctaaactgacaagatctccacagggacactatgaggctctgtaggtagaaggccagcatttcttctgacttctctattgactcctctttctagcttcaacattagctatttttattgtgaaggcactttgcatatttatcaagagccatgtaactgttctcatttttttgactctatacttctgcttccaggttataatgccaatgtgaaagaatatgtttacaaagttgaaaatcacagaattatatacacttttaaaaagaaagaaatctgataattgtagtacccttattccatgaatatttcataatactttaaaataatgatttatatagtaggggtcacaaactcaaacacctacaggatcaggaaagaagcaataaagagaaaagtagactggcttgagagattataaagaatgacgaagactgtggccaactactagctaacaagggcagccactactcagcactggtcatttactgccacagaggaatgtggacccaaagttgttaaatcttctgatttttcaagagaagctacaagtcaggaactcttcctgaaatagctttactttcaaacattggcaattaattcactttttaaaaaaaactgagtaagctaatattatgaagaccaaacaaaacatttctatagcctgatctggcctggagtctaccagtttgaattctgttctgcaactctgaaaaatgcttatgttatataaaaaacactaatattggaacataagtcaaattatataaatacaacatactcttctcataaacagatacataaaaactatctacatgcgttacatgtaatacatgtaataagccagtaataaattctgttatcaacatcaacttttatctccataaaaacagtagttttctgcactactcaaacatatatgtcacattgcattttattcttttaatcttggatcaacttgcaaaataaacttaacatattctatagttttaagtatacttcagctggaaatgcgtttctttacagtaaagaaaactagaaataatgttcagatctttaataacattttgagtcaatcatacatagggatgatattatatgaaactacagatacatatatgtaaaataataaaaactaagactgggttgagatgatagactttatgcacataactgaacccctttccatcctaaatccagtaaaatgaaatacttaaaagaataaattcaaattttcagtgaaagcaaggaagagtgctaagcagatcacagattttgaggatttctcaaaggaaagaaagcatgtggaatcagatcagagaaacaagatcagaggaaatctgagttctaaacatttgtaggaaaaaactgctacaaaggtaggtgcagtttcaggcagctgcaaacgtagagtcaattgaataaggagcagatgcaaattctgaggcaatcatcaggataagaaagcatccagggtacaacaaggcaggtcctttctttctctggattatgctaataagcagctgactgatcaaagcaactaatgtgagcactggagtccaacctattgcttgttaataattcaggccctgttctgtcacccctatttgattgccagccttcctcaaaatgacagttgctcagatgaatgctaaccaggggaaggagtgcgataaggaagaggaggaaagatgatttattaggggagatggaataatgtttcagaatatatctatatacaactatatatattttatatacatatayaactatatatattatatatatatagagagagagagagagggagagttttgttttgttttgtttttaagagacagggtctggctgtttcactctttgcccaggctggagggcagtgatacaatcatagctcactttaactctgaaatcctgggctcaagtgatccccctacctcagcctctggggcagctgggactaaggacgccaccacacccagctccaaatatatttctttggctttaacaactggcagagcctgtgtcctgactacagggctacaacagccagagaaagggtacattttgaaaactgtcacaaaagcatctgaagatgtcaagtagacatgttgttgccagcataatacactttcattaactggctaaagggttaaacaaggaaccggttgtctgcaacaggttagggttgggagagagggagaagggtcagcactatctcctttatgcccctcgctccccagtgttggttaccaatcttttctgtctgcatcattcctcccttgggctcagaaaacagaattcttggatcctcaaagaaacttcatgtaaccttacaaaatttattaaagtgtgactgcacgggctgggtgcagtggctcacacttttaatcccagcacttagggaggctgaggcgggcggatcacctgaggtcaggagttcgagaccagcctgggcaacatggtaaaaccctgtctctactaaaaatacaaaaattaaccgagcatggtggcgtgggcctgtaatcccagctactcagggggtggggcaggggggtgggcgtggtctgaggcaggaaaatcacttgaacccgggaggcagaggttgcagtgagctgagatcgcaccattgcactccagcctgagcgacagaacaagactccgtcttaaaaaaaaaaaaaaagtgtgaatgcacccatccaggaggaagagatagctaaaatgtattttgtcttcacccagttaatttgccttcactgccctctaatgaaagttctctttggactatccactttcccaggacttactgtgattcagaatcaagagaatgagtggtagagaaaggcaggactgaagagctaagaagaaagaagaaaatattcctgcttgctcagtttctgaactyacctttgtagagaatctgagtaatgggcaaggaatcgagaaaaattagagaataagccaaaaagactaagtctgcccatctaataaagagttggggaggacaagatgaaagggaaaaaaatcagattggggtagcggaaagacctcaggctgagcattttcggggtttctgagcagtgctacaatgaaagaattggagggacgataaagagattgtaagaagcattgctatgggttacaacttagatgttatttaacaatctttgagaaaagcacatcaagactgagattccttttaaattccttctggatgctggactgtgcttctttgyatgcaattctgcagagatggcccacctgggccttagcatttatgaaggctaaggccttagagaggccagaggaggttgaagggaaagtgatataaatacaatcaggggacctagcagctgggtgtacttcctttgtccaagatacttataacctaaattaaaattaaaaggaatttytaaataaaacagcagttttcaatcactaataaatyttccctcactytcaaaaccactcagcctttaaaggtttgctttgaggaattagagcaaggactaaaaactagtcagttaatctggattccatttctttcttttttacttttttttttttttttttttttttkscactgttctttacagggagaaacatttcaaagactaatgaagcttgctaggggtagtgattgaggaggatacatgtattccagtaattctcttctaatttaaaatcaaactatgaggaagaaattaaggaagtaattatgaaaacttctgtacttaaacttctttaatagctaccaggtaactccatggtaaggcctacctgagccaaatttcaaagcagaccaagttagtccataagggctataaagtgttttcccttctgggtatattgtattgtacaaggacaaagacatctttaaaagaatgttcagccttcactagtaaatggaaaacacattttaaggcagattttaagggtctttctggggctctaaaaatccagaacatatttgtggtctcctcctctgaccactacaaggccaactttatttaatactctgtattattttagcatagatttcccatttaccacttctacatcattttgcctctatattcaatcactttcttggcccctatactcacttttctatgaacctgtcttcttttcatttcctatcctaccatttcactgtactgattattacctcaatttatcacagcatttacttctctttttaaaattccaattcaaactcaagcctaaagcaggaaatcttcataaaccagccagtcaaaatctcagattcaaccagatcccccgatgggattcgaaaggtatratacacagctttgtatggaatctgttctctaagattttcctttctctttttttaaaggcaggatcttgctctatcacccaggctggagtgcagtggcgcaatcactgctcactgcagcctcgacctcctgtgstcaaatgatccacccacctcagcctcctgagtaactgggactacaggttcatcccaccatgctaaattttttaaatgttttattttattaaatttaacttttattttttagacagggtcttgctctgtcacccagaccagagtgcaatggcgtgatcacagctcactgcagcctcgacctcgtgggctcaagcaatcctcagcctcctgagtagctgggactacaggtatgcaccaccacacccagttaattttttttattttttgtagagacagggtcttaccatgctgcccaagctggtgtcaaactcctgctgggctcaagmaatcctcccacctcggccttccaaagtactggaattacaggtgtgagccactgcacctggccactaatattttttaaatcacactcattaatttattaccatttataagaaaacagcacctttcctctaaaatggcttaccaatcttcccaagatccatgtaaagggaggtaagcaaggctactgacttcgagacgtacagtgacactacccaccataacttaactggttccattctaggttgtttttttctttcttgtttccaaagtttaaactttattttaggcaatctggtgcttaaaattccccaagcttaaagtttctctggccttttggaataaaatatccctgggagggatattttaaacccttatttttatttcccatgaataaatttcagatcctttcatcagagcaggttctgataataaaggagagaaggcagtttatgcattagcaatggttccatctcctaggaaggattcagaagggcacatgatagaaaagctgaaatcatagagactgtctacttctttttttttttttttaagtttaaggcactgtgtgaagacaaaagcacctaacccagttctgggttctgccagaacacaaactccatgagcacagggatctttgcctgttttattcattactatttccagcacctagaacagtacctaacatacagtgagtggtaaaaaatacttactgaataaatgactgagcatctcagaggaagtaaccaactaaacaagacagaatatatttcaagggaacagaatgtgcaaaagcataataagcaataaacagcatggtcccagagatgtacagatagttcaatatgactggagcatagaacacctgtcagggaatgtcaagacatacaattctgaacaggtacagaggagaaagttcatagggggacctacaaaccataccaaggagtttgggctttatgctgacaataatggaacattaaagtatcccaagaagaatggcaggggcatactgagttttagaaagatctctctggaatcactttgccagaaataggaatgaataggaaagaactgtctagaggcaggaagattaggtaagaggccactggagctcaggcaaaaataatgagggcctgaaataagacagaggcagaagaaatggagaagggccagatttaagacagatttcaaagatagaacygacaaaacatgataagagattmatgtataggtgggawagaagaagaattatagaataagtactagatttggcttgggtaactagaaggataaggaagaattccccaaaagtagggattattgggaagagtggattttttttttttttttttgagacggagtctcgctctgtcgcccaggctggagtgcaggagtgcaatctcggctccgcctcccgggttcacgccattctcctgcctcagcctgccaaacagctgsgactacaggcgcctgccaccacgcccagctaattttttttttttttgtatttttaatagagacggggtttcaccgtgtcagccaggatggtcttgatctcctgacctcgtgatccgcccgtctcagcctcccaaagtgctgggactacaggcgtgagccaccgtgcccagccgggaagagtggattttgaagatgagatgatgaacatgctgagttagaggtgctggaatgaacccaagtagagacatgtagcaggaaattgggtatacataccttgtgcttaggaacacagcctgaactcagtcaayttataaatttagtagtcgtcagtgtttaagtggtagtggaaattgaggccacaggtaaaatcaatcagaaagaaaacacagagtgagaaatgagaagttcaagtataaccccctgaaggaaggaaaaaagaagctgcaaagaattcaaagatgcaggaaaagaatgaaggggaaaagagtagtaattatgttattttgaggaaactatcaaaaagaagtgtttaacaatgtcgaatagtgcaaaaagctcaattagtataagggctgatgaagtatcactaaggacattaactaggacatctggggcaggggggtgggagggggagtcagctttcagtggatgtgaagggaataaatgccaaggagatgaaaacagcaagatatccttcaaggagattggctatggaagagaagagggagaatagaattaaaggatttttataaagtgggaaaggctattaaaaaagtattgccatattagtgctgaaatcttgatctgctttcagtcttcaatccaatgatcactggtctaaatgtagcaagatttaagatctgtagtccccaatgagtagacagagtctaatcaccaaatctctcaagctcgaggtttctctcaagcttgaccctttctctctagttttctagatctttcatgggtatctccaggctttaaaggggaaacttaccaaaaaaaaaacaaaaacaaaaacaaaaaaactccttatatgacagttgaaatagtctattcaggctggggcagtggctcacacctttaatcccagcactttgggaggctgagacaaatggatcatgtgaggtcaagagttcgagaccagcctggccaatatggcgaaaccctgtctctaactaaaatacaaaaattagccgggcatggtagcgtgtgcctgtagtcccagctacttgggagggtgagacaggagaatcgcttgaacctgaggggtggaggttgcagtgagccaagattgcaccactgcactccagcctgggtgacaaagggagactcaaaaaaaaaaaaaaaaaaaaggaaaagaaatagtatacttttcactgtaacacatgaaatatatttattcaaatcacattcctaaattatagtgacatgtaagtagaagctttggtaaaaaataaaaatttcattaaaaaawcgtaacaaaccttgaaatactcagacattattttaaccaaaygtaagstatttacttaaggaaagagacaaactgttaatggtaaaagaaggcataaataaattaaaagttatacgtcaagtagataagactaagttttgaaaagataataggctgggcatggtggctcacatctgtaatccagcactttgggaggccaaggcaggcagatcacttgaggtcaggagttcaagaccagcctgggcaacgtggcaaaaccttgtctctacgaaaaatacaaaaaaaatyagccaggcatggtggtgcatgcctgtagtcccaggtgcacytgggctgtactgtgtggtctgaggcaggaagatcgcttgagcctgggaggcagaggttgcagtaagcagagaccgcaccagcctgagcaacagagtgagaccctgcctcaaacaaaacaaaacaaaacaaaaacaaaagataatggctgggcatggtgctcacacctataatcccagcattttgggatgccgaggggcccaacccaggctgagggcagatcacgaggtcaggagatggagatcatcctggctaacacggtgaaamcccgtctctactaaaaatacaaaaacaaaattagcyaggcgtggtggcgggcacctgtagtcccagctactcaggagaatggcgtgaacccgggaggcagagcttgcagtgagctgagatcgtgccactgcactccagcctggacgacagagcaagactctgtatcaaaaaaatttaaaaaaaaagataaaacctctaatttaataagtttaattcaataccaattaaaagcctttcatattttcagtgatgatgagcctgataaatacagaaaataacatggcaagaatcattttatggctatcataatgtgaacattaatcaaaatgatatggcaggcctggcacggtggctcacgtctgtaatctcagcactttgggaggccaaggtgggtggatcacctgaggtcaggagtttgagaccagcctggccaacatggtgaaaccccatctctactaaaaatacaaaaattagccaggcattgtggcaggcaccaataatctcagttactctggaggctgagacaggagaatcacttgaacccgggaggcacaggttgcggtgagctgagatcgcgccattgcactccagccaggtgacaagagtgaaactccatctcaaaaaaaaaaaagtgatatggcatagggttaaagaaaagtgaccctcaaggaatatgatakacaagtttatttggtactattttcgtatataaacaagctggaaatcaatagcaactcaatgttgggtaaaggaatcaccacttgggaattgttgggataactgactattagtacagaaaatttatttatatacctagcttgtttcatatacctatgtatctgtagaattaaatattttttaaaaaataaagaaaccagaaaatcaacttttataaaaagcaacacaacacattgagaaaactgacaaaagtttcttgtccaaaaatgtaaaagaaaacaaacawgcaattacataagggcgacacctaaaattcactcataagtggtcaaagagagaaaaagataaattttgaaaaagaaaatacaaatgggaatcatctgaraaaatacwatgttagaaattaaagaaatgctaattaaaatagctttaaagtactaccgcttaactagcaagatgtaaattacaaaatctgaggctgactgggctatatttctacttagtgacattatcatttggtaaactcttcttgaaaaaaaccaagattatgtaataagtactataaaattgttcatatcttttggttgttttgtttttttgttttttgagacagagttttgctcttgtcacccaggctggagtgcagtggcatgaccttggctcactgcaacctctgcctccttgggttctagcaattcgcctgcctcagcctcccaagtagctgggattacaagcactcaccaccatgcctggctattttttgtatttttagtagagatggggtttcaccatgttggccaggctggtcccgaactcctgacctcaggtgatctgcccgcctcggcctcccaaagtgctgggattacaggcgtgagccaccgtgcccatatctttttacccaataattccacctggtattacaaggaatgtaaggaaatattcagtatcctcaaaataaaagaaggaaggaaaaaaagaggtaggaaggaagaagaaagaagaaaaataaagatgttcttgtgggcgatggctcacacctgtaatcccagcactttgggaggccaaggcaggcagatcacgaggacaggagatcaaaaccatcctggctaacacggcgaaaccctgtctctactaaaaatacaaaaaattagccaggcatggtggcacgcgcctgtagtcccagctacttgggaggctgaggcaggagaagcacttgaacctgggaggcagaggttgcagtgagccaagatcatcccactgcactccagcctgggtgacagagggagacttcatctcaaaaaaacaataataataattttaaaaagatgttcttagacatgctatttaaaacagtgaaaaactagaaatcatccaagtatccctcagaaagagaacggttataaaaattaggwtatatgaataagacagacttcaaaacaacaattaagaacatatccagaagccaggygtggtggattgagcagaagaggacgggaagatcgcttgagcccaggagttccagaccagcctgggcaatatagtgagatctcatctcaaacaacaacaaaaatccwctgacaaataagaacaattaatttggaaaaatgtaaataaagttttgtttttattgtattgtagtccttttttctttgaagttacttcagttcatgaaaagggtgttttcttaggttgtcaataagaatgttgtgcaagtcaaaatcaaaaccttactaaaactaggaaagaataactagctgggcattgtggttcatgccrataatcccagctactcaggacactgaggcgggaagattgcttgagtcctggcatttgagactgtagtgagctaggatcatgccactgcactccagcctgggcaacagggtgagacccccatctcttaataataataataataataatttactatttcatcctcatctatgggtctttcattctatcagagaagaacaggaaatagatctgacatggctgattttcagagtcattctgattattaccatagtaccttgtgctcttacacataataccaagctaaacgttagatgatttattccagtttctttctaaatgctgaggttaaagctgattttaaaattcctttgctttacctmagggcctatggaattgaggctaaagcctcagctacaatttctgagatcatgaaattcttagacatgagacgggtggcctgatgaatactaactactgtgatttgacattcagacaaaataaaaactcttatttctgaagaagaaaagaggactaagaagataataaaaatcagtttttyttaacagtcttccaaattccgacatcatttttatgacctcttgtggtatttttaatgtgtcaatgatcactgaatacagcactcatcaccaatcttgccacagtagtcctcctttactgtcatgtagaattgactctgctaccctgccaccactgacttcagggaagcacattgacagggaagcccaggacatcttagccttttccgagtctatctaaaagcaataaaaagcttttgaaaatgtaagtagtcttatcggtaaattctataaattacctttcacttgaagaaattcccacagagttatgatcagatagtatcaaaaaaaccaatataagtgaagtcagctactgcaatgattctgctggacaaacaccaaagtctcattaaaaattcacctctctgaacctcctcccaagagataatcagtaccaggatcattttctccttttctcttatatatgttaccacattaaaatgacacaatccagcttggtgagtaaaaaaagattcaagaaatatggctccaactgacagctttgaaatccaggcacttcaaagtgtttgagataatggcatttccctatgacaggtgctactttccatagatttaaccttcttctttgccacagtaattactttagatcaaacttcatttttagaaaaagctgaaatgcatgaactaatacaataaatctttaaaataatctaagtttgtatgtgatctgtgttatgccagttttagagactatgggtatcatgcagttcctaataaaatgtgagcatctaaaaaacactgagtttctcttccatccacaatgacatgatcctgccataaacctttgcagaaacatcacaccatcctcttgaccaggagccaattccaatctgagtttcacattcttattgccacactccaaggaccctctactcttcatactctcccacataggccctagactcttccctcattagaatttatctagtcctcattctctttaccagcccattgttccacccttccttttggctctcatacgttatgttcctcccactctcagctgaccaatcttccaacctgtcattgcctaaataactttggaaattagtctccttcataaaaactttcccaagtaactagaagtaaggggaatagtccagtcaagagaacgttaagctaattaaactaatgtacttccctcataccaatcactgggcactgctacattcatgaactataaatacttttttaagtactttgatcctaatgaatgttcattctgcaattggtcactttaaataataaacacctagagaggaacaatctttctgtattctatagaacagaacatgtttcatatagtcatttaataaacgttcttttgaaatggagtctcgctctgtcgcccaggcttgagtgcagtggtgcaatatcrgctcactgcagcctccacctcccaggctcaaggaagttcacgcaattctcatgcctcagcctcccaagcagctgagattacagacattcaccaccacaccgactaattyttgtatttttggtggagacagggtttcgccatgttggccagcctggtctcagactcctgacctcaagtgatctgcccgccttgatgtcccaaagtgctgtgattacaggcgtaagccaccacacccagcctaataaatgcttttttattgtgaaggtagtaagagacttatacccagatctcaatctggagtcttcagtgttcatttcagaaactgaaaagcaatgactatccatcaccactccccacttccatgactactgtacaatctcaacttcattgctcttggctctcctttccctcaattatatttattaataaaaataaccaggccgggtgcaatggctcacaacccgtaatgccagcactttgggaaactgaagcgagaggatcacttgagctcaggagtttgaaatcagccagggcaacatggcgaaacctcatctctacaaaaaaatacraaaattagctgggcatggggcacacctgtagtcccagctacttggaaggctgaggtgggagggccgcttgagcctgggaggttgaggctgcagggagttgtgatctcaccaccgcactccagcctgggcaataaaatgagagtctgtctccaaaataaataaataaataacccagcagatgtcgataatattctaagataacaaacttttagtaacgtgaaggaggcagctgtagcaatctggcttttcaacattttcccttttgcttatgcttccatttttaattatttaacttatttagcagctatgccaagagagaggaagrtaaaatttcgcccccaccgtacagacagaatcatggcagttacatttcaatgaagcttctgagaaaaaaagcaatcttcaaaaaatgcccaaaagagcaactatttttatatccatactatttagcactcatgagttaagaaattaagtttcactgggcacaggggctcaggcctgtaatctcagcactttgggaggccgaggcgggtggatcacatgaggtcaggagttcaagaccagcctggccaacatggcgaaaccctgtctctaccagaaatacaaaaattagctgggcgtggtggcgcaggcctgtaatcccagctgctggggagactgaggcagaatcacttgaacctgggaggcagaggttgcagtgagtcgagatcatgccattgcactccagcctgggtgacaagagcaaaattccatctcaaaaaaataaataaataaaaataaattaagtttcacaaagtagtatcattgagaaagaaatgggattatgaagctgattaagatatatggtaggcatacatcactaggatttcaatattggcattcatcattgagtaggttagggtattcctagatatgtgcttacctaagcaaactggtaccattattcaaaaataaaatagtcatacagtaaataatatgackactttcaggagctcttctaccatcccctcaacatcattcttcctttaaactgaagatgataggaatcagaaggaattaagactgaatttttaagatttgaacaaggatagaaatagggaaattaaaggagctaaaaaaaagaaaaagaaaaaaaaacaacacagaatgatgtggtacgaagtccctaagcatgagtggggagagaaggcatatataatgagttacttttggagaaggtaggcagtgttaaccaaacagcagctaggagtacaacattagtggaggtstgaagctctttacacagtcaacagcactgggcataaaacatttccacattataaaatctcaggcaagtcctactttgaaagagataatacaaaaactgagactacaggctaaccttaatccaaatagcccttaaggatcaatgtcaattatattggaaacatgtacagaaagctcttatgattccccaatctaaaatgaaaaaaaaaatcccttgcttacatgctattttttaaagtcaattcaagaaactccatctagtaaaaaataattttgtctctaaagccaaaacccaacttttgtatacttagtaaacatttcataaacctaaaacctgaccattttgattataagtcagattctagaattgcaagaagcattgtcccaaaaatgtaataagcaaaggaatcacagactttatcccagggctatggaactgtaacaactttgtcctgtttytgaagaatccagtgaggagtgatggcaattcctctgattatgtctttatcctgtcatctatatctcagaggcactttttttttaatttaaaataaacaaaaagttaaagtaatccttagaggttctctgcagtccccagatattagaactcagtttctgcttcaatatcccattaactccaaactaggaaagacagcttaaagtcatttccaagggcatcaagagatactgtaggataggcttttagagtgaagcttctaacagccgtccacatcacaaaaatgacctaactagagcccaaaacagaaggaagagccttttcctctccaattttcacagtcattttgtttcttccaacagaaaagtcattctagatgctttcacttgcagcagttcctcaggttagtaactaggacccttcccatgattgacttctggcaaggaacaaatgagccccaggcaaagcacatgggtcagcaaacttttataaccactgtttcccagagaacatcagcttggggaaggccaaccaaggacctcaatgtccacatttacaatgtcaactctccctaactcagtgtcctcttccttctsttaaaagatgctgggatggtttgcaccttgcttggtgattcctgtggtcaatggcgctccctccaggtgggctgcactaatactataaccaccctctcccctctaaacccatcatgcttcagcaggttgctaacactcgtcaccattatcacatctattaccctgtgcaaggtgaggaccatgagagactgacatccccgccaatccttggaggcaagaggattcgcccactagtctgggacagctctgcctcgccttcatggcctttttccccacggtggcaaagtctattagattccttccccaggaccctgatggcattcctttccaactctttttccaaagattacacttcagttctactattccagggaacttccaagtgagacacctggctcactagtaaagcttagttttaggtgaccctgaataactaataagaaaaaggataaatctattgcagtccaggcaaagtgaaccttcttcaaagttctaaaaaatgactctggagcaagtctttccataatatgttattatctactagaactataaaacctgtttaagaatttgtatgcttagcacttcagaaggtacatatttcttccaaacttgaatagttacaaattacagggcagcacctgtttacagttgtatggaacaaatggaaaaaagtaagagggagaaagcatagcatctcttgtggaactttcattcattagaacttcaaagcacaaaatgcatagatttacagatttacttacaaccttgactctggcaagcagaagccagcttagcataaactagttggtgtttacattaaaagaaattattatttatatactagtaatttcacagtaatagcagtagcaaaaaataagtaaataaataaataatttgttttctttgacacagatgacctctactgaccaaaggatgaatccaagccaggatttagccttatagttatccaaactttatctcaaaggctatctagcctaacagtttctaatccttcaattgcatttataaaatctccaaatcttactgtgctgccaaggttagtgctatccactttcattcaaatgagtatcaaaaaagtaattctttagacatttctccaaagaagatctacaaatagccaataagtacatgaaaatatgctcaacattactaatcattaggaaaatgcaaataaaaaatacaatgaaatactacctcacacccactaagatgtctattatcaaaaaaacaaaaaataacaagtgttggtgaggatatggagaaaatggaacccctataaacggtaggaatgtaaaatgatacagccactgtggaaaacaatacggcaattcctaaaaaaaaatcaaaatataattactatatgatccaaagattctactctgggtgtatactcaaaacaactgggtctcagagagatatctgtatacccatgttcataagcagcattatacacaatagctaaaacatgaaagcaacccatgtcaatcaacagatgaatgaatatgcaaagtgtgggatatacatacaatggaatattattcagcctttaaaaggaaggaaattctgacrtatgctctaatatagacgaaccttgaaaacattaggctaagttaaataagccagtcacaaaaagagaaatactgaataaatccacctatataaggtacttacactagttaaaatcatagagacagacagtagaacggtggttgccagagtgtggtgggagaataaaayggtggttgccagagtgtggtgggagaataaaatggagaagtattgtataatgcagtggtccccaacatttttgacaccagggactggtttcatggaagtcaatttttccacaggtgggcgggagatggttttgggatgattcaagtgctttacatttattgtgcactttatttctattattattacattgtaatatataatgaaataattacacaactcaccatatgtagaagcagtaggagccctgaggtttttttcatacaactagatggtcccatctgggggtaatgggagacagtgacacatcatcaggcattacattctcataaggagtgcgcagcctagatcccttgcatgggcagttcacaaaagggttcacgctcctttgagaatctaatgccaccgctgatctgacaggaggcggagctcaggcggtaacgtgaacgatggggagtggctgtaaacacagatgaagcatcacttgctcgtccaccactcacctcttgccgtgtggcctggttcctaacaggccatagatcagcaccagtccatggcccgtgggttgggggacctctgatgtaatgggtatagagattcagttttacaagatgagaagagttactggggacagatagtgatgatggtagtacattatgaatgtgtgtgtgtgtatttatttagagaaagaaactcactctgtcatccaggctggggtgcagtggcatgatctctgctcactgcatcctcgacttcctggactcaagtgatcttcccacctcagcctcccaagtagttgggactacagacatgtgctatcacacccagctaatttttctatttttcgtagagacagggttttgctacatttcccaggctggtctcaaactgctggactcaagcgatcctccagcctcagcctcccaaagtgctggacttacaggcatgaaccatcatgcctggacatcatgaatgtatgtatgtatgtatgtatgtatgtatttatttttttgagacagagtctcgccctgttgcccaggctggagtacagtgacacaatcttggctcactgcaacctccgtctcccgggttcaagcaattctcctgcctcagccttgcctcccgagtagctgggactacaagtgcttgccaccatgcctggctaatttttgtacttttagtagagatggggtttcaccacgttagccgggatggtctcaaactcctgaccttgtgatccgcccatcttggcctcccaaagtgctgggattacaggcatgagccatcatgcccagccacatgaatgtatttaataccactgaacttaaaaatgatgacacttaaaaatgattaggcaggagaatcccttgaaccagggagtcggagattgcagtgagctgagatcgcgccactgcactccagcctggcgacactgcgagactccgtctcaaaaaaaaaaatcaaaacaaaacaaaaaaatgattaaaatggcaaattttatatgtattttagtactataaaaaactgaaaaggccgggcacggtggctcacatctgtaatcccagcactttgggaggccgaggcaggcagatcacaaggtcaggagatcgagaccatcctggctaacacggtgaaaccccgtgtctactaaaaatacaaaaaattagccaggcgtggtggcaggtgcttgtagtcccagctacttgggaggctgaggcaggagaatggcatgaacctgggaggcagagctttcagtgagctgagatcgcaccactgcactccaagcctgggcaacagagtgagaatctgtctcaaaaaaaaaaaaaaaaaactgaaaaaagatagaattcttaactatgtctgtgaggaatctttaaaactacttatttaaaaagaaaaaataaagaaagaaaagatgctaaatagaacttaattctgacaaaccagaaagaataggttggtgttgtaacgataacaaaactctaggaaaaagaagaagaagcctatataaaattcaagtatttaatcacacacaaaaaattaacactggtcatatcaggcatacatattaaagtttaagagttttaaagtttttaataatagattacaaaagttcagagaagaatcagatataagccaatgtccagagattgtaaataataataataattttagccctagaaggctgaaaaaatcaaaactaaaagaaaaggaataaaagggagagaactctaaataagccaatatggatggtcaaggaactctctgaagcacccaaactttaaaagatgtgttcaaaagatagatggaaaataatcagatggccaaagcaagacatgcaaaagactggcaaatactttgtttttttttttgagacagggtctcactctgttgcccaggctggrgragtgcagtggcacagtcatagctggaactcctgagctcaaactatcctcctgcctcagcctcctgaacagctagaactacaggtgtgcatcaccacgtccagctttacaaatacttacaaaagaatatctggaaggtgaaggcccaaaatgagctaaggctcatgaaaaatatggagggcaataktaacagcgcttcttagaggcatagaaagtgaggagartaagggtgtggtaattgtttaaaaaataaagctaggtaagaggatagagaggtatattttatttttattcttttgagacagggtctcgctctgtcacccagactggagtgcagtggcatgatctcrgctcactgcaacctccgcctcccaggctcaagagattctcctgcctcaacctcccgagtagctgggattacaggcgcgygccactatcgtctggctaatttctgtatttttagtagagacagggtttcaccatgttggccaggctggtcttgtactcccgacctcaaatgatccaccctcctcggcctctcaaagtgctgggattacaggcacgagccaacgcgcccagccccgagaggtgtactttagctagtcagtgatagcctttctgagaaggtggcatttgaatgcagacctgaattaaatgagggtgcaacccatgggagaaagaccctgcaagctgaggcgatagcaaatgcaaaggccctgagttggcaagatgcctatgtgagaaacagcaagaagattagggctagaatggagggaacaaggaaagagcaacaagaaataggtggaaagatctgactcatactttgaaagtgttactctcgctactgtagaaaagagactattgagggataagcatgaaaggagacggacctgctaggaggctacaagttcaggacaggaatgaactctcatttctaaaaaagtttgaatccccaaatctatacaaactatacctcagagtactgaaaaaatgtaaagatgtgtggttcatacaaccaccctcaataattttttacaacttataaaaaacaagagtagtgccagaagcctggagttaaatgtttttctaagttttcacaaatggagaaaaggaaaggcaaatttcagaaactaggagtcaaaacaagcctactatgaacaaaacaagccccactggctttatttcctctaagaaagcatcagctgtttccaattttttcatatttccttacagtacctattcctatgcatacctgatttttcagttacaattataacatagacatgttttattgcctaattattatagattttactatattacagacatttctctgtgttgtgactctgacatcagtttttaaataactacaaattgggtcaggcatggtggctcacgcctgtaattccagcactttgggaggccaaggcrgtggggatcacaaggtcaggagttcaagaccagcctggccaatggtgaaaccccatctctactaaaagtacaaaaattagccaggcgtggtggtgcacacctgtagtcccagctactcaggaggctgaggcaggagaattgcttgaatccggaaggtaraggttgcagtgagccgagatcgcactactgactccagcctgggagacagagtgagactctgtctcaaaaaaaaaaaaaaaaaaaactacaaatcaaaggcaacaaggagacaagttagtagacgcataaaattttcaggatatttttgcttatttcctgaactatattcataatattatttaaaatacaaatctgacaccagttaagttttgggtcgcagtaagtaatgccaggaaaattattaaatagaacatttccctttttttcttttcttttttcttgagacaaggtctggctctgtcacccaggctggagtacagtggcgccatcttggctcactgcaaccttcacctcccagatcttcccaccaccgtctcccgagtagctgggactacagaggtgagccactacacctgcctattttttgttttgttttgttttgtttggtagagacggggtttcaccatgtccacggtggtcacaaactcctgggtttaagcaatccacccacctcagcctcccaaagtgctgagattacaggcgtgagccacggtgcctggcctgaaataaaacttttcttatcaggtgcaaataatattttaataaaaatggaatgtcagaaatcccagaaccctttcacaaagatggctagagttaatatttttattctataaattctggagaaggactttatttctctaggcacataagtcacaaactggctatgataaaatataaaagtagaaagaaaagagggagagtaagatttatttgtagctagttgatattttctacttttgatcatattaattcatcatagtcaaggaacacaaccctttattaccttgcagtggtagaaaaatgtgttgcatcttccaaatgtccttaggccaatcactttgcattaaaatcctaataaacactgycttctttctcctcttctagggtaacacatgccattatatttcagttttgcaatgttatggttgagacaaccttgcartcaataatggttttacataycaaggaacaaaacgaaatcatttgaaattgaaaaacaatataagtaacagataattcttgttaaaatggctgtgtaggttcatactttgaggtcacacaccccaacacatacaaactcctgcacccttcacacaacagcgatagataaaaaattaaaaaaattcttaaaaaaggaaaattatagctgccatattagttagagttcaattgcaggtataaaaaaacctctaatattttaaacaggatcagatttaatatttaggtgctaacacttagatgctaataaaataaatgtaagagttggaggaggaggttataagctagaccttaaggaatgtaactcagaatccacacagaactggcctgccaaaggaactgccacctctgccaccatcggaaagcttgaggaagcaaggcactcctgtgccaagtgctggctacaggatcacacctccttagccacagtccaggaattcggtagccaccagtgtgattgctgtctccaagaacatactgccttagcttcagttagatcaataagctcccaccagaattgctggctctgaggaatgcagcccatggctgcaatttggggattagaaacactgtaaacgccaaaccactggatctgcatcagcaaaatgaatgctctgtgccctaccaccctctccccactgactcaattytgaattcaaatctcatgcaagtaaatatgattaatggaatcggaatcatatcaggaactctagaggtaaggaagcctaactagtactttttactttccagtcactgtagcacaggaaggcataccagaaggaggttaaaacagatgctaaattagcccatctatcatacatgccatatccatcaaaatgacaataaattatatgattatatgatagyaattatttagaataaatatttccaaggactataaatggaacagaaacagaaagcagtcagtgaagcctaatgggttccatatctgaaagcaagcaaagatggtcaggagttcaacttctgtaggtcaatgaaaatttaaggtgtctcacttaaggcaggggactgaggccaggcacattgcttaaagccaggaagtgggcagcactccagaaatgacactggaaaaagcagttatgtcatactgtacaataaaacaggcaggaggcaccaaaatctaagccagccacttgctagctcagtggctagatatgtactatttaccattatcacaatgatcagaaatctgagttacctacaggaaccagatggaggcaaccacaaaactgataggctgggtaggatatgatgatattggttaacaactgtcattcgagttaagctttcaarccaaaattccaaatacatgaaaaaaattaacaccacgattaccaataaaatcaactatttggtagatgaattcactcaagacaaaatgaaaataataaaacaatctgaaaatgaccttaaaataagtatttagaattctcaaaggatataaaggaaaaatagccataaaacatagagattcaaagtgcaatctcagtaccaatcaggataaacataaataaatcacacctagacatattatagtgaaactgcataacatcaaagtgccataaagaaatatcacctaccaaaaaacaacaattagactgacagcaaacacttcatcagcaataatggatgccttgaagatagtggagttataagtttaaaatgttaggaraaaagaactctcaagctaggattccatgcccagctaagccatcataaagaatgtaggcaaaataaaaacattttaaaacctacaatgaccatgttacactaacagactcttagtaaagaactgatatatcatagaatatacttcagaaagaagagcccaaagaaggaagcaagacaggttggtggtcacagaaactgataaaatttattatcaaatgcaaccaattacagattataaataaattatgattaaaagtgattatgatgaaaagaaaagtggcaacatggatgaaccttgaaaacattatgctaagtgaaagaatccaggaacaaagccacagattatataattccatttacataaaatgttcagaatagacaaatctaaagagacagaaagtagattactggctgcctatgactggggcgacagaaaagagagtggggagtaggccagcactgttggtgagcacaggatttcttttaagggggacaaaactaaggggacaaaagtgttgtaaaattagatcgtggcaatggttgcacaattctgaatatactaaaaaaatgacttgtacactttaaatgggtgaatcgtatagtatgtgtattgtatctcagtaaagccattttaaaaagcggaactagaaaggaaaaggggatgttcaaatacactaagatccttttaaattttgatagaaatttttataattatttatgaatgttaaaaacttagaaataacaattacaagaacagaaacaccatctatagctccccctctctctacacacacacacacacacacacacacacacactttctttcatctactaaaagacagagtctatgagactaagttaaaaaaaaatcttattgagaagccagaatagaaaaagaaaaaaatcacaaaaataattttttaatccaactatacactgcttatgagacatgtytaagccaaaatgatgcagaaagtttgaaaatagmcagtgaaaaatatatcaggaaggtgcaaaagaaagctggtataacaacattaacagacaaaatagaacttaagataaaaaacaaatttggaataaaaaaagacattacaggccaggcatggtggctcatgctgtaattccagcactttgggaggctgagggggcaagatcacttaagcccaggacttggagaccagcctgggcaataaagtgagacccagtctctacaaaaaaaaaaaaaaaaaaaaaaaagacatgacataatgataaaaaagaatactcttcaaagaagctataatgaatgaaagtatacaattaataatataagctctcaaatgcatatgaagcaatggcagatacaattaataaggagagactgacacaactagtcatgatgggagactttaatactgtgttaccagaaactcacagactaaatggacaaaaattccccaaggatacagcaaatctgaacacaacagtaagtctgatcttatacatatacatatatacacataaatatatacacatatgcaatacatgtctgtgtctatgtatatatccacatacatatatgtgtgtatacatatatacacacatatagatataaaactgtgctaaacagaaaaagaatatacagtggctttaagcacataagacatttataaaaatttactattgtctcaaagatagtatcaactaatttctaagaataatatactaatcacattatgcacaatgcaaattagaaatcaataataaaaagtaaacagaaataatcatatatagagaaaataacgtactagaaaaactcatagggaggaaatctaaatagatattatgaaatactaaaactgaacaacaatgaaattaccatataaaaaactttgtaaaaatacaactaaacgtgtaaagaggggtagtcaagaagataataaagatacccgttaccaccacttctaaacaacattgttttggaggtcccagacaatacaataaagcaagaagaaaaataaaaggcacaagaattaaaaaagaaatatcaaaaatgtcattatttgcatgctatcattgctctcataagaaatccaagaaaggccaggcacagtgactcgttcctgtaatcccagcactttaggaggccgaggcaggtggatcacttgagctcaagagttggagaccagtctgggcaacatggcaaaaccccaactctacaaaaaatacaaaaaaaatttagctgggtacagtggcacgtgcctgtggtcccagctactcaagaggctgaggtaggagggtcgcttgggcccaggagatcgaggctgcaatgatccaagatcacatcattgcactctagcctgggtgacagagtgagactgtctcaaaaaaaaaaaaaaaaaaaaaaaatccaaaagaatttacaattaaaataaagaggattcagcarggttgctggatataagatcaacttgtaaaaactgacagtgttctcttacataccagtaataaccaacttagaaaatgtaattttttaaaaaaaaccaattacaatagcaataaacactacagggtaactgtggaaaaaatcctacaaaatktgtaaaactgtcagatgaaagtacacaattatattaaaaacctccaaaaataacatgaatggagaaatatattatgttcacaaayatgaatacttgatggataaccacatcaattctcttcaaattatgccaaaaaaaatcaatattctacaaggaaattttacagaagttgacaagttcattctaaagttgacatagaagaataaatagccaagacaatttgaaagaaaaagacaaaataattaaaagagtgtgatactagcccaggggtagacaaacagatcaatggacaggacagataattcagaaacagtcaagtacatacacagaaatttggttctagacaatggtggcactacaaatcagggggaaatcagaccactcaataaaaggagctaggattagctatgcataaggcaaattagatcactaccatataacaaaataaaattgatggaagaaaaaagaaccctaaatgtgaaaagcaaaactgcaggacattccacagaaattataacattgtgattcctttgactttcttacttgatacaatttctaggctttaaactgtcctacttgttctcctgaagggcactctgtacccagaactgaattctccttgtaattcggaagctgcagagttagagtgtgagcatcactttccaagtgctgttattagacttctggtgacacaacctacctcagaccacaccagctttacttattcactacaaaattggaatgatgaacattgcacttgccatctatttaacagctaagttaacagctacctaacctctcacatcctgggctcatttgtatagggtttttttgtcttctccaagtgtaaggccttattcttacatctactcattgctgtcattaaattaggcttgttgtccttgtctgtggccttttccataatctctttatgtcatcagatgtattcattatcccatcctgcactatgtcattcacaaaatcaataatcctgccttctatagaaggcttcatccaaakaactgatttaaaatgttgatcaagaaggtttacatagagaaccctagagacataacagaaaatgtcctcttaattaatactgatccacttaattatattagcaatcagtccatatttttctatctggccatcaaaacccttataagacaaggtaaaatgtcctgctcagttttggtttagctttgcttgttgcatttccatgatctgccaatctacwaagcttttcaaagaagtgagatagaagtgagatagtctgacatcacttgattttagtgaacacatggtagcatcaaacaacttgtacatcttctctcagatgctcacaaaccactcaaaaaattttaagtaaattctgaaaaattagcacaagttacagaagagaccaaattatagagactccacacattcataacataattattatagtctctatgggaaatatataactattgaaaaaacatgtccacaatatgcaggccagaaaatttctttaaaatctatcattcacagaaaaagaactggtaacgctaagaaatggagccccctggggtggagaggaatatggggagagtgataaatgtaaaaggataatagagttcaaaaacattactttgatagtttaaattaagagaaggcagacaggtatacaactgggcaaatgctgtacttcctcacaaaagaagagtaaacgtaggccgggccgcagtggctcacacctgtaatcccagcactttgggaggccaaggtgggtggatcatggggtcaggagttcaagaccagtctggccaacatggtgaaaccccgtctctactaaaatatacaaaaattagctgggcgtggtggcgcgggcctgcagtctcagctactcaggaggctgaggcaggagaatcgctggaacctgtgaggcagagaggttgcactgagctgagactgtgccactgcactccagcycgggtgacacagcgagactccgtctcaaaaaaaaaaagaaaaaagaaagaaagaaaaagaataaacgtgttcaaaatccagataagttataaaactcagctcccaagaaaacatggggcacctatcccacctaatcacaaaggatgtatcagacacagtacaccctgaacactgaaactagagagtagaaaatattctgctaccttcatgtagcctgctttgaaactgttcctcatttgatcttcctggtgaattcacacatgagcacctaagagacttacttctatctggttctctcagtggtcctcagacacaaacttttcacttggggactaagaaaccagctatctacaaagacattgtatataaggagatgggcatatagccaaaaattttcactggccatgaagaactatgatatggaataaatattttgctacttaaggcatctttccaagggttccattaataagatattatgagtatttaattacaaaaacccattcttttacatttcccaacaaactataatagaggtatcagaacgcattactagatggtagaaagtattatctttcggctgggcrcgatggctcacgcctgtaatcccaggactttgggaggccgaggcaggctgatcacgaggccaggagattgagaccatcctggctaacgcggtgaaaccccgtctcyactaaaaatacaaaaaattggccaggcgtggcggcacgcacctgttgtcccagctactcgggaggctgaggcaggaaatcgcttgaacccaggaggcggaggttgcagtgagccaagatcatgccactgcacgccagtctgggcgacagactgagactctgtcaccaaaaaaaaaaaaaaaaaaggaaaagaaaagtattatctttccctgaagctctatttcttgactgtaaaagagaaacgtaaatatacaacactcaaaagctaaaaacaatgccagatattctgtataactatgaagtccctgagaacttttcagtgtccaaaaaagtggcattcaataatttttaaattttatctgctccatctgccagtgttcgtcatacttcattataggatttccttctcgtcttctttttttctagcatagcttctgcttaaaaacaaaagctttgtaagttgaggatatctatagagtaggtattatttttataaatatttcttcatcttttcagttaaaggctcatccggaaaaggaacttgtaagtaaataagtccaactcagcctccaattctgtatcagcttgtggtctgaatgttccctcttatctcttatccactgggtgacagctaggcatggatagtgggtagagccaaggacacagtaaatcagtgagtagaaaaaggagtgtgctcaggagtttccatctatttcattcacaggactccatgtgatacaagagtttaatctatagagggtcttgggcccagaggactttgtggttcagggtccccaaaggatcctagaatacacaacttctctttccaggggcaccctgagctaagtggtttctgtgaactagcttgaaaacctcatcaccatttagaatactgtatctatttaaaacacatcttcccataataaactgatgttcaaacacttgcataattcataaatatgccattgttatacttaagattttccattcattttctcaaaaacaaaattcttccagaagggggaaactgcaacggagtgagtcaagtccttccaagcgttttaaaatgtgagaagattgaggaaacctgtgcttgttccctttctgtagcaggctggtcctaagtgtagaaagctggtcctaagtgcagggttggtatgcaggataggagaagaaagggtcctgactgaaacctggccagtgcccagtatcatagagttactaatgaatttgtcctgataaagtgttctggaagcagaatgctcttatccttttcagtttactaaaatttaaaattaaaattttacactgaagtagaatcccagggggatatataaactacagcagcctatttctctgtttttgctcctgatgctgcttgacagccctacctataaaagcctcctgcaaacatttgtcctgaggtcccagtgctccaggccatcagggagctggcagatagcaaaactgcacagaactgaatgcaccagctactcatttcagtccaaaatgggaatggaaaatgtcttttatgacaccatcaacttagtgtgcctgttaacacaaccacttaaaatcctgcatttctttaaaaactcactatttcaagtaaagtattactttttactattatatttatttgaacagttgtttcataaatgcagtgttcttgtaccagtgaaactgacagggattaattgctggtatcactaagaaagtttagaggaagaggatttkgggttctaaactaaggtttgacaggaaaaattaaatgcaaacttagattaaacatacatttcaaaacacaaaatttggaagtaaaatccgttttggtgtaaaactcattttgaacaggactccaactctaagaaacctaaccttagaagttgctttcagagtctggaatttgctagcatattactcacagttacaattctgattacacactagcagtccaattttgtttgataagcagcaggaacacatggctaccaaggataattctgccgaactgaatgaaagtttaagatttaacacaagtaatttagtgggcattattcggccactaataaaatataactgaccctttgtctttcattttaatcatccttattagaagaaaaacatatcatactaagggagcttaccatatggaaatggcaacttaaacttgtatgctgtattaacatgcagaaatttaatacattacatttttgcatactgagaatggaattgaactttcactttaaactttttagttccaggatacatgtgcaggacatgcaggtttgttacataggtaaacatatgccatggtggtttgctgcacccatcaacccatcacctaggtattaagccccgcgtgcattagctatttatcctgatgctctcccttcccttgccatcccccaacaggccccagtttgtgttgttccccttccgtgtccatgtgttctcattgtttggctctcacttgtaagtgagaacatgtggtgtttggttttctgttcctgttagtttgctgaggataatggtttcccgctccatccatgtccctgcaaaggacatgatctcattcctttttatggctacctagtattccatgatgtctatgtaccacattttatccagtctatcattgatgggcatttgggttgattccatgtcttcgctattgtgactagtgctgcagtgaacatacatgtgcatgtatctttataacagaaagatttatattcattgggtatatacccagtaatgggattgctgggtcaaatggtatttctggctctaggtctttgaggaatygccacactgtcttccacaatggttgaactaatttacattcccacygacagtataaaagcattcctatttctccatagccttgccagcatctgttgtttcttgaccttttaataattgccattctgaatggtgtgagatggtatctcattgtggtttttatttgcatttctctaatgatcagtgatgttgagctttttttcatatgtttgttgggtgcataaacgtcttcttttaagaagtatctgttcatgtcctttggccactttttaatggggttgtttgatttttcttgtacatttgtttaagttccttgtagattctggatattagacctttgtcagattacaaaaactttctcccactctgtaggttgcccattcactctgatggatagtttcttttgctgtgcagaagctctttagtttaattagatcccatttgtcaatttttgcttttgttgcaattgcttttgatatttttgtcatgaaatctttgcctgagcttatgtcctgaatggtattgcctagattttcttctagggtttttatagttttgagttttacatttaagtctttaattcatcttgagttaatttttgtataaggtgtaaggtcagrgtccggtttcgattttctgcatatggctagccagttttcccagcaccatttattaaatagggaatcctttctctgttgcttgtttttgtcaggcttgtcaaagatcagatggttgtggatgatgtgcagtcttatttctgagatctctattctgttccactggtatacatgtctgttttcataacagtaccatgccttgcagtatagtttgaagtcgggtagcgtgatgcctccagctttgttctttttgcttaggatgtttttggctataggggctcttttttggtttcatatgaattttaaagtagtttttcctaattctgtgaggaatgtcaatggtagtttaatgggaatatcattgagtctgtaaatgactgtgggcagtatggccattaagttgaaagcattttgtctttgaacatgacttagaaaacaggtgttagaccagtacaggtaaggattttggtaagatggcagagtaagaagtaccaggaatctgttgccccacctaracaacaaatctgtctgatgtaactattttggaactctggagtctactgaaggcttccaacttccaggggaaggcttggatggtaaagtgtggttaatttttataaatttcagctgttatcacattagcagctgcccattccccacccccagccctgtggcagacagctgtgcacctactcctggagctgcttgcacatagcttgcaggagccagggtgggcaaaaaaagactttgtccttcaaatatcagtgatctgtgctttcagtgctgattgctgcttctgaccacaatatctgttatgacattatcaatttagtgttcccattaacacctaaccacttaaaatctagcatttctttaatccagcatttcttcaccagctgaagtgacttccagagtatttaatgggcccacatcctttttgtttccctcccttaatttttctctttttccccttttggaagttggataataaagactaagatattcaaaagtaaaaataataaaataagtaaataaatgaagatataggcataccttgttttactatgctttgctttcttgtgcttcacagatattactttttttttttttgagacggagtctcgctctgtcccccaggttggagtgcaggggcgcaatctaggctcactgcaagctctgcctcccgggttcacgccattctcctgcctcagcctcccgagtagctgggactacaggcgcccgccacaacgcccggctaattttttgtatttttarttgagacggggtttcaccgtgttagccaggatggtctctatctcctgacctcatgatccgcccgcctcggcctcccaaagtgctgggattacaggcgtgagccactgtgcccaacctacatttttttttaacaaattgaaggtctgtggcaatcctgtgtcaagcaagtctatcagtgccatttttccaacagctgtactttgtgtctctgtgtaagcatttttagcaataaaatattttaattacagtatgtacattttaaaaggcataatgctatcgcacttagtaaactayagtatagcataaacataactcttttatgcactaggataccaaaaaaattgtgactcactttattccaatatttgctttatttcagtggtttagaaccaaatccacaatatctcaaaggtgtacctgtaaatacctgggcaattataaaagctagtattattgtaacaatgatttgtaactccagtttttgttttctccatgatttgagagacttatacgttttaaaaattattagtctaaaaactaatattattataactttggtttgtgactccacattttgttttctacataatttaagagactcatgtattaaaaagatttagtttatgttttggcacacacaatgtataaggatgtaattttgttatatcaacaaccagaaggaatggggacagaactgtaaagcatagtttttatgtgattaaagttgaacttgtaaaaattcaaattaaagcattataaccttagaatgttaaatgtaatccctatagtaaccacagagaaaatacctgtagaaaacacacaaaaagaaataagaaaggaatgtaaataattcactacaaaaagtcaactaaacacaaaagaagatagtaatacagaaatgagagatttttaaaactataatatatatagaaaacaaacaacaaaatgacaaaagtgcttcctcatcaataattactttaaatataaatgggttaaatgctccaatcaaaagacagattagcagaatcaattaaaaaacacatgatccaactatatgctatctatagaagactcactttagatccaaagacacaagtaggttgaaagcgaaaggatgtaaaaatatatagtcaccataagagagaaggagtggcaatattaatatcagactaaacagactttaaatcaaaaaagttaacaagagacaaaggacaatatatattaaatattcaatacagcaagaagatgtaacaattacatttatgcacctaataacagaccatcaaaatatataaagcaaagactgaaagaaatgaaaggaggtagagacagttctcattctcattctaggagggcagcactaccctaatagcaaagcaaagacagtattaaaaaattacagaacaataccccatatgaacattttgcaatgcaaaattgatgcaaaaatcctcaacaaaatactaacaaaccaaattcagcagcatagcaaaaggattatacaacataaccaagttagatttttttcctgcaatgtaaggatggttcaacatatgaaaatcaatcaacgcaatatatcacactaacagaatggaggaaggaaaaaaataatcatttcaactgatgcataaaactatttgacaaaaatcaacagctttttgtgataaaaacattcaacaaactaggaatagaagaaattaccaatataagaaaagtcatatatgaaaaatccacagcaaatatcatactcaatagtgaaagactgaaagcttttcctttaagatcaggaacaaggcaaggatgcctactctcaccactgctatttaatatagaattggaagttcttagcaaagagattatgcaagaataagaaataagtcatagaagttagaaaggaagatataaaattgtttgtttactgacgatatataatgtgtagaaaaatcccaaagattccacccccatcaaaaagaaaaaaaaaaaaaacctgctacaactaataaatgaattcatcgaagtctcaggatataaagtcaacacacaggctgggtgtgatggctgactcctgtaatctcagtgctttgagaggccgaagcaggaagatcgtttaagcccaagagtttgagaccacactgggcaacacagtgagagaccctgtctctacaaaattcttttttttttttttttcaattagccagaagtggtgctatatgcctgtggtcccagctactcaggaagatgaagcaggattgtttgagtccaggaactcaaggctgcagtgagccatgatcacaccactgtactttagcctgggcaacagagcagaccctgtctcagaaaataaataaataaagaggctgggtgccgtggcccacgtctgtaatcccaacattttgggaggccaaggcaggtggatcaattgagatcaggagttcgagaccagcctggccaacatggcaaaaccccatctctactaataatacaaaaattagccaagcgtggtggtatgcacctgtagtctcagctacttgggaggctgaggcaggagaattgcttcaacttgggaagcagaggctgcagtgagccgagatggcaccactgtactcttgcctgggcgaaagagcaagactctgtctcaaaaaacaaaacaaacaaaaaaggaccgggcgtggtggcttatgcctgtaatcccagcactttgggaggccaaggcggacggatcacgagatcaggagattgagaccatcctggctaccatgatgaaaccccgtctctactaaaaatacaaaatattagccaagcatggtggtgggcgcctgtagtcccagctacttgggaggctgaggcaggagaatggtgtgaacccaggaggtggagcttgcagtgagccaagatcgcgccactgcactccagcctaagtgacagagcgagactccatctcaaaaaaaaaaaaaaagaaagaaagaaagaaaaaagaattaacacacaaaaatcagttgggtactatatactaacaaataataatccgaaaagaaaagtacaaaaacaattcaatatataattgcatcaaaaagaataaaatacataggaattaaccaaggaggtaaaagattcattggatgaaactacaaaacagtgctaaaagaaattaaagagtagtgctaaaagacctagatgtaaaacctaaaactataaaactcttagaacaaacagaagcttcacaacactggatttggcaatgattttctggatatgagaacaaaggcacaagcaaggaaagaaaaaaaagtttggacttcatgaaaattataaaaattttgtgcatcaaaatcaacagagtaaaaaggcaacccacagaatgggagaaaatctttataaatcacatatctgataagcgattaatgtccggaatatatagtaaactcctaaaacaaacaaacaaaaatcacaattagtaaatgggcaaaggccaggccaggcgcggtggatcacaactgtaatctcagcactttaggaggccgcggtgggcaggtcacttgaggtcaggagttcgagaccagcctggccaacatggtaaaatcccctctctactaaaaatacaaaaattagccaggtgtcctggcgcatgcctgtagtcccagctactcaggaggctgaggcatgagaattgcttgaacctgggaggcacaggtgcagtgagctgagattgcgccactgtactccagcctgggtgatagagggagactgtcccaaaaaacaaaacaaaactatattttccccttttccagtcaaaaacctgcagcagtaaacactattgtacatcttttgtgtctcccttcttttgctcaatttttaaagataaatctaggttgttatatgtatcaatacttaattctttaaccttattgtgtagtattactccaatgtgcaaatacataaataagccacaatttgtttattcataatcctactgaacatttggtttgttccagtttgggacaattataaagttgctacacacattctcatacaagccttgcagaataagcgtatgtttaattttattagaaaccaccaaacagcattcttgagttacctcagtaaatgggaaaaagctccaccagatttgattgtgagctaagttgctctaatctctggtaacacttggccttaatttttttttaactttaaccactctggtggatgtctactgatattgcacatcaatttttacttgcacttccctgatgaacaataatggaacatacatttactgaccatctggagatagtcttttgtgaagtgcttgatgacatattttgtctgttaaaattggctgtttatctttttcttattgctttgcaggagttgtttatatattgtggatctgacttctttattaaactgtactgcaaatattttctaaaaaaaaaaagtaaacgggcaaagatcttgaatagacatttcttcaaagaagatatacaaatggccaataagcacatgaaaagatgatcaacatcactaatcactgaggaaatgcaaatcaaaattacaatgagatacctcctcacatcattaagatgcctatcatcaagaaaagagaagacaaatgctggacaggatgtggagaaactggaactcttatgcactattggtgggactataaaatggtacagccactatagaaaatagtatggcacttcctcaaaaaattcaaaatataattaccatatggtccagcaattctatctctgggtgggtatatactcaaaataactgaacacaaggtctcaaagagatacttgtatatccatgttcacagcagcattattcacaatagctaaaatgtagaggcaacctaaaagtccatcaacagatgaatgaataagcaaaatgtggtatatacatataatgaaggattattcagactttaaaaggaaggaaactctgacatargctttaacataaataaaccttgaaaaaactatgctaagtgaaataagccagtcacaaaaagacaaatactgtatgattccatttatatgaggtatagacgaatactagaatggtggttaccaggggttgaggggatagggaaatgggaagttattgtttaaagggtatagagtttcagttttacagatgaaaaagactgtggaggtggatggtggtaatggttgcacattatgaatgtatttcatctgactggactgtacattttaaaatggttaaggccgggcatggtggctcacgcccataatcccagcactttgggaggcccaggcgggtgaatcacctgctgtcaggagttcaagaccagcctggccaacatggtgaaaccctgtctctacaaaaattcagaaattagccgggcataatggcaggtgcctgctatcccagctactcaggaggctgaggcaggagaattgcttgaacccaggaggtagaggttgcagtaagccaagatggcgccactgcactccagcctaggtgacgacagggcaagtcttaaaaaaaaaatggctaagatggtaaattttacattatattaattttaagtacaattaaaacttgggaaaaaatgttgacgggtgcaatggctcacacccgtagtcctagcactttggaaggccaaggtcaacaaactgcttaagcccaggagttggagtccagcctgggcaacatggcaattaccccatctctataaaaaatacaaaaattaactgggtttggtggtgcatgcttttcatctcagctattcaggaggctgaggtgggaggatcaattgagcctggggaggttgaggctgcagtgagccatgattgcacttcactccagcctcagtgagagtgagtctcaaaatacaaaaacaaaaacaaacaaagaaaaaaaaccttgggaaaaaactttaaaaaaaaaagaccaatagagtacacaagtttttagtttttccgaatcaccatgttaactttctttatcggcttacatacttggttattgagggcaccaaagcttttactttgggattaatttggtttttaatcctatgcaacagtataaaatagttatttatgatttataatcagtgcatacttagaagatgcttagagtggaaactgcttggtagatacttttaatcaagctttagtgaactgttttccctgcaaagcaggcaacactttatgtgtaaaacctttattgcaactattatatctgcacagtcacaaagtacctcatgttgtatgattccatttatataaaatatccagaataggcaagtctatagacacaaaaagtagattagtcatgcggaagggctgaaagggagaggttacatagtgacagctaaggggtgcagggtttcattttggtataataaaaattctccaaaaattgtggtgatagatgtacaactctgaataccttaaaagccacttaattgtacactttaaatgggtgaattgtaggacatgtgaattatgtctcaagaaagttatttttaaaagaaaaagaaaaataggtacttcactaaaaaaactaataaatataaaaagatactcaatatcattaggcatcagattagcaccaaagtgagataccatcatacatctatcagctaaaatataaaagatggataataacatgtgttggtgaggagacagtacagcatacacacactgttgataaaaagaaaagctggccaggcacggtggctcacactgtaatcccaacactttgggaggccaaggcaggcagatcccaaggtcgggagatcaagaccatcctggccaacacggtgaaaccccgtctctactaaaaatacaaaaattagctgggcatggtggcacgtgcctgtagtcccagctactcaggaggctgaggcacaagaattgcttgaacccaggaggcagaggttgcagtgggccgagatcacaccactgcattccagcctggtgacagagcgagactctgtctcaaaaaagaaaaaaagaagaaaagctgtatagtcactctggaaacttatttgttattatctattaaagctgaatataagcataccatatgatgtagaaactccattcctttatcaaaaaaagggttgaattcttttattcactaatttaattcctccccaaatatatatatacattttttgcgagacaaagtctcgctctgtcacctaggctggaatgcaatggcaccatctcggctcactgcaacctccacctcccaggttcaagcgattctcctgcctcagcctcccgagtagctgggaatacaggcacccatcaccacgcctgtctaatttttgtatttttaatagagacgggatttcaccaacgttggccaggctggtcttgaactcctgacctcaagtgatccgcccgcctcagccttccaaagtgctgggattacaggtgtgagccaacacgcctggctcctccccaaacatattttttgagtgaccactgactaggtgcaataaggaatataatgaaatatgcaagaagttctccagaggaaagcaggaaaaaaagagctgatagtcatgaaaaacagcacagtgtcacaaaagttgaaccactgaggcaaggttcaaagccttaagtgtattgaaaaagactaatatttagtctcagtgaactgaggtcagtcaactacttgcccaatagtgaaaaataaaaaatgacatataattttttttttgagacagagtctcgctctgtcacccagacaggagtgcagtggcatgatctcggctcactgcaacctctgcttcccaggttcaggtgattctcctgcctcagcctccctagtagctgggactacaagcaggcgccaccacgcccaaccaaytgttgtatttttagtagagacggggtttcaccatattggccaggctggcctcaaactcctgatctcaagtgatccacccacctcagcctcccaaagtgctgggattacaggcgtgggccaccttgcccagcccgtataaataattttaactataaatagaggccaaagattgtgctttaaaaagtaaggcaaagttgaggattttttagtagcttttagtattctaaacatcccttaaaacatgtgagtccaatgtttgaggttcacacatttgacttttttatgtgtttccaggaacatatatatgatctaagaaagttgaggaatacctattagacccagataggcttctgttgcttatgaacataaatctcatctctaccctgtcatttggaagtatgaaaataggatttgatatgcatcttgacttacacccattatatgtttggtgctgtaatacacatcaggaatgtatctttttaattgtctcttctactctagtaccagctacttggaaaactgaggcaggaggactgctccagctcaagagttcatgaccagcctgagcaacatagagagattttgtcccaaaatatatatatataaaaatgcaaaaataaactgccccttctagatacataagaaactagttaacagtagtttttctgaacaggcaagctgggaattggaggtcagggatgagacaaagatcagtttttcatactacatcctttctctctgtcattaaaaataggtcaaccttctcaaataaaaaaggcattatgattacaagctacatatcatattaaatacatacaataatttttacctgtattattttatgagagctaaaatccagacaccttcagatatgtttaattcctacttctctagaggaagcctcctttcttcatgaaaagtaaagcatactttatgtcaatgaacacttatcttcaaaaattttatccaatgtccaaatgttcaagagtaatcaatcagtatcaatgcaggcaatattctatatttgtaatctacctgtgaggtcctctcacattaggaactggaccttcagactgctctttaaataactttgggtcatgtgattatatgaaaagcctaatagatgtctaaattattagtaccactgtagtatcctacaggtagtagtattcacataatacttcatataattcataatgacgacttaaaaagtcctaagcaggtaaatcacactatcaagcaattaattgttcaatgtgctaaaacagaaatttctaaatgtgttgtgtgaaaaacaactattgctaagtcatttatatcataaactgtaaataaaaaataccactagctctatggtatgcaaatgtacaatctgatttcactttaagtttgtctcacttcctttcttcactagactccaaataagaaaatgaaagagtacaattcaggagatgaaagaaaaggaaaatccaggaaattcaatcagatctacatgactcatgttgtgtcaactgcaaatttctgatttcaaacttaaaaaaaaagaaacttcaaggacccttcaaattatgttcaagtcatatgcctgatgagacaattgaatcacattactggactacattttttccccttgattcaatctcttgctgccacaaatatgtttgttcagtgtaaatggagtgataaagattgacctttctagttgagcatctggcggaactggattttaaatagtatgcttaggattttacttcacttgatttaaggcaaaagaagtgacataaaagtccatggataatagatccatatatctaattttaattctaggaattttagagcctctgtctcaccctctttgacaaattcagcatctcacaccaggatgaggtataaccacaagagaaacattaaactactactgtgagaacttagtagcagttctacttttaagaattgttcccatctattttctgttctaaagaaaggrgaaaaaatagaacagaagggagaaaaaaattgttgtgaccttaagccctgtctagtaccttgactcattccaatgtcttttcactgattttcyatccaatagcaccaaaataataagacttccagttccttctttcttttgtacctcataacctgacaaataaaacagtcttggaaactgttctggatatttaagaccacatatattttcagctttttgtaaaatttttactcttcctaatatttgtcaccttatcctaattactgtatactcatgacccaacccattactaaaattataaacatagaagattatgtgcaactgctgagaaattacatactcaaagcagccctcaaaaacaaatttccatgaatacctaatgtaaagaagagcctacatttacgaaatttcttttagacctgctacctgatttccattcaatgctagcatgtgatcaagagctaatttgcatagctgataggaagctgagtccartcatttattcacagcaggcatagtgctagaagctaaggatgcagagataaaagactcagtcagactcttcattcaaagacctcaaagtctagtggaagaaagagccacacatacctacaatcacaatatcatgggcaagtatcatggcaggagtatgcccagcatggcataggaagacaaaaaaaatgagcacctaactcaagtctgaaaagactgggaaaatcttctcagacaatgtagcactagaaccaagcctagagagatccttaggaggaacagggatgggagcagaggaacagggcattctattcagaggaaaaagacacacatgttctgtttgggatgatgaaaacattctggaaatagagagtggtgtttgttacacaaatctctattggtgtacctaatgtcactgaattatacacttaaaatgataaattttatgtgtattttaccatacacacacgtttgggagggtagaaacaccacataaggtatctgtggaggagactgagtggcaagagaaaggactgagatgcaacagggctagaccataaagggctttgtattccatggtaaaggagtacggaggctaaaccagggtggaagaaagactggaaggggcaggaatgattaggaggctactgatatctccagatgagaaattaaggtctaaattctgagaggcagtgagacaaaaggaatgaattgacttccaagacagcaagaaagaagaatgaagggatcttggagcctaaagttaaggaacaagaggagtttaagatgcctctcaggttttgtgcttgagcaatcaagcagatgacactgccaagtcacctagagaatgaaaataggagaagcatcaggttggatcaggaagcattggtaattcttgctttgatctgccaagtttgaaagcttgtggacaaaggataaagattagcagttagaggagttgcttcatttcttaagtggatctgtggactttgtgctgcttcaaggcccaggcaacaaatagcagctgagatttaaggaggaagccatttttcatacctttaaatagaatccagcactatcacccagacaatcaggggctatgacaggctcagggggtagcttctctcgcaaggtcccgaggttctcagtagtaccttcagtgaggctcctcaagtggcagcatctatcatcaagggtgagccaaagatgaataagtagcatggctgacccttcacggtagccactgctgacatttagttctcatagaaataactggggaagtgccaggcacagtggctcacgcccataatcccagcactttgggaggctgaggtgggcagatcacttgaggtcaggagtttgaggccagcctggccaacatggttaaaccctgtctctactaaaaatacaaaaattagctgggcgtggtgccacttgcacctgtagtcccagctactcaggaggctgaggcaggagaatcacttgaacccgggaagcagaggttgcagtgagccgagatggcgccactgcacccagcctgggcaacagagtgagactccatctcaaaaaataaataaataaataactgggaaagttttgcaggatagaacagaacctgaaaggtggggaggagagggacggataagttgtaatcattttgaaatgcaaatggaacctcttgtatgattccagattamtaaagcctacagcttaccagtttataaacattttagcaaaagcaaaacattgctcatactgtttgtatactgctttattgtaattaacaatatggtgagcatcttcctgtattataacattcttctataacttcatgtttaaagctaaatagtatctgattatatatcatgatttattcaaccacctattgttggatgcttaagtttgaagaaagcttttcaagctaattttaaaaattaagcccatcattctaagtaatcctaattccatttttatggtgacaactagcaatatcttagtattttatttgatgattccttgtctataaaattccctttagatttttgtttaaatcatttttaaaacctatataaccagctaaaagaatgcatagcaacttactagccctttcataagaaggaagtaaattgctcacttgttggggatgcattaattttatcaagccactagtgtaccatattgtacaagagaggaggcaggtaattcactaaatagcaccctcgtggcacaaaagagtaaatacatctccaataagtgaaccatgtgctctctgtcagcaggatcagcatattattttatatctcctttcccatcccatggatgcttactggtccctccttgagttaacaataaatgtagacagagatgcctccatctgtgctcatgttgttccttccacccatgtcccacagctccctcaatttytattcccaaccaactcctacttattcaaaaaagttcaactgctgcttcctccagaaagtcttctctaaccatgctcatcttgagtcaagtggtcccaaagtgtcctgcctgcacctctgagtatagaatatagtttactaaaatggtaattttatattcacccaccaaatcataagcctctttaggatacctcatagcttcattaaataattgctgagaaggaatgctgtgattcaaagagtgccacaaagttttacctgccttcttcacctgtaatattaatatctgcaagcaactgggcaacatgcttaactattaaggttatgtataattttccaataaaatacaataatttgacacatgctcaatgtgtaatcattgttgtgatgcatggtatttaaacatgatttgtataaattactaccattggtagttttcaggaatgtagtgggatggcatatggtgaccaacttctccctctcacagatatgcagctgacctcatctacctctgttctacatctttccaaatgttccaagttccaaaacagccccttactataccgtatcttcctctccttccacaaactctccactaaaatgactattttcacaggaaattgaattcagctgagacttttatctctacttttgtactgaactgccatctttatgagccttatgttctgtcatcccttcttgggatttttaggtagaggtatttccttgaaaggttataagaaactcagacttccctcttttccttgtcttttccttgtctctcctagtgccctaggctggagtacaatggcacaatcttggctcactgcaacctccacttcccaggttcaagcgattctcctgcctcagcctcctgagaagctgggattacaggcgtgtgtcaccacactcggctaatttttgtatttttagtacagatggggttttcaccatgttggtcaggctggtctcaaactcctgaccttgtgatccactcgcctcagcctcccaaagtgctgggattacaggtgtgagccaccgtgccaggccttttttttttttttttttaagacagatcaggtctcactattttgcccaggctggtctcaaactcctaagctcaagcaattctcccacatcggtttccccagtggatgggactacaggtccacgccaccacacctggcttatttaactctttgtctttatattaatatttacattactttgcctaacactgcatttcctccctttgctagctttctttcattataatttgccaattttgtatttctattggctctaaagtcatgttttttcctgcctccaggctgaaaatttaatgttctctttgtcttaaaactcccatgtcggccgggcgcggtgactcacgcctgtgatcccagcactttgggaggccaaggcaggcagatcacctgaggtcaggagtttgagaccagcctgaccaacatggagaaactccgactctactaaaaatacaaaattagccaggcgtggtggcgcatgcctgtaataccagctacttgggaagctgaggcaggagaattgcttgaacctgggaggcagaggttgcggtgagccaagatcgggccactgtactccagcatgggcaacgagagcgaaactccgtctcaaaaaaaaaaaaaaaaaaaaaacaaggctgggcgcggtggctcacgcctgtaatcccagcactttgggaggccaagacggtcggatcacgagatcaggagatcgagaccatcctggctaacacagtgaaaccccgtctctactaaaaatacaaaaaaattagcaggcgtggtggcgggcgcctatagtcccagctactcgggaggctgaggcagcaraacagcgtgaacccgagaggcggagcttgcagtgagccgagattgcgccactgcactccagcctgggcgacagagcgagactccgtctcaaaaaaacaaaacaaaaaaacccctatgtctccccaaatccgcatctttcagctcttatattatgtttgactctctcaggatattaaggaagtgttaaaaatccttgtaacacttcttgattatattcaatgtgtctacttcttcagtggactgtgaactcttcaagggcagagaataggtctgtctgccttctctgctgtacccccgtgtacataactagtgcctggaatagaggggttgggcattctaatactttttgaacgactgagtggataaataatgaatgtggtcatggtacacttctttagctttaacagattcattacattgttttgataacttcatatcaaattttcctaccacttgtatcaatttgttaactgctctggagtcctattattcatcatcctcatatgactaacaaaagctgagttactgagaatttggcttcagtgcatacagatattctaccatttgataatcgagttgctaactaaatctgcatgaaacaaaacgtccaagtattcattctttaccagacttaaaagggaataaagtgaacgtctaatgaataacaacttctgcagggtctcaggaaaaggtaaaaactgctatctccctctcttctctctgttctaagatttttaataaggccacttctcttgctacatggggagagtgtgcagctgatcagaggccctgaatgttgcctagtcaagttcctccacttcattctgtataggccaaattaaatgttgacagacatcatcatccatcttttaactttacattctctgtctctgccttgcttctagcaaggggaagtctttcaaacctgagatccattttatgctgctccttaacctccgcaccagttcctaagaatgcaaacaaaatgcttctctccttcaatcctcatctgttctttcctgtttctcactgtcctccccacctttcatttcttcagccccactcccttccagacaatgtctatccccgatcatgttttctttggtttccctgaaagcccttacttacttaatgatagcttaacctgaaattccccctacttgatcatggtacattctaatagtgtactatttttgtaagcacttttttttgcattataagaaaaatatactatttccaacttttatggattcacttaacaacactgactacttaccatgttcacatattattggtcattttttttttgcagatgcactattctgcaaattaaaatcagcctaaggatcagggaccacatagaaratagattgtgacatactcataaatagcaccatacaataacagaaattaatgatgttagcctattcactagcaagataagaggcaacagacagtaaattttaaaactttgttcataatttgatgaaataacataaatataatggattttttcctgctcaacatgggaactactttctatacaagtcttaatgggagacactttagaaactgaaaataccagatacctactttcccagcctcccctacagctaggatagagtacatgacttgggcttggctactcagacactcctaccttggtctttgacaatgaaactgtcacagtgaagaagcaggaaccacggagaatacattttgttggtcagcagaagcagctaagacagctgcaccaccagtatgaagtgcacaggggcagatgtggtagcactgtggcaccggtgcctagtgttcagtgtcccagatgacagtagagcaagctggagcatccagatacatgttcggaggtggaggcagcagtgtcctctcagactggctctgtagtagtattctgggtcctggstgctccctagcctccctttttgttgtccactttctaagcccatttctgcctgcaccctgcttataaaatttytgagctacccaatgtccttgcaataaagtccccttctgttaaaatcaaccaaagtcggccaggagcggtggctcacacctgtaattccagcactttgggaggccaaggcaggcggatcacctgaggtcaggagttcgagaccagcctggccaacatggcgaaaccccgtctctactaaaaatacaaaaattagctgggtgtggtggtggcacacgcctgtaatcccagctactggggaggccgatgcaggaggattgctcgaaactgggaggtggaggttgaagtgagctgagatcatgccactgcactccagcctaggcgaccgagtgagactccatctcaatcaatcaatcaatcaatcaataaaatcaaccmaagttgggtgctattgcttgcaactaagaactccaacacaataagacagtaactagcaggtagcagatattaaattaatctaaatctatcaaattggcagctggccatggtagctcatacctgcagtcccagcacttcgggaggccaaggtgggtggatctcttgagctcaggagtttgaaaccagcctgggcaacatggtgaaaccccatctctacaaaaaatacaaaaattagccaggtgggtggcatgtgcctgtagtcccaggttcttgggaggccgaggtgaaaggattgcttgagctggggaggctgaggctgcagtgagccatatgccactgtactccagcctgggcgacagagtgagaccctgyctcaaaaaaataaaaataaaataaatctatcaaattaatatttcccactcagcctctgagtattaaaagaggtataattaacatacatgtttcaatatgtaaaagaatttttttcactattataaataattttctaatgaacatcttggtataaaaattattttcttctattttaaatcatttccttaggggagattcctaggagttaacttgcaaatcttttaataaagactgtactgacttaaacttgtactcagtatattcttatcattattttttagttcctgctaatttacataatacatttggaacttatttaacttacagtttttgcttactagtgaggttgaaataaacatttttcacatgtttattagctaattgtaattcctcattgtattaattgtccactttgtggcattctctccatcgagctagagttctttttagtgtttatataatggatgatgatgatggtggtggtgattattattaaggatagtaaccctttggcatattggctgcaaatttttctcctaaatttttactcactttctagctattggctttgatgtttctgacataaagagatttttaatttttatgtgktatatctttggatctttttcttttttatttctctcgttatctttacacttagaaaattctcatgtacgccaggtgcgatggctcatgcctgtaaccctagcaatttgggaggctgaggatggtggatcacttgaggtcaggagttcaagaacagcctggtcaatgtggcaaaccccatctctactaaaaatacaaaaattagctgggcgtggtggtgagcagctgtaatcccagctactcgggaggctgaggcaggagaatggtttaaacccgggaggtagaggttgcagtgagccaagatcacaccactgcactctagcctgggtgacaaagtgagaccctatctcaaaaaaaaaaaaaaaaaaaaaaaagaagaaagttcttgtgcaaagattaaaaaatactcacctctattttctcccagtaactccgaatactgcttattaaggtctatccaaagtgagaaatcaagtttactgagtttgtttttatctagtcagtatgtctgaaagtcagtgaatcattgaatcattccaactaaaggaaatgaaaatagatttagcatccttcaattcaactaactccttaattagcaatttttttctgagacttctatttctaccaattagacttttccatataaaaataacactagatggaagagccaacagtttcacctccaagcaactggttcatattggctgcccagagcgctggattaagaaaaatattcaagcctgggcaatgtagtgagacctcgtctccacaaaaaaaatttaaaattagccaagcatggtgggacatccctgtagtcccagctacttaggaggctgaagtgagaggatcatgtgagcctgggaagtggaggttgcagtgagccaagatcgcatcactgcacaccagcctgggcaacagagtgagaccctgcctgtctcaaaaaaaaaaagtgttcagcagagaacattactgattgtggttcaggaaggagagtgtagtaacaaatactctctctgccctagacacctggatcctggaggactttattctttatcttctatatttggcctactaccttttgagtgaccaaatgatgtccaatccaaggacctctctctgaggcatcctaaacactttagtgaggcatttcattatcacaattttttttttttttaagacagagtcttgctctgttgcccaggctggagtgcaatggcacaatcttggctcactgcaacctccgcctcccaggttgaagtgattctccggcctcagcctcccaagtagctgggattacaggcatgtgccatgatgcccggctaatttttgtattttttagtagggacggggtttcgctatgttggccaggctgatctcgaactcctgaccttaggtgatccacctgcctcggcctcccagagtgctgggattacaggcatgagccacggggcccagtcattacaatttaacttcaaatttgtgacagagtcactgagacaaagtccatattcaacaaagcagaacatcgctcctatttgttctgttctaagatacactgatactaatataagttaacactacaaatgatcttcaaattaggtaaagtgagtagaaactccattaccaatcaatcaataaatggataaccaatccttcattaaatgggggaataatttacttaactgttaggacaaccgttagaataaatcaaattgtttgcattgaaaaaacacacctcttatggcaacagagtgaatacaccaaacagaatggaccaccgcatagtttatgtggctgtttaaacacaagtcttgtgatctttgagtgacttcccaagcaagagggaataatgttataatgcagtaaatactggcattttaaaaattgctcttaaagtcagactagactgtgactaagggcctttatgaatttaggatcctttcacatatagatcatctatttgattaagttctcataaggattagtggaagaatcatgcatatagacttgctcagtgccaaatttacgtgaattttaagattcctgtctttaattcttgtgtgtcatagccaattttattttgggtggtgaacacaactgtaactatattagtaatgacaagaacaattacttgatgtaaaaacttttctttaacaactctactttctgaragtgaaaataataaactgtatctttattgtccaatcagagttcaggaatcaacttaaatgtatgttagcgttaaaactgtaggtacatctatatttaggggctaggacaattcaaataatttgccaatatccccaacgtacttcatttttgattgtccagattttgtttatttcatttctacccaatctttctcttctgattctctccgaggtgctgatcttaatgcgctaggatcctcttctgccaaggtgactaaacgctatttcatcctaacacccacctgctgctacaagcctcctttacttcaaatgtttcttctctccctgttgttccttgatcaatatcatttcaagatcgcctaggctactcctccccatcgcttattacttcaggttgctctatttattctctcctgtgttcacgtgcaatcattggtcacaggccctgatgaaccaacttcaattttattcagtagaagctggtaaatataaaaattatgcatctaataaaatacttacttttggcttctgtattatactcagatttactctattcacctccccaattattcctgtcgccttttcttctcaccttgcatgtaaaggcttttgtcgccttttcttctcaccttgcatgtaattcttcagggtatgctataccctatcttccacaaggaaaatgtaaaacagtcccctagattctccgccattcctccagaccttacatgaaggtgacctttaaccaaatgattcctttggaattagaatccttccataaaaaaaaaaattaagagaagatagttattttaaaaaaaacctctgagacctaagatcaccaggtggaaagggagtagagagaagtgaagctcctaagaaaccagagttgaaaggagagagaacaggcagaaagcttatgagaacagagttatcctgaaaatattcaggcacatctctctttccaggaaatgtcagtggatttccaggaaatcccagaagatgtggggtcaggttttatatgggtttccttaacaacagcagatttctggggacccttgctttatcacctctcatcaaaatatgtgagctcyaatatgatacaataacaaaacaaggaagtttttagccccaaatgatagctatttatatataatttctgagaatataaaattcagttagactacctgaatatactttttaaaaatatggtaactataactatttccatacttaggtataatactactgaaactcctttccatgtgttatagaaaaatatatgtaattattactgaaacatattcagaggtgaatataatattcagcctttcacttattgcctgtgtatagaactactacatactcttttgttcctggagaagagatagtatcaacatataaattgctccttcttatttttaaatattattttttaaagttttcttctcaaatacagatttcccaaaacctacttttgccacgtggttgctttttttgtttaagagacagggtctcactatgttgcccaggctggccacaaactcctgagctgaagtgatccatctcagcttctcgagtggctgggactacaggagaacaccatcaagcccagctggttgcttattaaatatactttaattaggccagacatggtggctcacacctgtaataccagcactgggaggccaagacaggcagatcacctgaggtcggcagttcgagaccagcctgaccaatatggtgaaaccacgtctctactaaaaatacaaaagttagctgagcgtggtggcatacatctctaatcccagctacacgggaagctgaggtgagagaatcacttgaacccaggaggcggaggttgcagtaagccgagatcacaccactgctctccagcctgggcaacagagtgagacttcatatccaaaaaaaaaaaaaactttaaatatgttttcagatacctttttgtacatggaaagaaatccccgtttccccataatttttcccattctgtagttatgatcctatagtcactctctttttggccccaacagtgttcctaggcccagggacttttgcaaagaaagcaagctgagtctctgaaccctgccagccacttttgatggagttttttcccttagataagccactggctttygtctgctactccacaaggcgttaccttacccagttggttatactacaacacctataacatgaaaactctaaattgagttatatattactttaatttatacatgatttttcacttaacaaagagacttactatcgatttttacagtttattttaaaatacttccatttataatattttagaaagccattccatgacaagatatacctatattgctctatctcataaagctttaattgatgtaatctcttcatgttgctatgttttttaaaaacacacacataaccattaaaatctaaaatatccatagcttggtgacaagatatatgcctataagcagtcatcttaagaagccacagagataccctaaaatattaagtaaaagaacctacttttcttaaagtatgtgttagtgcacattttttgcataatatctgaatacaaaatatactaagttatcacagaatagtgasaattttagaatttcttgatgtatatatwgcttaaaaatatgaaagctaaattataattgttaccataactatgtctaagtgatattttaargcagtcattctatttccagccagttcattgatcaacttgttcaaactgcccaatttgctagttatgaatctttctcgtctactgagtattcaacactacaagcttttggttataatttcaaggctgtataaggaatccagtatttttgtttggggttttgtttttaatatacgttgaagtatataataatacacactgagaatgctgcccatgtagtatctttagaaattatttttttttctgggttaaggtacgattttcccaaaatatgaatgattaaagtatatgacaacctctgaatttccaatgaggttgggaattgaactcaactggcattgatacttcacctaccccattccagcctctgtctttctacccctccatgaatgattgctatgaacaaaatgaccctagaatgtcattattagagaaagtatgcctttggtcagtatctgctggcttttgagacagagtctcgctctgtcactcaggctggagcacagcggcgtgatctaggctcactgtaacttctgtctcccgggttcaaatgattctggtgcctcagcctcatgagtagctgggctacaggcgtgcgccaccatgccccagctaatttttagatttttagtagagacatggtttcaccatgttggccaggctggtctcaaactcctgacctcaagtgatccacctacctcagcctcccaaagtgctgggattacaggcatgagccaccatacccagcctctgctggcttttaacacaatatcactacacttttttttttttttgaggcagggccttgctctgtcacctagactggagtgcagtggcacaatcatggttcacggcagcctcgacctcctgggctcaagtgatcttcccacctcagcctcctgagtagctgggaccacaggtgtgcaccaccatatttggctttctttttctctttttcttttttttttttttttaatttctgagggacagggtcttgccatgttgcccaggctggtctcaaactcctggactcaagccatcctcctgccttggcctcccaaccaaagtgctgggggttcaggtgtgagccaccatacccagcccatttttatttcagaaaacatacattaagagtgtggtttctgaaatacaaagtataaataaccaagaggtaattctaggcaaattataaacacatcagtcagtattgctatttcctttgctttaatttaraattcagtgactttttgaaaactagcctctagtttcaaaaatgggacatgctattatttaaaaaatattactccaaatgatgaaagtagatctagcaagcatatgaaactcccaagaatgaaacagtacttgatgcagatgtgcttgttctccagaatacccattcatctcagaactacttaaaatatacaattttattttttagttaatttaaataaaaataagcgattagctagaaaccactgaaaataaaaaccttcaggaaaaagttttccttctcttaaccaggaagaaaaggaaataacactaaaattgacaaccttaccagcttcagctatcaaaagggaagatacttccatttcaccaacattgtttccaacattgtctcctgtgtctgcagttactgaggactggcaaataacttttaactccatctaagacagaggagtcaaatcaacacatgaaatcgcttgtcatcattattggagcagttgaaatacatgaccccaccgttcatgtctacaaaatatatcatgataaagtattgtaactctattacagaccaacaaatgggcttgaccaaggtaaaggcatattaggtttcaaacacatctaaaggaaacaaatcccagaggaaaggcaggcagaagtacaaggaacttaaccacaaggaagggaaattcaatgccaaataagaaaacctacatgcagcttatargtttgatactttagccagggttgttaggctaaatatatgtagaaaataaaaactatttcattttttccataggaaaaaagtaatacagctagttctcctaatagacaaaagtgagaaaatgtcatctatttgaaagaggaggagggggactaaggacagagcaaagtttccaaaaactccaaaaatgagagacataggacagaggctaaaagaatacaagtaaattatagccaaatataaggaagaaaaaaatatacatatttttttcttgagacagagtccccctctgtcacccaggctggagtgcagtggcacaatctcagctcactgtaacctccaggttcaagtgattctcccacttcagcctcccgagtagctgggactacatgcatgtgccatcatgcctggctaattttttttgtatctgtagtagagacagggtttcaccatgttgcccaggctggtctcgaactcctgagctcaagcgatcctcccatctcggcttcccaaagtgctgggattacaggcatgagctgccgcatatggctgaaaaatcattttttaaaaatcctgtgtgttgcaagttcaaagatgattattagtaataaaactatagctaaatagcactaaaatgtataaagtactttcagatacattttctctattttttttttctcatcttcacacaactcttgggaataggctgatcacagaagttaggtgactcattcaaggtcatataggtagtatgaagcagagccaaggtttgacctcaagtttcctgagttcaaacactatactcctttcactataccattattaaataaaatttctactcaaatccaccaaaggcattctaataaaattctgctcaatgtaaccatgcattgctcactcatcagtcccaaagccaatctcagaattgccaacactgtatagaactgctttcacactctggtaatttctagaaaaacctcaataaagaaaagatttcagaactgaatttttcttattaaaaaaaaaacttactctaaccattatgattgcatctaatgaattcaattttactctttcaacattgatgaaccattgtcaatgttcatcaaaactgataacaaaatacaatgtctgtttcccaatggcaaatccctgcttgttccctcacctatttctataatgtattgtcatttataacctctgacagttgtgccacatttcccacattacacagaaaccaagcacagtaattttggaaggttttgtactagaaattggattcctgaagaaaagataacctcattttttagtcagtacagctaactcatgaaaaaygacttagtttccatatactacttttcaatgtaaaagaaaatttttaaaatatttatgacttcaacaaatcttggtcagaagagtttttatcataattcttgagtcaacaaacagtagaatctgaaagttatgacaagatagtgcactgcagaataaagagccctattgtatgaatccatttcagactacagaatcttgggtaagtcaatttacctctctgggtctcagttttgccctttaaaaaaattcagttcaaatgagaacacatggacacagggagggaacatcacacaccggggcctgttggggggttgggaggaaggagagggagagcattagaacaaataactaatgcatgcggggcttaaaacctagatgacaggttgataggtgcagcaaaccaccatggcacatgtaaacctatgaaacaaacctgcacattctgcacatgtatcccagaacttaaagtaaaataaaattttttaaaaaattcagttcagtagctttcatttttgtttaacagaggcaccttttttctaacaatttatcacctggaaattcaatatttttaaaactgataaaatgtagagcccttctaggcaggttgctcagatcccacccactcagcactcagcatgctcctcagtccccaaatccccacctcagacaccccatgaaatatgtctgaggaacagaatataaaaaccagaaatgaactctttcaagtctcttccagctctraaagtctaggatttcattattttatactccatatcattagccattagagaaatgtaaattaaaacctcaaygaaatatcactatatacctatcaaaataactttttaaaaaaatgttaataacaccaagtgctggtaaggacacaaagtatctagaattctcatatattgctggtgggaatgcaaaatgatatagccactttggaaaacagtttggcagtttyttataaaggtaaacagacacacatatacaactagtaactctacttctaggtatatacctaagtaaaatgaaaacctatatttatataaaaacctgtatgtgaatgtctttttgcagccttattcataactgccaaaaaatgaaaactccaatgtccctcaatgggttaatagatgaacaaattgtgatacatccataaaatagaatagtactcagcaatgaaatgaaaaaaactgctaatatacacactaacatgaatgaatctcaaaagcattatgcttacactgaaaaccacaaagcatttttttaaaaattaaagatccaaataaatggaaatacatcctacattcatgaatcagaagacttaatactgttaagatggcaacactccctgaattgctgaattgatcaacagattcaatacacttcgtatcaaaattccacctggaatttttacagaaattgacaagctgattctaaaattcatatggaaatgcaataaaccaagaatagccaaaataatcttgaaaaagaatgaaggtggtgaactcatacttcccaacttcaaaacctactacaaagttattaatcaagatactgtggtagtggaataaaggtaaatagatagatcaatggaatataatttagagtccagaaataaacccatatatttatggtctattcatcttcagcaaaagggctaagacaatttaatgaggaaaagaatagccttttcaactgattgcgctggacaactggatatccacatgtaatagcaaaactttggacacctatctcacaccatacacaaaaattaactcaaagttgatcatagacctaaatgtatgagctaacactatacaactcctagaagaaaatacaggtataaaccttcttgacattgggttaggcaatgatttcttagatatgccaccaaaagcacaagcaataaaaaataagattattaaattggactccatcaaaattaaaatcttttgtgcttcaaaagataccatcaagaaaatgaaaagacaactcacagactaggagaaaatacttgtaaatcatctatctgataaaggacttgtatccagaatatataataaattcttataactcaacaaagagacaaataacccaatttttaaatggccaaagacttgaatagacatttctcccaaaaagatatacaaatggccagtaaacatacgaaaagatgctcaacatatttagtcatttggtaaatgcaaatcaaaaccacaataagatactccttcacacccattagaatggctgtaataaaaaaaggcacatgtatacataggtaactaacctgcacattgtgcacatgtaccctaaaacttaaagtataataataaaaaaaagaaagttcataaaataaaatatgtaaaaaaaaaaaaaaaggcagacaatagtgaggattggccaggagaaactggaacccttgagccactgtggaaaagggtttgacagttccaaagggtttgagcactgtggaaaagggtttgaaaaagggtttggcagtttgctggctcgtgtggtaacaaagaattaccacacaatccagcaattccactcttaggtatccatccaaaagaaataaaaacatacttccacacaaaaacttgtacaaaaatgttcataatgtattcaagagaaaggaaaacatgtccacacaaaaacctgtacataaatgttcatagcattatccataatagccaaaaagttgaaatgtccatcaactgatgaataaacaaaatgtggtatatctatgacctatacaatgggaaattacttggcaattaaaaaaataaagcattcatgttactacatgaatgaacctgaaaaacattatactaagtgaaagaagttacaaaagaccacgttgtatgataccattaattaatatatctagaataggcaaatctggagagatgaaaagtaggtgtttgcctaggatagggagctatgggaggggagtcagaattggggaataactgctaatgagtacaaggtttattttggggtgataaaaatgttttaaaattagatatcttgatggttgcacaactctgaaaagatactaaaaactgttgaaatgtacaccttaaacagatgaactttayggtatgtaaattgtatctcaaaaaagcattatgctaagtgaaagaagccagactcaaaagattacatattgtatgattccatttataacactgtggaaaaggcaaaactgtaaggacagaaatcaggtttgtggctgccagaagctggagaaagaggagaggactratcacaaaggggcataagagaaatttacagggtgctgaaaatattccatacaaggtagttacacaacttgcatatatttgtcaaaattcatagaactgtacagctaaaaaagttaattttaatctatgtaaattgtaccccaataaatctgacttataaaaggcaagttttgctgggcactgtggctcatgcctgtaatccactttgggaggctgaggcgggcagatcatgaggtcgagagttcgagaccagcctggccaacatagtgaaactctatctctactaaaaacacacaaaaatttgccaggcatggtggtgggtgcctgtaatcccagctacttgagaggctcacacaaggagaatcgcttgaacctgggaggtggaagttgcagcgagcggagatcacaccactgcactccagcctgggttacagggtgatactccatctcaaaaataaataaaataaaaaaattaaaaggcaagtttacatttaggagatacagaaaactatatttggaaacttgagatcaaaasaatagtggaaacctttgaaatataccagaactcacccttactgagttctataactaagaggagcatgcctcctacgtataccgtcaagtttatatattgccgatgacagaatgacaatatagtcgaaaacatatggaccatggcagaattccccttggaattcgggatcaatgttagaatgagtcctccctctgaaaggtgaactagtgaaagtcaacataaaactaaagttgtctggccaagtcctctaacttagaggggaaatgacatttagatttgagtcttaagaaatacccaagtctaggccgggtacggtggctcacacttgtaatcccagcactgggaggccaaggcgggtggatcacctgagaccaggagttcgagaccagcctgaccaacatggtaaaactctatctctactaaaaatacaaaattagccaggtgtggtagcacgcacctatagtcccagctacttgggcggctgagggaggagaatcgcttgaacccagaaggcagaggttgcagtgagccaagattgcaccactgtactccagcctgggcaacaagagtgaaactctgycttgaaataaataaataaataaataaataaatacccaagtctaatcaaagtaaacagtatcatgtagactgggatgtacctttaaaaaaataagaaaaggaaaaattaacctatctgaaaaaaagtcatattagcataggtacaataatctgcatgaagcaggagaaaaagagaagactaccagccattagtaactactacttaaaggagaaagaaaactgattccaaatataattactagaactctactacagaacagagatcatttataagactttgaatctgaaaaatacccctcaaacccacttgattccctttgccttccaaatagtttctaatctggttttccaaagtctctgatcctaaaagaagtgcctacaatggcagaaaccagtattcactattccattataattgacaaactaagattctggattatacataaaaaacaaaagctcttacaattttggttagcatgaatcaattcccgagaacctgaaatcagttgaatgagcatataaagctgtattttgtgttctgcaaactcaaagaccagatcatagatggaagcagtcaccaagctcttcctttgacatctctttctttaaaaggaacatctgtatttataaataatatccttcacagagggaacacacacacattaaacaaacaacttatagagccaaggataaatttcttgaactacagaacatctgtgctaaaaggggctggcgggatcatctatttgtgcctcctcatttggcaaataagagggttacattgcaattttagagattaagttacctgaccaaggtctcaaagataatcagtgccaggcatttaacacagttctctcaattcactccaagttatcatcagagagaagtaaaacaactgtagctaggcacagtggtgtgtgcctataatcccagccacttcggaagctggagtgggaggatcatttgaggccaggagttcaaggctgcagtgcactgtgctccacacctgtgaacagacactgcattccagcctggacaagatagtgagactccatctcttaaaaaaaaaaaaaaaaaaaggcaaaaaaggcaaaaaaagaaaacaactctgyagtcacacagatgtaagttcaaatcccagcttcccgacttactactcctgggacattaagttatttcacttgtctaagcctcattgcactcatctgtaattayagacaatatcattttttatcttatagataagattaaatgaaagaatgcatataaagcacttagcacagagcctggaacaaagaactcaataattttttaatcaattaacatatattacaaattaaagatatgtaatatggactttatagcaaataactctctaagacacaaaaatggcaccgtgtcataatattcataacttatcagtaccttcattttaattgtaattatgtcagaaatattatttttaaaggaacaaagaattacagagaaaggatgtaaaaaaagaatactggccaggcgcggcagctcacacctgtattcccagcactttgggaggccaacatgggcggatcacttgaggtcaggagttcgagaccaacctggccaacatggtgaaaccctgtctccactaaaaatacaaaaattagccaggcgtggtggtgggcacctttaatcccagctactcaggaggctgaggcaggagaatcgcttgaacctgggaggcagaagttgcagtgagctgagatcctgctactgcactccagcctggatgacagagtgagactccatctcaaaaaaagaaaaatactgccaagataccatttctaaatccttaacttttatctttttattagattataattgataattatataggattatttataagtagataggttttgacatatgatacttgagaataaaatattgacataaaattttaaaaagtaactggatctctaatcaagtgagaaaacattckatagcawttctaaaccataaacccaaacttaatcataaacacatttggttagaaaaactaatttaatcactttttttatttttaagaccagatcttggtctgttgcccaggctagagtacagtggtctgatgacaactcactgcagcctccaactctggggctcgagcaattattccaccttagcctcccaagtagctggaactacagcagcatgccaccacacctaattttttttttwattatttttggtagagacagcggtctcactatgttgcccaggctggtctcaaactcctggactcaagcaatcttcccrcctcagcctcccaaagtgttggaggcatgagctactgtgcccatcctaacctttttacatttttttattatgcaatagttatagatacacaaaattgcaaaaaatagtaaggagatgtcccatgtgcccttcacccaccttcccccagtggtaaaatcttacataactatagtatgttatcaaaaccaggaaatttacattagcactgaaatttaattcacataccataaaattcaccattttatagtatacaattaaatggtttttagtatgttcccagagttgtgcaaccctcaccactaactaaccaccttttaaagtcatcataagctgggcacggtggctcacacttataatcccagcactttgggatgttgacgtgggaggattacttgagtccaggagtttgaaaccagcctggtcaacatagcaggactctgtctctacaaaagaaaattttaaaaattagctgggcttggtggcatgcacctgtagtcccagatactggggaggctgagacaggactgcttgagcccaggagttcgagggtaaagtgggccaagatcatgccactgcactccagcctcagcaacagggcaagaccgtgtctcaaaacaaaacaaaacaaataatatcaccatatcataactctcaaaaatagaaaacatgatgggttcattttttcacctattttgctcaagctataggtaactttacatttgcttttttttttttttgaaacggagtctcactctgtcgcccaggctgaagtctagtggtgcgatctcggctcactgcaacctccatctcccaggttcaagcaattttcctgcctcagcctcccgagtagctgggattacaggtgtgcgccaccatgcctggctaagttttatatttttagtaaagacagggtttcatcttgttggccaggctggtcttgaatgcctgacctcatgtgatctgcccaccttggcctcccaaagtcctgggattacaggcgtgagccaccacacctggccctacattgcttttcttttttttttttttttttctgagacggagtctcgctctgtcacccaggctggagtgcagtggtgcggtctcggctcactgcaacccccacctcacaggttcaagcaaatctcctgcctcagcctcccaagtaggtgggactacaggcacacgccaccatgcttggctaattttttgtatttttagtagagacgaggtttcatcatgttagccaggatggtctcgatctgacctcgtgatccacccaccttggcctcccaaagtgctgggattacaggtgtaagccaccgcatcaggcccatttgcattatttaataatcattttttcagagctaatacttttattcatacacatctacaatcaacatatattaagcccctyggtgacaccttagttactagctgtacaaagatatctctgctcttcaaacagttcacagtacactgagagacagacatgtgagaaaatattcacatttcattttttgagacggagtctcgctctgtcgcccaggctagagtgcagtggcatgatctcggctcactgcaagttccgcctcccgggttcacatcattctcctgcctcagcttccccagtagctgggactacaggcgcctgccaccacgccaggctaaattttttttttttttttagtagagacaggatttcaccatgttagccaggatggtctcgatctcctgacctcgtgatccgcccaccttggcctcccaaagtgctaggattacaggcgttagccactgttctggcaaaaatactcacatttcaatatggtaagtgctatragtcccccaaggcactgcccagcaacaatggggagggagtctaccctggaacaagaaggctggtgatccatgcagtgagaaaaggtgcatacagaagatgagacaagacaatgctggaaaggggggtagcagagagattatggagggccttctgtgccatgctaaaacgctcctgttatcctgtaggcaatgggaaaaccatgtaggatttttaaaagataaaatattagaggtgcacttgggaaacatgtgaaagatgtgaatgggcccaccactccacaggaaggtaaaacctacacaagttggtccccacatctggcaagggcaaatgggaagccagagaatagaatgtggtcagcactaaatagttagtggcccgtccagcagagggttctatacccagcaccagtgcactgtggcagagtattgtgcagtgaggtgttcactatgactcattgattgttgaatattttaaatgtcacccccacatggaggccaggcccagagggctcctttaaaccattaagcctctaccatcacacacagctacaacaacaaaaaatagatctcagccggcgcggtggctcaggcctgtaatcccagtactttgggaagctgaggcaggtggatcaccttaggtcaggagttcgagatcagcctggtcaacatggcgaaaccctgtctctattaaaaatacagaaattagccaggtgtggtgacttgagcctacagtccgagctactggggaggctgaggcaggrgaatcacttgaacccaggatgcggaggttgcagtgagtcaagattgcgccactgcagcctgggcgacagagcaagtctccgtctcaaaaaaaaaaaaaaagatctccaatgttctttcattatcctcaacctgcttctccagattctccctccagattcgtccaggtatttctgcttaaggctctcactccaacccctctgtttctctgttttgatcttttgtttctccatttagtcaatcattttaattctccctccactctaacttcggctgtctaaagtaaggctttactggccatggaaagtccacctcctgccatcatgtctacccattcctgaagcaccagacctgaagacatagtagacacagagtcacattgggtctattaatccattaagaaattattaccaaaaaaagttaatagaaaactcttaacatataataccaatccagctaaagcccaaggttttcaggaatctttaggttggagtttcaagatgtcattttatacaatacagatttccatttgtttgtactgcctcaattaactaaatatacaacactcttaagtttaaaaatgaacttaaagtacacatatcacattatgccttagtgtacatttacatacactatgaatgcacctatttaatacctctcactaccaagagaaggtgtgaccatcacacaaagaatcttaccagcaaaggtataactaagcagtgatggcaattagaaatggtgataaaagactctattaaatgagaggctaatagtataaattagcataaagcaaaggagataataagagatgaacagaagggctatcttgttcaggaaagatggcaagaaataaaattgtggaattcagaaagtgaaaaaaaagtaaaattcttccacttcttttgtcattgtctttcagccagaaagtagcttatgtgagataaatcattagtaaaaatagtccataatattttataatgacacactgaaagatctcatttgcagcaagatagtatatcattatatctgtctctttaaaaataatcagactgaccagtatacccaatattacaaattagaatatgggtaatatctccttaccataaaattagaaaacagtttatagatgtacagtctgtaatgtggctattcatttaaacaaactttttaaaattatttaagataaatttaaaagtaagcaaagaaagtattaagttttcagattagctgtgctgcttagttggttcagtgttttatgttctgtagctacaccaagcaaactcctctcctrgtttttttaaaacctatttcacatgtactagaatctgaagctgggcatagtttgaagaagttgcattccagtactgggacttccttatgtttttatcagagtttcactgctcaacagccaaatttcttttgatagtataacttccaaatggcctcccgaagagctgaggggctattctgttagacagataagtgtatactgagaaattgcaggcttaatatgccttataacattccaggcatcattgccaatccatggagtccttctgacctacaaacctccaattccataataactttggggcctttagagtcttctagaggcaaggccaggcatggtggctcacacttgtaatcctagcactttgggaggctgaggcgggtggattgcttaaggtcaggagtttagaaaccagcctagccaacatggtgaaaccccttctgtactaaaaatacaaaaattagctgagcgtggtggtgcatgcctgtaatcccagctactcaggaggctgagacgcaagaattgcttgaacccaggaggcagaggttgcaatgagccgacatcataccactgaactccagcttgggcgacagagtgagactcttatcttaaaaaaaaaaaaatgctctagaggcaaaaaatctaaaagagggcaggctagatgctttctccatcttaaattacctctggaagtacatgagatccttatgtgaattcactaattctgctttcttgtgttttttgtctgtttgtttgttttgagacagagtttctctcttgttgcccaggctggagtgcaatggcgtgatttcggctcacccacaaccttcgcctccccagttcaaacgattctcctgcctcagcctccagagtagctgggattacaggcatgcgtcaccacacccagctaattttttatttttagtagagacagggtttctccacgttggtcaggctggtctcaaactccagacctcaggggatccacccacctcggcctcccaaagtgctgggattacaggcgtgagccaccgcacccggcctttcttstgttatgatcaatgttcttacctgcttggttcaagtctaacaaaacaagaatcttagtggcacctcctgcctagagtatttggaatcctttggaaatcctgaagccaacttttccactcagtatcctcaaaattagactgaggcccagactacaggcccttgggttaagtcagggtgtagagaaaaaaggctctgcacctgtctggaggtgaaggataatttgcctgactaaggagtgcctggatggagtaccagactatgagggttcctaatgatttggctttttcctgctacaagttcactgaaagtggccagacatttgagtgtgccctagggcatgcgggtttgatgtaccactatttatttcaggtcttgggcctgtgggcctttgctaatttttctggctcccacaataccacttcacagcaagcccccttaatctctccaataaagtggagtgtcygtattgtcagtcatcccctattcatcagtctttagactatcccttctttttctccttttccagagcaaaataacctattagcattggcattctgccgaacactgattgcccaaatgccgaacagtgctttcttggaggttcccatccccaaagctctagcctggcattgtgttgagtgctaaaagtacaccctgtataaggctgggaacttcgaagctgtcaggggttcactggggaattcagagacgcaatcctcggtcctcaagagaagctatttttggtggccacttaggtttgggaacagagatgctgaaatgtgccttttaggactccatgggtcacatttcttaactgttaatgcacaattggggctgcactgtattcatcaaaggattttcaaacatcggctaaatgttacaatttgataccctcttttttgtcagatgattaaactgatcctgaagagaagagtcctcttggaaataaaattcatatgtagttactgcagccacagaatgaagattgaaatctgaatccaccttttcttgacataatgccattgctttgtgaagaatcttaatttgtgttatacaattttagaattagatttaattcaacactagctttatgcattattagtttagattgattcctctctgcatgtcaagtatgattgaaatttactgacaggaattttccccaagcagatttctgttgtttgactcaactataccagagtaagtcagataaacatactaaagaaaaaaactaaagactttacatttttaacttttccacttagaagtagtctgctkttaactcagcctctaatgctctttacgcatccccatgccatttttgcttttggcaatttttttttttttttaggagacagcgtttccatctgtagcccaggctggagtacaatggcacaatcatagctcattgtaacctcaaactcctgggcttacaaaatcctcccacytcagccccctcatgtagctaggactacaggtatacaccaacatgccagcctaaattttaaattttttgtagagacaaggtcttgctatgttgcccaggatagactcaaactcctggcctcgagggatcctcctgccttggtcccccaaagcactgagattataggcataaaccacagtgcctggccctgcttttggcaatttttcataacctggttcaaatttcatctcctttgaaaaacaattattaattttggaatccctccccatttcccaaactccaacccaaatctgcattgccacaacatatmcccttgtcttagctccaaattccatgatgctttatagtttgttatttacgtgtttgcaatccctaagttgtaagcccttcgacaacaggggccttgacttttcctttccccyagtgcgtcaagttstgaacaaaatttatttttaaaaaatatacaaatatacaataatctactgtttttaggtcaggagagacaaaaaatactaaccaataaatacaacagcatcaaactggtataatgacgcactgcagaatctttagactcctacccacttgaaaataggtatgcatatctgtagacaacctagcatttaccttgcaagggaagagaatctattaagacaattcaggaataaatcaaaagttagaaatgtgagattccttcttcacctctccctctccctcacattttacatccagtcaatcaacacttgtccattttacctactaaatatctctgtaacccagtagtagtgattctcaaaccycagcaagcctaagaatcacctggaagacttgttaaacagactgctgaactccatccccggagtttttgattcactaggtctgggatggggtcaagaatttgcatttctaacaagtacccaggtgatatggataatgcctatctaggggccatactttgagaaccactgctttatccaatcccttatttcattttccatgctttgagaggcctcacaatttctactgaaggaaaagggcccctgaattgtgacatagtaaaatgactcaaatgaggcataagaatagctagatttggtcctgattttgaatggtttttcttggtgggcagtggttgtctgaggctttgaactgatctttaacacacaggaatgagttctaggcacttctggagtggtccagagcacctctaaatacgaagcagcagatgaggtcatggtaattcggggagtcagaagtggaagggtggggggttgaaagctataatcactgtcaaaggggtgttttctgtagacaagtgaatggagctattgtacacaaactcagtggttgccaagcatgtggcccaattattttgccttcatgagcatggcacggaaggatctctttagagaacttgattcacacaagtttgtgtttagtctaacggtagcaggcaaaagcctggggaatttgaacctaagagtctttacaagttcctgcctcccaaatctaggatatgatactagaaagttggtaagaccacaaaagtaaaacacaatctttagaaataatacaacaattacaactgttgaaagaccaatataggggcctatcttggtcaaaatgttgacaacaataatgaagatcacatgttgaccttgggaggcaaaaggtccataatttaaatttctctgagacagttttagcctgatggagaaactggaggttgggagtatgtgaacttagaccctctgttccccctggtttatctttggctctacctgtatttacagtgcttgtaaaagtcaagacttttttttttttttttgggacagagtcttgctctgccacccaggctggagtgcaatggtgctatctcggctcactgcaagctccacctcccgggttcaagcaattctcctgcctcagcctcccgagyagctgggattacaggcatgtaacagcacacacctggctaatttttgtatttttagtagagacgggggttttaccatgttgaccaggctggtctcaaactcctgatctcaagtgatcctcccacctcagcctaccaaattgccaggattacaggcatgagccaccatgtctagccaaaagtccaaagagttttattggtcaccagggtctagggtcttaaaaaggaatggaagacctgcttcatttgctaggatagacatatgaattggcgatttgctgtcttakgggaaacaccattctccctgcaacatgggaatggagatgctttagtacccttcaaatttcccagctgcataagaaaaccactgaggtggttggcctaagccccaaaaagtcaagaccagaaaacaggggcaacaaccatcacctggcctccaggaaagcagcactgtccttcctgggcactacagaagtgagaaacagaagctataaggttgctgccaatcctccatgatattcacttctttagtacaagccttaactagacacatttgagagacgagcaactcgcagagtcagacaggatgttatagatgaggctatcaaaggtgaattcaacttaaaatagatataactagaaacaggatgggaagcatggtccacttcctcttggagcaagaggtgagaaaatgaggctgtgaggaggtctgtctcctcttttatggggtactaaggggaaaagtgtgaaggaaacttctgtagctatggtgatccctacatccaaaatcctaattctggcagaactctaacactccatgaagtactgcatcacacagtattcatttgatctaagccctctaaacttgcagagatggaggcagggggacctgaaagttttgaaatcctaagagacaaaccaaaaagtcataggagctataccaactggcactccactaattcaacaaaggataattgcagaaattgacttcataaatacctcaaagacctcataaataccacactaacatactgtacttctcacccgggagaggggtcacacagcaaaacggtttgtaatggaatggattaaaactataaagagttatacaggtgttagaactgtttattgttttcaggaataagaaaatttgaagtgaagttaacatagcaatcatgtagcacaaacaaattagaacaaatatttattgaattaaaactatgtaaggcatcgaactagatgtgataattcttagggtttatgatttatagctttctcttaatctattataaactctagagygcctggcaagcacagggctcaatacatttgttctctccctccctctctcaccctagctaccacagctactaagtggttgagccacaatcaaatccaaatattggttatactatggaaatgcccctgcacacacattctatttatggtagtatcttatttaactgcacaatttaacctggctgcttaatccattattttaatatgtctctcagtaaaatcaaattcatttctagagtagctcacctttcastaatcacaaaaaactgattaacatttctgacttgaaaataggtattttttcaacacatatttctattagaaatgttgcaatatatattctcataatttataaactattataagctgaaagatagttcaaaatctattcctggccgggtgcagtggctcatgcctgtaatcccagcactttgggaggcgaggcgggtggatcacgaggtcaagagatagagaccatcctggccaacatggtgaaacctcgtctctactaaaaatacaaaaattggccaggcatggtggtgggtgcctgtaataccagctactcgggaggttgaggcaggagaatcgcttgaacccaggaggcagaggttgcagtgagcttagattgcgccattgcacttcagcctgggcaacagagcgagactccacctcaaaaataataataataataataaaataatctattccttataagcagggcayggtggtgcacttctgtagtcccaactacttgggaggctgaggcgagagaatcacttcagcccaggaattcaagtccagcctaggcaacatagcaagatcccgtttcttaaaaacataaaaattccttaggatattacatgcctaagcaygtaaatgactccttcagtatactgagttcaaagatattagttatcttttcattttttaattttccctattttctccaaataacaaagtaagctgataaatgtggtawatatatatatatatatatatatatatatatatatatgtatctccataaatgaaacagatgaatgaaaaacagatgagtagaccagatctgcatttacgaggaaatgaccttcaaaactggcagggagctgttaacaatgttcttcacaggggagcaattatactacaaccctcctatgtatactttcatttctcatggtctacaaatacatttgcatatcagaaagagtgaaagaatagtctggtaactgtggcaaccttcattgaaaagatataaggcattttcattaccttaataattacatcctaaatgccagatcggaataaatgctgcattatgaaaggatagacaaatactttgacagaatttcttataactgaaatttaccaaatggaactatcatgactccaacccagtgatacatttctgattctgtaatatcctaagtagtctctgattatgctaaggcagtaaaatcattctaaaatagatactttatttaaacaaaaatatggcatacaacactttaaggaaaatgagttcaaattatcaccataaaatatacagtgctacaatgcctaaaatgttgggaatattgcttaacctaataagaagttcacagatcctttccatactgatttaaaagatcctatgcccagtatttaacaaataagcacatgcacatatacacacacactcactacagaaatgcatgaagggaaaagctgataagaaaagctcaatttctaaatgttcaaaaaagctacatgcagaaaatgttaatttcatataagatactgtctttttgctacatttcctcacatgggtaaaaacaaaagcaattcgccaaagtgatgccaaagaatgacaacattacatatacttaacaatccctgtgttctttagattccatgcaaaaatcacaatgcacaatcattaacatgtctagacagtggacacttactacagtgtggccatattacaccaagcttaattttttaggtggcctagatattttataaaattaaattgtaataatgtaaaatgagagcagtaggaaaataagtacagctatagtgggatatagcaagcacaaatccaataagtcctatttaactcaaaaatattttttttctaaatggtaataaaaactacccacaattataataccartcaagcaacctcaaaggttccactaactgggaaaaaaataactatttgcctcactgcaatactttaaaaccacaaggttaacaatcatttctagcgaaatggtgatgtgaattgtgttttatttgtattctacaccttggcaaaagttaatgacctgcctcggaaattatttcacataccccaaaagtattcttaggacttataaagtctaaatctcacactccccttgatatgctattggataaatgctttaaattttaaaacaaaaggataaagacttttaaaaagctctagacaatatactcaaatggtgaagatatcaactcaatgtattctcataccccagcaaaacaaaaaaagcaaaaaaaaactggacatggcacaatgatacaataggaacaaaaagtagtattccactcattcagcaaggaaataatacagagcatctctctatcatattcaactacaaaaatcctttcacttgatggctagcatctttatgactgcttagtctgtatttaagtagccttaaaaagagattttgtgctctttctctaccctcatggatctttggcagcagtcagcacttatgcccagagctggtttcgaggggagggagaaaagggaaagtgaggagaaggctgaastgagcacggagtcagcagagaccagctgctctcatacactacccagtgtctttctcacacaccgctattttccgcgattgagcactgtcagcaaaaataaataaataaggaggcggggggcaagaagacactgagggtaggacccaggccgacagtttttgtctgtcacatctgagccagaagcctcctcctgttttcctgctgcaaaggcaaaggatcaggtgagacccctctgggtccagctcaattagcttctccacaaagagcagcttccggcgatgagcgcaggatcctcctggctgatgaactaaacacsggagcattgtcaatgttttcaatctctgactttttcataagggaggagagagggctgtgactgcattcccgggaaagactactactcctgacgtgcacacagcagtagcgaaggaacatgagcaagaggttgtaaaaatcccttcaaaaataccaggttctgaaagaaatgctgttgagcattaccgtattgttggcgtttttcctaagtcgccgattcttcctggccacttccaagccccaaatcgctgggacttgttgctaaatctttayctcacgtcccctagaaccgcccaacacaataaaatttggggatcaaaaggcgggagggggcctaaatctctaaaacccagaggactgggcttccttcaataggccactccgcatgggctgcgcgttcagttctaccttctgaaagctctgactcacaaatggtggggggaggaattatgacataaaccattatccttccaacccaagaaagataagaaaagccagccatacgtccttgcccgggcagagagccaaagcctgcgcccccgacggggcggccgggctaggagcctaccgccctacccgcctccctccgggcgccccggaaaggtgcaccttactcgggcgggctcgaggaaccaggacggggcgccctcacccagggagagcagggtaggacttaggggtgtgggacgcggagactcgccccgcggcggcggtgacacaccgggtgccagggctccggcaggggctccggtgaagacgccctgcactagggcggtccgccgcaaccaggaacggacaaagcacggcgctggggctggggcgacccctgggcggcggccgccgccggccaagttgaccagacttgggggacaagggggtcccgcgggcggggcggggcggcgcggcgctgacctggatggtgcaggtgtactcgctgtcgtccagcagccgcacggtgcagctgtactcgcgctccaggctcctgctgctgccgctcatcaacctgctcagcatcttcccgcccgcccgcccgggagcgacgcggcggcgctgcggaccctggaccaggcgtccctcagcccggcagctccgcaccgaccccaggcacctgcaccatcaccccggccccgtcgctgccgttgcctcctgctggcctcgttcctcctccttatcctcctccttccctcagccgccaccgcctccccccagcccagatcaagcgccgggctctgtctcctcggcgccccagtgcccgtgcccagctcgcggggcggggcctcaactggagggggccaatgggggtcagcgcggcggaaccgagtggcagaccgaaaagccaatcgagatagagtactgggatgatgggcgggataaagaagcaatcacagaaaagcagtcggacctagtcaagccggagcagccctctagcgtcccaaacgaggggttcctctccgccccgtggttcctatggatgctgtttcccctcccccgggccaggtgtgagcacccaactggattgatgtctgccgcctgaaatacacttgatctgcgtttccgaagccaagcctcgcaccctgcaacaccgcggttcccgccctcttgggagccggagcgaggaggcggcagggtgctggatcacagtccctgcacctgcagaatgcggatacctctcgctccagatagggcgactgcccccgacctgtgctgtaccctaagttggcccgtctggcctctgtgctccagccctcttattttgggaaacaggagctacttaaataaaagctaaagggacctcagaggttctgaagtacccaggtttaatcccctaaaaaaccctccactctaacaccctttgcctccttctttttatttcagaagacaaaaggagactgctccttcagctggtagggagcagaggaagcaatgaatcttctccttgcacttttagaactggaaattatgtcttcagactttctcaatagaacaacatagtatgtcaggaggtatacatcacaaagaattgtctccttctctttgtcaccccaaatttacagacttcaaggttttttaccagaacttcaataagagatattctccctcaaagatttttgatgtgaggaaatgttataaaataattatgtcggccgggcgcagtggctcaagcctgtaatcccagcactttgggaggccgaggcgggcggatcacctgatgtcaggagttcgaaaccagcctgaccaacatggtgaatccccgtctctactaaaaatacaaaaaaattagccgtgcatggtagcacgcacctgtaatcccagctactcgggaggctgaggcaggagaatcgcttgaacccaggaggcagaggttgcagtgaaccaagatcacggccattgcactccagcctgggggacaagagcaagccaccgtctcaaaaaaaaaaaataatcgtgtcaacatagaacattaatgctgtaataaatatattaatttaaaataatgaaataggcataatttcctattactttcatttgcactgttcttgtttataggtataatgtgtaacaaaaatgaaactctacattagcctagaaaactatcccgcctttaaagtatgcttcttccctagtgtctttggattccaatattttccccaattttttttttttttttttgcatggggagattcattctctttcattctctctctctctctctctttctctctctctctctctctctcttcctccccctctccctccccctttttctttctatcaccttagtaacctggactgctcttaattggttgcattctcctttgtggcatttaatagccataggagcaggattctcttttcaatgcaatttggatggagttagttatgagtctagaactagtaagtcaagtgttccaggcataaaaccaggcatgcgctccactactttgtagcttcagcaggtagtctgatgcctgaaacataataggtattcaataagtgttgaactgaatacaaaaattagccgggtgtggtggcatgcgcccgtggtcccagctactggggaggctgaggcaggagaatcgctggaacccgggaggtagagattgcagtgagctgagattgtgccactgcactccagcctgggcaacagagcaagactcggtctaaaaaaaaaaaaattgatgaactgaagtaaatggaattgacaggtgttctacagcacttaaatcccagaggaagaagacctgtgaagaaactcaaaatttcaggaagatcttggagacaagtaaaattattaatatgccaaagtgatattctacaaagctcagctttgttatgtagctgtaagaagataatgaaatatttcaggctgggcgcagtggctcacacctgtaatcccagtactttaggaggccgaggtgggtggatcacgaggtcaggagttcaagaccagcctggccatcatggtgaaaccctgtctctactgaaaatacaaaaatgagccgggcatggtggcatgtgtctgtagtctcagctactcaggaggctgaggcaggagatttgcttgaacctgggaggcgaaggttgcagtgagctgagattggccactgcactccagcctgggagacagcgagactccatctcaaaaaaaaaaaaaaaaaaaagaaagaaaggaaaaaaaattcaaactgaaagagcttttgttgaaggcaaaagttactgtttgttatagaatcaacaagagcaagaaaaaatgtccaagctagaggaagtccataagtgtgatggtaggaaagtgtttttaacaggttatccaaataagcagctgttagaatgaaaaggcaaagcactatgaatccagaaaagctctaaggaactgaatgcagtcttttttcgaagtatggccatagttgcaatcaacagaggtgagactgtatttcctatgtcaatgtgttaagtagaatccttgctcagtctgagaaaatcatgtctgaggctgggtgcagtggctcatgcctataatcccaacatttgggaagccaaggcaggcagatcgcttgagctcaggatttcaagacccacctaggcaacatggtgaaaccccatagctacaataataataataataataatacaaagattagctgggtgtggtggcacacacctgtagtcccagctgctggggaggctgaggtgggaggattgcttgagcctagggggaggggaaggttgctgtgagccaagatcacaccactgcactccagcctgggcaacagagccagatcctgtctcaaaaaaaaaaaaaaaaaggaattaaaaaaaatcacatctgcttagatgctcacctcaccgaaagaccagttagatattcattcatgcttaggtgtaatatccagagagaacttcaaactctcccttcttctctgatacaaaacactttgtgaggaatacagagaatgaaaaaataatggaagaaaagcaagaatctagatgtatgtctccacaaaaaagctcatgagaagaagcataaggagaactagaaaggaagggctcatataaaaccaaactgaattttgggagactgggcagaagaatcaattgagccaggagctatgactgcatcactgcactccagcctggacaacagagcaagaccttgtctccaaataaaataaaaagtaaaaccaaacagaaatattttgtttatctttgttttcctcaaatctattaactaggatgcccagaatggaaagggcttatttaataaaaggccttatttgcccttgagaaccagcgtgccatagctttcatgtgtctttaagtataaaggaggccacatttaaaaataagaatccaaattataatggctctgaacccccaccttccaaattatcagaatatcagccgtcttttgaatttcttttccttctctactatgagggagtccccaggggaggtactatcccccacgtatgcctgaaaaaactaaacaaagcatttcgtgtctctgcttcagatattctataccctgctgttctgggacactggtctctctctttagccaatgcaaccttcaccatttctttagattttggcaggaaggagtactgccctctcttcaccaagacatgacaaacacaggcccttcccatcaaagtttcccccaacacagctaagaccaagctataactcctaacaatatttaggaaaaaaagaataatctgaagtgtaacttggacgtatgacatagctactttcaaagcctcatggactatggattagatacaggcctggccttactgtcaggcttccattctggttcatgtggctgaagatagcttcccctctccagcaagagttcccctgactacgtcttaggcatttactcccaatcactgtgaagaaaacaactctccttacctaggttagggtccactttccaagtcccattttctgtcccaggtgctacctcttcctagaatgactaaccatggaaatatttactcttctggaggaaaccccaccctgcatgcccaagggtatgaccttgacctctgattcaacagggctgtcatatcagaacacaatagtcaacatcagcatgtttctcacaaaggttgaattattcagtctttacacgtgggtcaaggtaaagccgtgtcaaagccagtcctgtccctttgcataattatttctccagtagagcagtgaaaatcatgcctgtccttgctttcctatattcattaggtctcagcttctgctatctaaagagcaggggctcaaaaggacattcacatctccacagaaataataatgcattgacacatatatgctctaaatccacacagaggaaagaaacagattttctgttcttctcttctacatcaatgtctgcagaagcagtacttctgctccacacacaaagatttgcatattcaaatgaagcactctgcttctcagtctaaagcatttatattcgggttaattgttgctttatagttttctaagagtaatacgtgtctacttgtttgaatatgagtaactaaacaattcatgtagttttcccagagtagtcttctcttgaagaaatgctctagttttcccatttatcaggacagaaaaccacatacagtttaagagacagtttttctacctaacctttagacttttggttagcccccattacacttagaagaggtgggtttttttatatggaaatataagcagtacacacgctttttaaaattccaaactacaaacatttattgagcgtatgtgttaggcactgtgacaatgttctagaatatgtaagacatagcccagatatgggaaaaggaaataagtcaagaagtgtataaagaaaaaaattcttcacaatgtaagagagagtgttagatgtatgtaaattagctataatacaatacatggagcataagcaaagtactacaagagcacaacaaatggtacaattatgtaggcttaattaggagagacagtgaagccttacagagaaagcatttatgttgggccttgaggactacagtaggctcttgattgtgaagaaggcagaaaagatggatatgggatgaggagtgacatttaaatagaggaaattgtataagcaaagacacagaggtccaaataagcatgagtatagcatgctctagaagctgcaagtatccctgaatggatagcatgtgaggtgccttggccagaaagagatggactgaagccaggtcatgtaggaccttgattgccatggttaggagtttgaactctgtttcatagtcaataggctgtcattggaggtttttaaatagagaagtgacaagatcagatctgtgtttaaaaatgataattttgatagcagtgtaaaggattaaattagagtatgaagaaattatttgctgggggaaaatggattctgaaaacaatagaatatctttaatgaagcatcagaagcatttataacaggtctctcagatttgggtgacaggctttattatattctccaattacggctcatttttcttatattcccagctagttttcagccattattctagcaacaaacataaatgaaacaaagcaaattaattcatttattcaaaaaaagtattggtggtctactatgtgcaagtccctatgccatgtgctgacagaattcaaagatgaataaaacatatctccaatcctcatagaacttacagtct

SEQ ID NO: 96324 - DNA, 43778 bp, Homo sapiens
atattttttagtaaaagaaaaaaagcggcccagcgcggtggctcatgcctataatcccagcactttgggaggctgaggcaggcagatcacctgaggccaggagtttgagaccagcctggccaacatggagaaaccccgtctctactaaaaatacaaaaaattacccggacatggtggcaagtgcctgtaatcccagctactcgggaggttgaggcaggagaatcactttaacccggaggtggaggctgcagtgagctgagattgcaccattgcactccagactgggcaacaagagcgaaactccatctcaaaaagagaaagaaagaaagaagtggtaaaaagcaaatatgtggagtcatattatatccacagtggtagctattatgatgtaaacgaaggcaaaaataattaataaggacctaacctagcatgttatgactgcttacgttgtatgcaatatattacaaatcagcaaaatataagctctgaaaattcagatggtgtctttagttctcatctctggtatcccatctacaacaatccaccatggaagttaagtacgtctgctacttcggatcacagggaggtctgatgtctttatttttatttatttatttatttttttgagacggagtcttgctctgtctcccaggctggagtgcagtggcacaatcttggctcactgcaagctccgcctcccgggttcacgccattctcctgcctcagcctcccaagtagctgggactacaggcacccgccactacgcccggctaattttttgtatttttagtagagatggggtttcactgcattagccaggatggtctcgatctcctgacctcgtgatccgcctgcctcggcctcccaaagtgtctgatgtcttctgacaaaagatatttaatcacgctttcattcaacaaatattacttgaaacattacattttttgaactagaactttatgcattaccgtaagcatagttgcttgaaaacgtagtgaatttcctaaaaagctaacaattttatatgcaagcatagtggccaaacactaactcaatgcaaaggagtattaaatctgtttctttaaaggtatgattttaaaacaaaacccttttctatttattgtctcagtctgtatacatttgaaaagaaaacttaataatctggtgcttaagaaggtttataaaagagcatgtgaatgcccagtttagataattgtgcaattcacaatgcagtataattaaaagtgaaagtgatcttattcaacatacgactgcatgtacggacatgaattatcatctgcatatacatatatgtgttctctttcacacacctaccacttttcacacaacatacatacatatacaatacaaagcatagtcttacccaagattttcaaggtcaaaaatgcgattcaggtcacagtcaatatatctggtacacttcttcactgctctggggttagtaataaatggttttacctccagccctgttctctgaatctcagcgccattctctagccaatgcttaaccagaaatactccggttagctcattcccatgggttcctccaaagatagcaaccttttgtatatgttcttcagcaatgtgacaagaagtcatttcaccaagtagtttttatctgatttctgcaattcagaagagagatcaaaggaaattcgattttcttaagaaaggtttagaaatgtaaatgagactttacccaaagggcaaagtacagaattcccttgagtggagtatattttaattttctgttacaagttctgagccccgtttatggacactcccttctttagccctgccctttgccatatttggattaaaatatgcaaagatcaactagagatacagctgtttactttaacttctaactccctcagatggtcagtagatctaaatacagtaataaattagcatttcatactaatacaaaaattccattcttttcctcagctaggatgtcatccagtgaggctttcacaattatctgtaataataaaaatagtttatacgtttctaatttcacaaaataaaaaagtggcccactcagtatttccacgggcatttcaaaacatttcttctctgaaatgagttcaagcacttttcatgatctgagggcatttgaatctcacctctataaacagccaaaggctgaccctcagagacctcctcttgaaccggcgcccattctttcagaatgctttttcacaatcagaaacagaagggccaaatcaatgatcacttgggactcgaaaagctaccctgaaacatcccttcatttctttctcatgaggtttttggtaattctgtgttaacttacttatgaatcttcctcattttttgcctaaataccaaaggaaagacaactgttagtacttttcaagtttttgtgatgcctgaaaatgtcttgggacacactgcatgtgctaaccacatcatgtgaacttacatagacacagccttattcactgtcagcggggactctccactggactgtgttactcaaaaaggggtcttattaggggaaattttccagaatactaagatgattacatccctttggagaaatgactctgagccaaatctgatttgatttcatgctcagtcacccagaaagtcacatatgttcaagtactgggaataccatgtactagtaacgccaggttgtttgatagagggtacaataagagtaatttattacaattgcagagtttaatttataatgtcctttcactcagtttattcatacattaattttatacgatagggtgggttaggtgttgacatccccactgcaggggtaaacgaaagagaggttaagtaactcagttaaggttctgcagggatgtaggagaacctaggcctgagacccatgtttctcatcccaagtctagtgtttttcacaggacaatagggtgcctctctgttatttttggtcttcttcacagttctagttttgctctttcagaattcacataaacagccattacagtgtgctcaggaaacaaacatgcatacaaaccaaatacatggtggaaaaataaaatatgaatgcttcctaatatttaataaacccactgaatgttcttcctttaagagcttataatgcagagatagagaaagcaaaataaccacatcaaatctatgcattaaaatgactgttctaatagaaaaaaaaagctcctgtaggctttgactgtctgtccacatccatgtacactgaacacttcagacggtgtagagatgatgaaaacacacgtaaaagtaaacagatgacagttgtttagttgctttggttttaagagcagtaaccatggtgaattattaacactctactatgcttggtttcttttctgctgatttgtagtttgttctgtcctttgccctagtctctctggaaatgctgcttcagttatttactcgtagctggcacaaatgacttgcattttgaagcttgttttatggaattttaacagatcagcactttgaagcacatttcacattcataaataaagtttctcttacatgtcaaaatgaataacttttttgagagttaatgaattgcagcaattatttcccatacttaccttgttttttgtgtacagagtttgtcttctgtggaaagctttattaggaaaaaggagagcatttcctcagaagtagagcaacagaggcttttcatactcttataccaagttaacttccgaaagatttttaactccctgtttcccaaagtgtacttgatttttgggatgacccaaaaaaccacacttttttattagttctcagcgaactgatagtatacgaagtgaaaccctttcgaattgtcactatctcattattaagttgaatatataatattctgaagtacttaaaagagtaagcataacttccagcattacaaatgttttgtgggatagagttgcctgatgtattaataaaataatgtagtttaaaacaaaaggatgccaggtgtggtctcatgcttgtaatcccagcactttgggaggccgaggtgggcggatcacctaaggtcaggagttcgagaccatcctggccaacatggtgaaaccccgtctctactaaaaatacaaaattacctgggcgtggtggcgggtgcctgtaatcctagttactcaggaggctgaggcaggagaatcacttgaacctagaaggcggaggttgcagtgagctgagattgtgccattgcactccaacctggggaacaagagcgaaactccgtctcaaaaacaaaacaaaacaaaacaaaaggagagcagagttttacttcacagtcatggctgtccagtagatccctgccagaaattttgtaggagacaaatttaaggtgggttgtttcccaaatggtatgactgggggataagaagggttttttgttaaatattatacataagatgtctcatacataatgtgatgttcagtagttatgtaatcaaactacttttactactttagttttctccttccctgtgatccatcctgaccaactttccaggtggaaataaataagcagaaaaagacaagtataaaacagattaagtttataaactgctagcaaatattctatattgctcatgtctgcagtccctacagaagtaatcggcttaaggtggttttttttttttttttttaatgaaaaatctatttttggggtgggtgggtgtgtgttgtaaatgtatgcacatccgtatgtagatatcaagtcaaaatctgcttccctgaagcttctattcatgttttgggtaactcctctctggaaccatgataaataacaagttttatttttattgttcaagtcttcttcttcccaaaataaaagatggccctattccttgaaagctgttccttactctggcattcaaggtctgctattatctggtctcagtctacatctaatattattttctaacactcttctttacttgagatagttttaaagcaactactaaaatgtctgtggtcttataggcctaggcctttactaacaatcttcctttcatctctaagcccttccctatcccagtcttcaaatggttagaagatacggtaacaacaaaacatgggctttgaactcagacagctctagaatccactacctggcccatagtaagttccggataaatggcagctactgttactcaaattaaataagggctaacagttactgggcatttactgtgtgccaggattgtctatttcatcttctagtatttttagggcgattgttgttattgttcttttactggtaggtccagagggtgttcagtaagtaacttgcccaaggtcacagggccaggaatccacagtcctctttgccaggaagcctggagctcaacgcccagggtcgcacaccacgcggcttcccctgcagagcgtctctgcggctcacgggcgcttccctcccgcaagctcccgcagccccggcgctgcctcgctgacggctctccgccttccatggccgccatctgaacctgggcttcagctctgtccccagcctcccggggactcagattccctgaccctgatccgacccagaaattgagccagacacctcgggtggccttcgagtcaatctctgggcacactctgggtggccaccagcatctaacaaacggatgtctggaccctaagggccagggggtgaggggaagtggggcacactttttagacgatggtggggctgaggccggttgggcaggagatctgcctctgtctctccagtcacaggacagtctcctttcctctctgggcaaaactctaaggagctggagccatccctgggtccacagtgtgagaacgccaaggaagagcgttaacgtcatcgcgcccggccaagggcggccaggcaggcagcgaagatgccatcgcgccgaggtggcggccactgcgcctgcgcggtccacggcgcctgcgaacagcctgattcccgcgctttcttcgcgggcgggaagggcggcggttgctgacggggccgcctggacgacggttgacggaggcgagggaaactgagggcgaaagttgtgtgtcgtgttggcaggagggcctagaagggaaagactgtgcgttgataccaaactgcccccactccgtgggcgggtcaggagaggcctttggaagagcgtctcaactcggactggagcctcttctctcccaccgcggtcaggagccaaaacaggccgccatttgaggccgtggtttttgtgggtggtgtgtgtgtgtgtgcgtgcagattgagcacactttttgcacaccaatgccaccaaccccattactaacgccacttaggtccatttgggagctgggattgggggtaaatgagggtccccgccctcaggatcaatggtcccgcgggtggaatgttacacttaaaaattttgttgttgtttattctgtttgtttgatcctgagaaacataatagccctcgtaagcccctctaaatataggatgtgagttgcgccggtggagaaagtggcagaatccctgttgtggctcctaggatggcgccaagaatattttcctttcctttcctttcccttccttccttccttcccttccctccctcccttcctccctctctccattttttccctagagtctcgctctgtcgcccaggctggagtgcagtggcgtgatctcggctcactgcaacctccgcctcccgggttcaagtgattctcctgtctcagcctccagggtagytgggaytacaggcacgcaccaccatgccyrgctaatttttgtatttttagtagagacggggtttcacgttgttggtcaggctggtcttgaactcccgacctcaggtgacccacttgccttggcctcccgaagtgctgggatcacaggcatgagccactgcacctggccaccaggaatattttctaaagggtccatctcttctacccagcttcaagcctaagatgtggaaacaaaacagaggcagcacctgacctcgtgtttcccaagttgttwttttttcttttttttttgagacggagtctcgctcygtcgcccaggctggagtgcagcggcacratctccgctcactgcaacctccgcctcccgagttcatgccattctcctgcctcagcctcacgagtagctgggaccacaggtgcctgccaccacgcccggctaatttttttgtattttttagtagagacggggtttccctctgttagccaggatggtcttgatctcctgatctcgtgatccgcccgtctcggcctcccaaagtgctgggattacaggcgtgagcmactgcacccggcctgtttcccaagttttatttttacaaacgatatttgaaagttaacacctcggcctgacttgcattattgcttagttgtgtatgtgtcggtctgtctgtctcattgggttgtgaatttggaacagaagttacctggtttgggtttgtatcttgcctcttcttgcagtgggcaagtgttcgttgtattagattggggatgaaatgtgttaaggggctaaacgtgcaaaattacaagagaaattctattgtaaaagaagaaaactaaggaaaaacttgtttcacttkttgaagttgtggaaatggagtggaaacttgtcattacaattattctagatatgaagggaggacttagtcttttttttttttttttttttttgagatggagtctgggtcttgttgcccaggctggagtgcagtggcacgatctcagctcactgcaacctcggcctctcgggctcaagcgattctcctgcctcggcctcccgagtagctgggattacaggcgcccgccaccactcctggctaattttgtatttttagtagagatgggcttttgccatgttggccaggctggtcttgaactcctgacctcaggaagacttagtctttgatattatataatccaggcatttcaaactgatgcaaaggcagatgacctgcacaatgccttaaagtggggcatggaggaagttcccggtggctaaatactgtgtttcctccttggccttggaagcatgtatgtttgccaacgctgtggtccattttcctctttgtaggtgtggttcagaattctctttgtgggtgcgggattctgaaataaattacatatactgtgtgaaaaaatgcacatatgtttacgaagcaaggttacagttgccctagtcataacttaatttgaacagggttggaaaagtggattatggtgtaaactcttagaaagcaaaggactccctaaagtgtttacgtgatcaggtttgaaagtagtttacaaccataatttcagtaatcactgggctgaggattgggttttatagttgagacaatacgagttataagtttctttctttgcaggtctagtgggacaatgtcatattataaatttggaatgctgaatagaaaattatagattttgatattgaaggaaatgaagcgaagcstaaatgaaaattcagctcgaagtacagcaggtattgaacaactttttatttttaaattttctgtatagcatataaagcttgtatagtttatagatataacattggaaataaatttaaaatagattgaacagttaatctagcctctttactttttaggtccaaggaagtaaaataacttactcaagacaaaacatttagtggtagaggtgggagtaagatcaaagtttcttagatttattttgatattctttctacaaattcgatgtgcttgagttattctatgctttaaaactgaaaacaaagaaatagatctatttttgtttgtatttgtgacttacttgttaaaaatatttccggaagcacttctgtctttctaatagcttctcctatcatttttgctttcccaatttattagtataaagacagayggcaaggatgatgagaaccaggggaatgatgatgcataatgaagataatagtaactattatttatggtggattaactgtattcaagacattaattatatatattaatttatttaatctttacaccaataccctgagataggttattataatcatttctgttgttcagatgagaaaaacaaggctaaaagaggttaaataagtaatccatgaagtagcagaatcagaatttgaacctaggaatctggctcttagtccatgctcttaatcattatgctatcagtatatgtcatattggcacaaagagtttagggaaattgcccaagatcatactctgaarttgtaattcaaacctactttgaagtcataattcaagacctaggcggtctgattccagagcccacataattctcccagcctttcatcagagactgttcacagagtctgtatttgcctgtagaacaattgatgatgaccagttagagaatggtacagtggcaagagatccaaactgatatttaggaatcttgtgtcctatctagattcttccactgacttgctctatagcaatgcacaagctttttgaacttcttttcccttcgagttccctaagtttcaaagtttatattttgtgacttttgacctgaattgagatcctagatccgccatctggaggaatyggtagtagtatttattctcatttggactggatattattactctttaaggcattctcaaaatgatccacaaaatatataattacagatacccgaggtgcttgttaaaattgcagagttttgagttccaggctaaatctgttgaaataaaatctatgagagtggagtctaggaactgcacattaagcagaattccagataaatcttagtccaatgaaactttgagaaccaaggcccaaaagggtgtgccactattgtccaaagcatggttcagagtttggttcttcctcacctctgttgtacttcaaaggtcccctgcagtcgatatggtaacaggcaagcacaggagggggataaggaaaacaaaaagtggatttggaaaggttggggratgaggkgggagatgggaattacttccatatgggaggaattaaaactgttagagtagaataagaaaagttttttgaagaarcaaattaggctattcaggatcttaaaaagaatgtaaaaatcattctaaggttatagaaatctrtaagtatattagcatatagaagtagataaatgtaaagtgtgtattatactagtaattattttacaactagatctgcttattkgtctattatgtactaatttattggtacattcaatttaggctgtttgcctgttccgttgttcaatcagaaaaagaggaacagacagccattaacttctaatccacttaaagatgattcaggtatcagtaccccttctgacaattatgattttcctcctctacctacaggtaagaaaattaataaggtaaaaattttcaggaaatacaaaactaggattatagaaaattgtaatttatattataatgaaaatagaaagtttattttttcttctttccattatccacatatagaaattacatagcactttctgaacattccaggtcaggagtttaagtttccttatctacaagggtggcttagcatttaaatggagtatcttagatttggagtctttgttctaataaagtagtaacatatattgtaaaaaatattttttctttgtcaaaattcacgtggatattgtgttatagcctatacatttggtggtaaagaatggaaacacttgaattgcctcaggagtggggataagtgtgcatgggaacacaggaaaaatgggaaaaaaaagatagattttaggaagtgcagatgcctggaagtatctggtgcctggccgtagtctttttctctttttatggcatttttgccttcattgatttgttagctgtttatggtccaaatgtgatcccccccaatttatatgttgaaacttaattgctggtgtgatagtattaagatgtggggccttcaggaggtaattaagtcatgagggcagagccctcatgaatgagattagtgactttataaaaggtatgagggagcttttccgtccttctgtcatgtgaggacacagtaagaagmcttgacttcccagcctccaaaactgagaaatacatttatcatatttgtaaataacccgttctaaagtattttgttatagtagagtccaaagggactaagacacaccttcatccagttggcttccttacagcttcaactggcacatgagctaagttgcccttcctgtgagtttgcataaccttttagttctagttctcagaggtcaccrgtagactgccctctggatctcttaattcacatcctagagacagcttgtgattcagctcatcttttaagtaaggccactgaaatcctggcttaggtttgggttaggcctcttacctctgaaccagttagctgaggtttggtgggtgctgggaggtcttaatggttgttgttgactttttactttcctctggaagaggaatgggcaggcagacattctgaagtataygtggtacatgctggttatatacatttacattttgggggcacattttaaaaattaataggatcttatatagctagaatttaaaaatatctctgatgtagcaatacttgtattgttaatttcatctagtgtgctcccatagactttaatatacttctaaatctgtattttgtttaaagaaaacaaaatatataaaagatatatttgaagaaatttaagtgtgaagttcatatatttccaatttttgtgtataaaaatcataaattcacatggatatgcacaactgggcatttatctggtcatactccaccatttaaaaaacattccgtcatttaaaatatttttataagtagcatgaatgttgaccttgaaaaattgagctactccataaggaaatgtgtgtcctcctgaagtacttcaagctcggaccagggttactatttgtcagaaatagtagttttcctgtattgggtaagagataggactgcatcagtgttgtttttttttgttttttaaatttttatttttattgatcattcttgggtgtttctcacagaggggsatttggcagggtcataggacaatagtggagggaaggtcagcagataaacaagtgaacaaaggtctctggttttcctaggcagaggaccctgcggccttccgcagtgtttgtgtccctgggtacttgagattagggagtggtgatgactcttaacgagcatgctgccttcaagcatctgtttaacaaagcacatcttgcactgcccttaatccatttaaccctgagtggacacagcacatgtttgagagagcacagggttggggggtaaggtcacagatcaacaggatcccaaggcagaagaatttttcttagtacagaacaaaatgaaaagtctcccatgtctacttctttctacactgacacggcaaccatccgatttctcaatcttttccccacctttccccgctttctattccacaaaaccgccattgtcatcatggcccgttctcaatgagctgttgggcacacctcccagacggggtggtggccgggcagaggggctcctcacttcccagtaggggcggccgggcagaggcgcccctcacctcctggacgaggcggctggccgggcggggggctgacccccccacctccctcccggacggggtggctgccgggcggagacgctcctcacttcccagacggggtggctgccgggtggaggggctgaccccccacctccctcctggacggggcggctggccgggctgggggctgacccccccacctccctcccggacggagcggctggccgggcagaggggctcctcacttcccagtaggggcggctgggcagaggcgcccctcacctcccrgaccgggcrgctggccgggtggggggctgacccccccccacccccctcccagacggggtggctgccgggcggagacgctcctcacttcccrgacggggtggctgccgggcggaggggctcctcacttctcagacggggcggctgccgggcggaggggctcctcacttctcagacggggcggttgccgggcggagggtctcctcccttctcagatggggcggctgggcagagacgctcctcacctcccagacggggtcgcggccgggcagaggcgctcctcacatcccagatggggcggcggggcaaaggtgctccccacatctcagacgatgggcggcccggcagagacgctcctcacttcctagatgggatggcggccgggaagaggcgcttctcacttcctagatgggacggcggccgggcagagacactcctcactttccagactgggcagccaggcagaggggctcctcacatcycagacgatgggcggccaggcagagacgctcctcacttcccagacggggtggcggccgggcagaggctgcactctgggcactttgggaggccaaggcaggcggctgggaggtggaggttgtagcgagccgagatcaygccactgcactccagcctgggcaccattgagcactgagtgaaccagacacygtctgcaatcccggcacctccggaggccgaggctggcggatcactcgcggttaggagctggagaccagcccggccaacacagcgaaacccgtctccaccaaaaaaatacgaaaaccagtcaggcrtggcrgcgcgcrcctgcaatcgcaggcactcggcagggtgaggcrggagaatcaggcagggaggttgcagtgagccragatsrcagcagtacagtccagcttcggctyggcatgagrgggagaccrtggaaacagagggagagggagaccgtggggagagggagagggagaggcagagggagaggcagagggagagggagagggagagggagagggagagggagaggatcagtgtttttttaaaatgtttgtcttgatccattaatcagtctgaggtataatcgatctttgaaaaaagaaatagaagagaatagagtagaatagaaaatacagccatgcactgcataaccatgttttggtcaatcacaccacctgtgtgatggtggtgccattacaaatataatggagctgaaacatttctgtctcctggtgacatagtagctgtcataatgtcatagcacagtttatttttttttataaatgtagcctaaatgtatggtgtgtttagtgtacagtagtgtatacagtaatgtcctaggccttcrtwttcactcaccacttaatcactaactcacccaaagcaactttcagtcctgcaagctccatttatggtaagtgccctcttaggtgtattggtttttatcttttatattatatttttactgtaccttttctatgtttagatatgtttagatacacaaatactattatgttacaattgcctgtggtattgagtacagtaacatgttgcacaagtttgtagcctaggaacaataggctgtaacatatagcctaggtgtgtagcaagctgtactctccagctttgtgtaagtacactctatgttgtttgcacaacaaactcacctaacaatgcatttcttagactgtatccctgtcattaagtgacacatgactgtgtcagtgtgtatcacacatattaaggataagatttgatgaagttttatattcttttttctcctctctatctctgtctcacacatayatcatgcatgtatatgttctgagttatgatgtatttctttctgtgggtgagattttaaaagttcagtaaacattggattagatgaaattcatgttacaaagttaaagatactatactagaactgattgtagaaaagatacagattaaattatctttgcttaaaatacaatggataagaaagacatctataaaaattaataaagcaggctgtgacaggttttccaacaagtactgttgaagaaatccatatattcaagttttttcttcttcaagtttttaaaccctccaaattaaataagtatgaatttatcattttgaaaaatactacctatcttacttttatctatgttacttatatcttttgagattgggcctgggaagctgtgaatccagagttggctcctgtaatgaaaacagtggacaccgggtatgtggagaaatataaaccattggatgtgtgtctgttactaactgatgttgttcttctacgtatatcttaatttctcaatttgaaagcaaactattaatatttaacaagacatattcccttgaaaggcaaataccacattcagtttctcgtcctctgagaagtcaagattctgtctttaactctattcaatcaaatactggaagaagccagggtggttggaggtgagtctacttaaaatttctttcttcttctattccttctcattttcctgtcttcctcttcattcttccctcctccttcacttcgttgtttctcagacagaattacatttaggaaatttctataaataacaactatggcagtattaattatgttttatgaaagagcttaagagaacatgcatgtaaaacttaaaaaatatgtaaatttcacagtgattatgcttcaaaagattcttaatatgacaatgaaatttctgccaatattcattgctatgaatttatgattttgcttatgggttattaatgatttaattgacaatagacaggaatcatatcttagtattgattatatttaggacttgagaaccaattagagtgctcagtcttatcctgtaagacagccggcttcaaggtaaacagaatggcagaagaaagaaaaatggaggctgtgatgcatatgcatctgcaatagtaggggctcaagaaatgaagaagctggtcaaaaagatggtgagggttcttgccataaggaccaaagcttaatgtttaaatagtatgaaaaaattgatagaaaaagaacatggatttctcttggttggattttagtagccttggataaatggcaatatagaaggaaatgattttggaaacaaagtgctgggaaaacaacaccaaatcagtcactgttaagtgctttgatatgttatttcaataatccttacaacaaccatatgaagttaatactattctcatttttattatataaagatatcgtatttttttwaaagggggaactttttatatagttgttaataaatacattgaaataatatctttatttaaaaattagttttgattttattattcatgctagtttccccaggaccagtcygtcagtttcttcataacaaggccttaaaactaggcctgttcagtggtttgggatggttcttagagacattgttccaactgcaggagctagaagaaaatccattctgacaagcattagacagataattaggtaaacagattgtaatctggacaggcagccagtattggatattacaatttgaattaatacatgagctgtcagactgttggaatacaacaggaaatccaggagtacagaacatttaaaaatccatgcaggcagttggtaatctgctgaagatcttttgaaccagttaaaggactaatcttcaggtttagagtccaggctacagttgccagatttagcaaataaaaataaaggatgcccagttaaatytgaatttcaggtaatcaggaattttttagtatgtgtcacagccaatatttgggacatacttataccaaaaatttgttacttacttgaaatgcaaatttaactggccatcctgtattgtttctagcagcctagtctatactttcttggggcatggagttttcaagagcaaagtacactcctattcttatagatactgtgttattagayacattatcaatatagatttcattcaccagtattaggatatggacaattagtaagattagtaaggatgagcttctttgccaaagcccctacaattggctttagactctgaggagacattgagcttgtacttttagtagttaagacatctcagttgaggagttgaggtgatatgaggacttttaacatttttaatcytttttttttttttttttttttgagactggatcttgccatgttgcccaggctggagtgcagtggcatgatcatagctcattgcaaccttgaactcctgggcttaaacaatcctcctacctcagcctcctgagtaggcgggactgactataggtttgcaccaccatgcctggcttatttttacatttttagtagagatgaggccttgctgtgttgcccaggctggtcttgaactcctgggctcaagtgattccctcacctcagcctcccaaagtgctgggattacaggcatacactattgtgctcggtgagatgaaggctttagaagctgagaactgaacacaacctggcaaacgggttcagataaatgcataaattttaagggaagataaggatattatttttttctaaaataacttactattctcattatgaaaataatagaataattctagaaaaaaggtaaaaagaaaattattcatagttgcactgatccagagttaatcattaatttatttttgaacagaaaaaagccatttcaccttttttgagtcttatgtctttatcsatgggaaaaaaattgaactagatgatatctaaggttccttcagtgckcaatatatattgtggataaaacacacagttctgatgtatttatataactttgtgctgtcttgtctatcattaccaagaaaacccttgattaaggattttacaaatacatgaatttatctaacgtgcttgtgtgtggaatacttagaatgcctattgctctgattcacccagaattgttttcttataacacatcatgtctttcaaccattcttgttacacagatctattataaaagtttaataatataaaatagtatataacttaagtcagtaattcataaaaggaggtggcaggcccccaatatccatataactaaatttttaaacttttagatctccttcaacttgctcaggatggccaaagatatgaggaatattttcttttggactttatttgcctctggaacactctcttgacagtctcatcyttgttaacagttctgactgcagttgaatattgtatttctattgttatcttaaaaaaattttaattagggccagatgcagtggctcacacctgtaatcccggcactttgggaggcggaggcgggcggatcacttgaggtcagtagtttgagaccagcctggccaacatggggaaaccccgtctctaccaaataaatacaaaaattagccaggcgtggtggcrcatgcctgtaatcccagctacttgggaggctgaggcagtagaatcattggaacctgggaggtggaggttgcagtgagctgagatcctgccactgcactccagcctgggtgacaaagtgagatcttgtttcaaaaaaagtattttttaaaaaaaattatatatatttaaggtgtacaacctgatattttaatatgcatatacatagtgacctgatttcagtcaagctaattaacatatccatctcttcacataattaccatttttttcttgtagtgagaacacttaagatctaccttctaagtgattttcatctgtataacacagtattattaactatagtcctcatgctctacattagatctctagaatttactcattctatgtaactgaaagtttgtaccctttgactgacatcaccttatttctcccacctcttcacccctggtaaccactattctacgctctgcttctatgagtttgatttgtaaagatcccacacattctttctgtgtctgacttatttcacttagcataacatcctctaggttcatccatgttgtcaaaaatggcaggatttacttctttttaatgtctgaatagtattccgttatctctttatgatacatttgttagtccatttatctgtcacttgcattgtttacgtatcttggaatttttttttttttttttttttttttgkgaartttcgctcttgttgcccargcagtggcaacaagacaatgtgagtgcaatggtgtggtcttggctcactgcaacctccacctcctgggatcaagtgattctcctgcctcagcctctcgagtaactgggattataggcatgtgccactatgcctggctaatttcgtattttagtagagatggggtttcaccatgttggccaggctggtctccaactcctgacctcatgtgatccacctgcctcagcctcccaaagtgctgggatcacaggtgtgagccaccgtgcctggccctcttggctattgtgaataatactgcaatgaatctggaaatgcagatatctctttgagatactaatttcatttcctttggatatacatccagaagtggaattgttagattatatagtagttctgtttttaattttttgaggaacttccatactgtttttcataatggctgtatcaagttacatttccaccaagagtgtacaaggattgccttttttctgcaccctcgccaacacttgttatcttttgaatttttgatgacagctatcctaacaagtgtgaattgataatatatcattgtagttttgatttgcattttcctgctgattagtgatgttgagtacctttttatatacctgttggccatctgtgtgtcttctttasaaaaatgtctatttaggttctttgcccatctttaaattgtgttgttttttgttactgagttctgtgaattccttaaatattttggatattaactacttawcagttacatagtttgccaaaattttctcccatgctatagattgccttttcactctgttgattatttcctttactgtgcagaagctctttagtttgatgtagttctcaaatatttmcttttgcttttgttgactgtrcttttggtgtcatattaaaaaaagtcatttgcaagaccagtgtcaaggagcttgttctctrcgttttttcctaagagttttatggtttcagttcttacatttaagtctttaatccatgttgagttgatttttgtatatggtgtaaggtgagagtycarttccattattctgcatctggatatccagtttttccaacactatttatggcagagactttttttctcattgtgtgttcttctcacttttgttgaaaatcaattaaatgtaaatgcatgggtttatttctgggctctctaytctgttgatctatgtgcctgttttaataccagtaccatactgttttgattactgtagcttttaggtataacttgaaatcargaagtgtgatggctgcagctttattctttctcaagattgttttggctattcagagtcttttgtggttccatatgaattttaggattgttttttctatttctgtgaaaaacatcattgaaattttgatagggattgcattgagtctgtagatcactttgggtagtttggacatttaacaatatcaattcttgtacattgattttgtatcctgagactttgctgaagttgcttatcagcttaaggagattttgggctgagacaatggggttttctagatatacaatcatgtcgtctgcaaacagggacaatttgacttcctcttttcctaattgaataccctttatttccttctcctgcctaattgccctggccagaacttccaacactatgttgaataggagtggtgagagagggcatccctgtcttgtgcccattttcaaagggaatgcttccagtttttgcccattcagtatgatattggctgtgggtttgtcatagatagcccttactattttgagatacatcccatcaatacctaatttattgagagtttttagcatgaagggttgttgaattttgtcaagggccttttctgcatctattgagataatcatgtggtttttgtctttggctctgtttatatgctggattacatttattgatttgcgtatattgaaccagccttgcatcccagggatgaagcccacttgatcatggtggataagctttttgatgtgctgctggattcggtttgccagtattttattgaggatttttgcatcaatgttcatcaaggatattggtctaaaattatctttttttgttgtgtctctgcccggctttggtatcgggatgatgctggcctcataaaatgagttagggaggaatccctctttttctattgattggaatagtttcagaaggaatggtaccagctcttccttgtacctctggtagaattcggctgtgaatccatctggtcctggactctttttcattggtaagctattgattattgcctcaatttcagctcctgttattggtctattcagagattcaacttcttcctggtttagtcttgggagagtgtatgtgttgaggaatttatccatttcttctagattttctagtttatttgtgtagagatgtttgtagtattctctgatggtagtttgtatttctgtgggatcggtggtgatatcccctttatcattttttattgcgtctatttgagtcttctctctttttttctttattagtcttgctagcggtctatcaattttgttgatcctttcaaaaaaccagctcctggattcattaattttttgaagggttttttgtgtctctatttccttcagttctgctctgattttagttacttcttgccttctgctagcttttgaatgtgttcgctttttcttttctagttcttttaattgtgaagcattcttatacaccaataacagacaaacagagagccaaatcatgagtgaattcccattcacaattgcttcaaagagaataaaatacttaggaatccaacttacaagggacgtgaaggacctcttcaaggagaactacaaatcactgctcaatgaaataaaagaggatacaaacaaatggaagaacattccatgctcatgggtaggaagaatcaatatcgtgaaaatggccatactgcccaaggtaattttagattcaatgccatccccatcaagctaccaatgactttcttcacagaattggaaaaaactactttaaagttcatatggaaccaaaaaagagcccgcatcgccaagtcaatcctaagccaaaagaacaaagctggaggcatcacgctacctgacttcaaactatactacaaggctacagtaaccaaaacagcatggtactggtaccaaaacagagatatagatcaatggaacagaacagagccctcagaaataacgccgcatatctacaactatctgatctttgacaaacctgagaaaaacaagcaatggggaaaggattccctatttaataaatggtgctgggaaaactggctagccatatgtagaaagctgaaactggatcccttccttacaccttatacaaaaattaattcaagatggattaaagacttaaacattagacctaaaaccataaaaaccctagaagaaaacctaggcattaccattcaggacataggcatgggcaaggacttcatgtctaaaacaccaaaagcaatggcaacaaaagacaaaatcgacaaatgggatctaatgaaactaaagagcttctgcacagcaaaagaaactaccatcagagtgaacaggcaacctacaaaatgggagaaaattttcgcaacctgctcatctgacaaagggctaatatccagaatctacaatgaactccaacaaatttacaagaaaaaaaaaccccatcraaaagtgggcaaaggatatgaacagacacttcttaaaagaagacatttatgcagccaaaagacacatgaaaaaatgctcatcatcactggccatcagagaaatgcaaatcaaaaccacaatgagataccatctcacaccagttagaatggcgatcattaaaaagtcaggaaacaacaggtgctggagaggatgtggagaaataggaacacttttacactgttggtgggactgtaaactagttcaaccattgtggaagtcagtgtggcgattcctcaaggatctagaactggaagtaccatttgacccagccatcccattactgggtatatacccaaaggactataaatcatgctgctataaagacacatgcacacgcatgtttattgcggcactattcacaatagcaaagacttggaaccaacccaaatgtccaacaatgattgactggattaagaaaatgtggcacatatacaccatgaaatactatgcagccataaaaaatgatgagttcatgtcctttgtagggacatggatgaaattggaaatcatcattctcagtaaactatcgcaaggacaaaaaaccaaacaccgcatgttctcactcatagatgggaattgaacaatgagaacacatggacacaggaaggggaacatcacactctggggactgttgtggggtcgggggatgggggagggatagcattaggagatatacctaatgctaaagatgagttaatgggtgcagcacaccagcatggcacatgtatacatatgtaacaaacctgcacattgtgcacatgtaccctaaaacttaaagtataataataataataaaaataaataaataaataaaacaaaaaacaatatcaattcttcaaatccatgacacaggatttttcatttattttgtcttcaggttttttttttttaatctgttttatattttttagtgtatagacctttctctatcttggtcatttattcctaagtattttattctttttggtgttattgtaaatgggatcattctcttggtttccttttggaatatctattgttggtgtaaagaaatgctcctgatttttgtatgttgattttgtatcctgcaattttactgaattcattttttagttctaacagtttcttaatggagtttttrgggttttctacatacaagatcatgtcatctgcaaacagagacatttacttcatcctttccaatttgcgctccttttatttccttttcttggctaattgattggctaggacttccaagactagttgagtattacttgtctgaaatatttgggatcagaaatgtttcagatttttttgtagtttggaatattttcagaatacctaccagttgagtatcctaaatttgaaaattcaaaatctgaaatgcttcagtgagcatttccattgagcatcatgttgttgctcaaaaagtttcaaattttggagcatttcgagttttggattttcagatttagaatgcccagcctgtaactatgtttgaatagaagtggtragagtgggcatccttgcgtcgtactggatctttgaaaaaaaactttcagttttcccccattatgatgttagctgtgggaattttgcaaatgacctttattgtgttggagtatgttccttctatacttattttttttagagtaaactgaatggatgttgaactttgtcagatgctttttctgcatctatttttgtctttaattctgctactgtggtgtataacattgattgatttgcgtatgttaaaccaaccttgcatcccagaaataaatcccagttaatcatggtgtataattttgttaaaaaatatttcaactttcactttaaatataagcggtacatgtgcagatttgtytacatgggaatattgtgtgatgctaaggtttgaagtatggatcctgtcacctcacccatgaagtgaacagagtactcgacaggtaatttttttgatgtgctgttgaatttgccttgctagtatttattgaggatttttgcatgtatgttctttagtgatattggcctgtagttttctagcagtgtctttgtttgattttgatatcagagtgatgctagtctcataaaatgaatttggaagtggaattccctcttgttttatgaaagaatttcagaaagattggtattaatttgtctttgaatgtttgatagaattcactgtgaagtcatctggtcytgggcttttctttgttgagaggtttttgattacttcgttaatctccttattattggtctgtttaggctttctrcctcttcttgattcaatcttggtaagttgcttgtttctaggtatttatccatttcttctgtgttatccaatttgttgtcatataatgttcataatagtcctttatgatcttttttatttctgagaaatccattgtatgtctcctctttcatttatttaaatcttcttttttctttttttagtctatgtaaggggctgtcgactttatcttttcaaaaaaataagctcttagtttttctttttttttctttttgagacggagtctcactctgttgccaggctggagtgcagtggcacgatctcggctcactgcaacctccactctcgggttcaagcaattctcctgtctcagcctcccgagtagctgggactacaggcctgccccaccatgcccagctaatttttatatttttagtagagacggggtttcatcatgttggccaggatggtctcgatctcttggccttgtgctccgcctgcctcggcctcccaaagtgctgggattacaggtatgagccacctcgcccggtcccagttttgcttttttttttttttaattctctattttatttatttctactctagtcttattattgcctttatatgcttattttgggcttagtttgttattctttttctaattyctttaagtgtgaagttaggatgcttatttgagatctttttatttccacttrggcattcattgctataaactccccttagtactgcttttgctttcccataagttttggtatgttatgttttgtttctgtctcaataattttaagattttcttttttaattccctctttgatcaatgattgttcaagagggtgttgttgtatttgtgaattttttcattttcttttctgtttttcttttttttttttttaattgagacagagtctcgctctgtcgcccaggctggagtgcagtggtgcaatctcggctcactgcaatctccgcctcccaggttcaagtgattcttctgcctcagcctcccaagtagctgggactacaggtgcatgccaccacactcacctaatttttgtatttttagtagagacggggtttcaccatgttagccaggacagtttcgatctcttggccttgtgatccgcccacctcggcctcccaaagtgctgggattacagacgtaagccaccatgcctggcgaatttttccattttctagctgttattgatttctagttttataccattatggtcagaaaagatacttggtgtgattttgatcttcttaaatttgttaagtctgtttttgtgacctaacgtgagttatccttcagaaagttccatctgtgcttgagaagaatgtgtagtcttctgctgttggttggcaaattccatatatgtcttttgggtccatttgatccatagtgttgttcaagttcactgtttattgatttttctgtctggatgatttatctattattaaaagtggagtattgagctttcttttttttattatgttgctgtcaatttttccttttagatttgtcaatatttgctttatatatttaggtgctctgatattggatgtatatatgttcacaatttttatgtcttcctattgaatttacccatttatcattatataatgactttctttgtctttagaaacaacttttaacttaaagtctattttgtctgacataaacttagccacccctgttttctttyggttgctgtttgcatggaatatstttttccatccctttattctcagcttttatgtgtctttgaatctaaactgagttcattgtagacagcatacagttggatctttaatccactcagcctctcctcatataggcataccttattatgttgcactttgctttattgcacttcacagatactgcattctttacaagtcaaagtttcrtagtaaccctgcattgagcaagtcgattggtgccattttccaacagtatgtgctcacttcatgtttctatgtcacattttggtacttcttgcaatatttcaaactttttcattattattatatctgttatgatgatctgtgatcagtgatctttggcattactacaaatgtgctgaacagagagttgtaaagctgaaataaatttttctagactatgaataataaaagtaatttctataaccatgagagtgaggaaagacaaaattgtgtttctgttctctttattgaaaataaaattacaaaattgttgcgtgtgatggtacgtacctgtagtgccagctactctggaggttgaggcaggagaatcacttgtgcccatgggtttgagactggcctgagtccaaaaaaattacaaaattattgtcgtatgaagaagtgatcagtgtaggaaaaaatttctataaaggagtatcaggcagttaatttataataattctaacaatttttttctgggtatcgtgatgtttgtggtgtttataacttaaattgttgtaattgtgctttcttttctcgttattttgtactaactttgtacccaattaacagtgttccccaaattatacaagcttcagacctcataaaacttggatttgttcctggtcagcagtgtacctagacctctttttggattatttacctaagtaggggatgggttgtattggtkgccctcttgtgatacttgtggtatttccaggaaaattactgagaattaagaatttgtgggctgggaatggtggcttatgcctctagccccagcactttgggaggccaaggaggtggatcacttgagcccaggagtttgtggccagcttgggcaacgtggtgaaaccctgtctctacaaaaaataacaaaaattagctgggcatagtggcactcacstgtagttccagctactcaggaggctgaggtgggaggatcgcttgagcctgggagattgatgctagagtgagctgtgttcttgccattacattccagcctgggtaacagaacgagaccctgtctccaagagaaaaaaaaaaaattcgtgacttagactagttttgtttcctgtggaactcctaactaggctgctcagaaattatgcttttgattttggcctcattagcatctagcataatgttctggtcagctgatataacacacttaatgttgctgacaaatgctgtaccaaatacattatagggcttttaagctgtgcagtaaraccacaaaatttctaatcaaatattaatagctatctatcctgcttatatgtattctccttrtgatttaaaatcattgctaagccacagtttaacttcttaaaattttactttgtagaaaattttaaaattgaatatataaagaagcaagtaaatgccctcaaagtcttaccacttggatacaactactatcatatgaagaatgctatcatttaaaaatatactttgtagtactagactctgagttgggagatcttgtatttcctgggttctagacttgtgagtaatttcctgtatgactttggacaagttaattcctcattagggatcagtcttctcatctggaaagagaggtagtacaacattgtagggttgttgtgatgtatttggaatttctcagtagttagttataaagtgctttctaagtcataaattgccatataaatgaatttttcattattaattttttttgtaattaagaaaccatatagaaacaaatgctttttttttgcactattacagctacasagatggtaacaaaaataccagcttgaaaacttggaataaaaatgattttaagcctcaatgtaaacgaacaaacttagtggcaaatgatggaaaaaattcttgtccartgagttcgggagctcaacaacraaaacaattaagaayacctgaacctcctaacttatctcgcaacaaagaaacygagctactcagacaaacacattcatcaaaaatatctggctgcacaatgagagggctrgacaaaaacagtgcactacagacacttaagcccaattttcaacaaaatcaatataagaaacaaatgttggatgatattccagaagacaacaccctgaaggtaaatgtttaaatacaaattaatgacttatttacatttttaaaaatatgaggtaaatatttagaaaactacagagataagagcgcctgaaataaattccatgacatacattacttgattagcataaatattcagttccattgaagtggatgaatgttagtttccaaaatattttcttagagggtatgaatggctgctccttttcctttcaaactttagagttttctgctggattctgactttcactttacactcattttaaagataaagacagtttatccattgtttatgaagttacccaggctcttgatatgtcattctaagtatttttcaacagaggtcagcaaacatttttcttaaagggccagacagtatttttggctttatgggccgtactgtctctgttgcagctactcagcaatactactcaactctgccactgtagcttggaagcagccataagcaatacataaatgaatggacactgctctcctccaacaaatgtttacacaaatagatagcaggttagatttgcactgcaggccatagttttctttatgatcaacttattatgacctttgctttatgatcttgtcctagtctacctttgtagcctcatatttcatagtctactaattgtccaatgctctagccacttcagactcgtcacaattctctaaacatagcatacactctgtgctttggtttatattcttccctatacctgtatctcaactgtacttcctctctacgctcagtgctctrattgctctttgtaaatgttatttatatattatgtgtgctggttattcctcatctctgctccctggccccttggcccacttgattcttcacctgcccttctctgttgtggaaggctgaactgtcctatgtagtgcatcatcctgagattgtttacttgctggcttttgctagaggtcagccagtaggagtcactggtacgacatcatagggtgggaggaaaggttgggttttctcactttctcctgtcttaaatgttacatcaccagcagtggctgtgtcactgcatgatgtagccccttcatgagtatagctttcctgggcgtgatacttttattttctcctcttgtcctttcagcctaggaatggtaacaacttcttacagttgttagtttttgttctgcccttatgtctgaaaaagcaatcttttcaaaaagccatcggggtaaaatttgtttttgcatgttttgttttttgttggaaataagattaataaagcatgtttcacagtggttctcaatcttatgtttccttgtactcaagaattatatgacataatcaccttagtaacagtggtttactgtggccwtcatcaacaggaggcatgttagaatcttcgttaagcgggggaagagggaagaaactacctgtattttgaaaaaaggtcccatcatatgttcttcacaaccctcaccctcacaaaggaaagcgtccccttgcctttgaaaattagtattttaacacactgtattcttagttgatcttcaaaaatgctaagaacatttccatctcagggcttttatacttgctgttcccactgtcctcattcaacaacccacttaaaataataacccccatctctctctctttccatttaccttgtgtgtttttttcctaaaaaaaargtacatttcctgacattctgttatatgtttayttattttttaaatcctccactagacaataaaatcttcgaggacagatatcttgactgttttgtccatgaatttttcctaaatagctatgtttggcatgtagtaggtgctcagtaaacacttttgaaacgaatgaatgaatgaatgtgtctggctccttccctagagtcccctagagtgtgagtgcactagggaaaggaatggccttacctatatttgtcacaggatctggcatatgatgctttaaaatagtcaatgaatgaatgagtgaatgaatacctatataaataattctcctcttgattgtctctaagtgcaccctggtttctccatctgtaatatagtattgatggccttattttagggaagtaactatactaaaattttcagtagttctttttacacacttgtccattgtaaggacttagaatttttacgtagaaggtaaacgagtatgatgaaaaaaacaaatatttttctaatactatgtttcttattttttcaaaaggaaacctcattgtatcagttacagtttaaggaaaaagctagttctttaagaattatttctgcagttattgaaagcatgaagtattggcgtgaacatgcacagaaaactgtacttctttttgaagtattaggtaggtaaaatactttaaaaatacttcagtaatactctctggaggacaggttttaatgtctgattagtcctttttcttccaaataaaacagtctgctttttgctactccctaaagtgtattcaaagaactggttttaataatagtccctgtggtagatagaataatgctccctaaaaatgtctacattctaattaccagaataatgcaccctaaaatgcctacattctaattaccaaaacctgtgaatgctaccttatatggcaaaagagactttgcagatgtaattaagttagggatcttgaaatgggaagattatcttgtattatttgggtgggttcaatgtaatcacaagggtcccttatacaaggaaagcattgaaagatgctaccttgctggctttgaagatggaggaaggggccatgagccaaagaatgcaggcatctttgagaagttggaaaaattaaggaaatagattttactctagagcctccaaaaggaacatggctttgatgactcattatagacttctgacctccgtaactattaagataatgcttttgtgttgttttaagccaaccactaagtttgtggtaatttgtaagcagcaatgggaaactgatacagcctcctccttttccttttgtcctgttatatatatatatgtaaatataaatgtgtgtatatatagatgtagatttctatcagtgcagtcatttcacatgtttaactttcacctaaaaatgattccagtttctctcttgttaccattaaggaaaaagctttattatataaagtgacattggattcaatagagactcagactttgagtaaagcacgctgtattcattttcaattgctgcgtaacaaagtaatggaaacttagcagctaaaaaccacacccacttcttaactcaagttttgtagatcagaagtccatgtgggcttgactgcgttctatactcagggtatcacagtgctaaaatcaaggtgttggctgggctggttttgttcagttttcgtttttggctttttggaggtttccatgcctctggcctctggaactcccatatacttcagggattctttatcaagtcctactcatgttgcttgaagcatatctcttagctggttggcatgactgttactactctgttgaagcttgacttagctcttattttgttcagttcttaccagtagccacgtaactgcaatagcagatggtattctatttcatgtcagttttctgtcagagctagaatactgtcagaggtagaacatcttatttcaaagatcttaacccctgttggacttcccactaaattgctttttcctgtgtgaaagatgcctttggctctcacctcatttacagaatataaatattaaaataacctgagcctattaaaaggacatgctgattccattcatttccccaggttctctttggtgagttgttcaggttcactccagaataatccttttaagaatatcacaatactcattataaacaccaatagacattcttatcaagaaatgaagggggtccatgcttttatatgtgatggttagctttcatagtgctataataatcctgagttcctaggctagactctaaacttatcaaaggtagatacttcattttactacactttagtgtctagcacactgcactgtatataggaagtatcttccagttgcaagcaccccccagaaaaaaacaactttagtggattttaaatactcatttatattgctatgtataatattgtgttgcatagagaattattcacgcaactgaaaagtggctaggtttctgacttcaggcaaagcttgatctagctgctcaagagatggcacagtgatttctctccatccttctggccagtcataacgttggcttcatcttaaggctccacactatagtctctccagaagcttctgactctctccttatggtagcaagttgattattaaatttttgtagactatacattcttataccacaccgtcatattcttagatttttcttctgattgctctttcctacaaactaacaaatgagtctttgcatataaccatttctgacttggtaacatgcctattgcagaaaccctgaactacgtagttgagtaataaaatatgctgattggattaagtcagtcacagttcactcgtggatctggggatggggacaaatcctatccaaataatatggctaaaaatggaattttcctgaaggataatctgggtctttttagcagaaatggaggccagcctcaaaataacaaatgcccactaccagtactcagtagatggttattaaataaatgaataatgctgtcacttcataatagtttcttgagataaacatgaattacaatttgcgttttataggtgaagaaacagatttgaaagtggttaaacaatttactcaaggaggagggaatagggagatgtaggtcaaagggtacaaacttgcaattatgtaggatgagtaagtctagagacttaatgcacagaggaggtctatagttaatattattgtattgtatattaaaattttggtaagagtagattgtaggtgctcttacacacacaaaggataactatggaaggtgttgggtatgttaacttgctcactgtagaaatgatttcactatatataggtatatgaaaatatattgtatgtatatgaaaatatgttgtataccttaaatgtatataataaaaataaatttaatacccagtttgctcaaagtcacaaaatattagtaagttgaagtacctgggacctgaatgcatgtctcctgattctaattcaatgtttcttttttcattaaattatgatgcttatttgttacacatgtgcattttattattataatgttgtagactgttctggggatttaaccactctgtactacacattctaaggaaaaagtttcagatggccatttattgtcaattgtatgagcttggcmtataatctgttcctaagttggagagagtcagaagttttgttttcctacctataaaactgcctgagaaatatcttctcttcttaaaatgtcttctttattgctatataaatagcactatgagaggttgatatggatagttatttaaacatcagcttctctttgttaaattttatttgcagtttaccaacattcattttttcccccatttcaatattgcttagctgttcttgattcagctgttacacctggcccatattattcgaagacttttcttatgagggatgggaaaaatactctgccttgtgtcttttatgaaatcgtgagtatttttaaagtactctttgcgaagcctatgtcaacagaatataaacatgcaggctataattcagttgaaatataaattctgttaacaatttagtacttttaacactggttttagttctgatatgaaagttgtttatttttataatatagagagcctactacgtgctaggtactgtgctgggtttgagggatataaagtggaatgtaaatggcaaatggctctttctctcagagtttgtaatcccaggtagaatggtacagaaatgttacactgtgatatggtgaatggcttggtggagctaggtatgtgcagggtgctagagaagtaggtargaaggaaggggcagatcagggaaagattttcaaagaaggtggtaacttatcctagatctttaaggactaataagaatcaactaagccaaaatgtgttggggagggaaagaaggatatagtctaaggtgagggagcagcatatgcaaagacttgaagctaagagagagcttcacttgttcagggaactgaaagtagttataattaccaaagtgaagagttaggaactgttaggggtaagggtagtggttctgaaagtgggggaaagcatagtgggctgggatataaggaggcttggtgacatagaagtgtggagattgcaaaggaggctatagacctacacacattgaggctgtataagagctacataaactttgtaaaagtttgaccttaattctgacattggcctcaattctgaaatcagacttggattccagcatttactccaacattttctagttttatgacttaagaaagctgcttaaattacttgaacttcagatttttaaaaaatataaaatggggagacaaattcctacttcgaaaggttgttaaggggattaaatgatgaaacatgaatatacagtgcatgacacatagttgatgatcaagaaataattgtcaattcctataatatcttgaatgtgtattatttttatctagtctgaagttttttaaaaaaactttgttattgcagtataacatgtacagaaaagtataaaaatcataactgtacagttctgtgaagtatcacaaagtgaatgccaaaccaggttaagaaacagaacattgtcatcaccccccaaatccctttgtgcttcttcccattcactacctcttgtcttctacttacaggtaaccactagcctgacttttaatgtcatcaattcattctgcctgtttttgtactttataaaaatagtatcatacattatgtctttttaaatatgtgatttcctttatttgacaaaatgtttgtaagattcatctatgttgttgtgtgtagctgtagctcactcatttatattgctatgtataatattgtgctgcatgaatatgctacagttttctatttcactgttggtgggcatttgggtttctggattttttgctgttatgcataatgttctatgaacattcttatctatgtctcttatgcatttgcatgtatttctrtttgatatatactcagaagtaaaattgctgggtcatagagcatgtgtatattcaaatacagtagatattgccaaagaatttttcaaaggattgtgtcaatttaagtactcacaggcaatgtaggagagttatggttgctctgcattcttacgaacgcytagtattgtcgatcttttttattataacaattctgatgagtaaatttagtgttatctcatttctttacaattccctagtgagtaatgaggttgagtaccttttcatatgctatttagatatcttttttgtaaagtctgttcaggcatcttgctgttttcttctcttatttgtctttttcttactgattctaggaattaaaaagaaaaactattctgggaatcagttttctgtccattatgtgcattgcaaatattttctcatatccatggtttgctttttcccacttgatgatggcttttgataaacagaagtttttcattttcatataatccttttatcaataattagtctttccccttataattagtgctttttgtgactatttaatgaaagcaacttcagaatgctttaattttattcataattgagaggatttggagaaggctaatctttttctgatttacttgtctctaaaggcatcacacttttgggtcccaaccttaagcttcaggtctgagtgggggtggttactagaatctcttttccttggacgcctaagattccatttttttgtttcccacctatacaagtctgtgaaatctctgcycagtttcttagactctcaaatgcttttctgtaatttgcagacatctcagggagaaagcacaccccaaaccaggtttcatctgagactcccatactatcctagatggggtgtgagggggtctctgtaattcctcactgtcttgatatctctctgatgcttacgaggagatttttaacaaaacatttcatccagctatcctaattgtcatctgatgagctgttttgagtcacccagtctgctgcctactgaaagtggaactctgggaatctgataaaagagtggrtaatttcatgtgtcattacactggggattattcagtctttgatgaagcaacaacttgctagcttgtaagagccctaccaagtgagggtctttcctctgttacagggtaccaatatgtgaataactatcattgtcttgttagcagtggggccctgactcacgtraaggaattatagcattttgaggtggcacatgtttagttgatcacataaatatttaaaaaattgaaattcagatgaagtaataactattttttgatacttattttttgaaaaacaggatcgtgaacttccgagactgattagaggccgagttcatagatgtgttggcaactatgaccagaaaaagaacattttccaatgtgtttctgtcagaccggcgtctgtttctgaacaaaaaactttccaggcatttgtcaaaattgcagatgttgagatgcagtattatattaatgtgatgaatgaaacttaagtagtgataaaaggaagtttagcataaattatagyagttttctgttattgcttaatttaccatctccatagttttatagctactattgtatttcacttgttgaattaaagtatttgaattcttttaaatgtggaaagagtttttgaagtataattttaatgtttttattaaaatggtatatttgctaaaattccacaaccatcctagataaaaatgctcactgtaacaggaatagatgatgcttatttaatatgggataataatacatctgagttagctcaaaagccagcattgggcttaagggggaaatactacaggtatttgcactatcaggaaaaagacaagtgtacccactgtcactactgttattaagcattgttctggaactgctagtctgtgcggttcatttaattacttcaaatatttaatgaaaatctgctttgtgccaggcattgttgcaaatgctagagacagagcagttcacaaagtaacaaaaattaggggtgccagaaaggttggtgtgctttgaaccaggagcccatgtatcatcatgtttctctcatagccatgattcacaagtctggaaatcaaggagtggtagtagggctgacttcctcattattagaccaactaacatacccacagaacttttgctccctacccccacaattttgggctctgttgattaacagatcttactttctgtcatagcctaggttacccaaaaagtggagactgagaaaaagtcttatttgtaagtagtttatttgagaattttacctcatgtgaagaagtaaggaatagagggggtgttaaatagggaagaagagagaccagttactaggatgacttattgagttggcagccactaggagggactaaggcatatatgcataagctcccaatacctgtatttaagggttgaccaacacggcaacaactcccttgcactttctggttgtgtatgtatgagcattgggctggttttccatgatattctactccatggaatcagaggaaccatatggcaggacacaagaagcagatggaataggcctgagtaaaactgtcagaccgaatctatgtgaagctggtcaaaggctgcacagaattggttattgcaaccatggctggaataagagaagatggctgagagaatttgaagtggtggacaagaagtgtctgatacaattcttaaggaagaagtgtctgatacaattcttaatgttttaccggaagtgcttccatggttctagtctactgaaagttgagactgccatttggcaattttggttctttatgttttcaaatcagtaggcaaagaaggggtttactgtactgcctgtggtacttcaatcccagttaacaatggaaaattgtgtttctctgcataatgaggaaagggaagaccatatctgacatgcaggggattcttctgtatgtcacttagtaaaagttaatggaacactattatagcaacccaagaaaaacaataacactgaggattcagactcaaaaggaatgtgggttgaatctagctgaagttatgtaaaagggaacatggaatgggtgtggaagaaggagttgtaaatgtcagttgtggtcttgtgatcagttgtagggtaaggaaaagctagtaggaggtaatatgacacgtgaagagtggttgagataatgatggtgtctggttattaaggttttcctagagaggtaaggagctagaagtaactcagagggctgcaaatatggatttacttttccatatttgcctgaggaagaattgaatgtgatccgggagagttcatcttttctcttattcctgtcctttatatctgtatatggttggataatggaagtctgatccttgttggttaccatttttctctctcctagggcctatttacagggagttgggttatagtaagagattctgccacctggaaatatttccaaagcatatgtctttccctggtggtcctctattcaaagaccactgatggcttgttgttgtccacaggataaagcctaaactcttagactcttaagatgttttaggacatttacagtctggtccctgcttgcttctgtgacttctccaaccatttttcttcacttctcaagatgtaggccccaacctcacaggcatgctctccattccctaagcaggcaatgattaaacacccatccctgagcttctctccattctcatgatcccccgatcccccaaagtatagtaaggtgtgatcaacagctgtaatcagtcactgttgcaggactctaagataatttgttctagagacgtcctgtgtaattactttgtttttaatgagttcctccaggatctaggcttctccgggatgcatagtccggtagggccagggataggtagaaagagagatgtcagaagggtgagtacagacacaggtgatgactacaaaggctgttgcaaccaataaaggggaggaggattttggatcagggccctggagttaacctcagacacagagtaagttgggcaggagggtgaataagctggtagcttagcatccctacaacctgagggtcttgatttccccagttgtatgatgttctataggatagtttttcagatataactttccttttctccacctctctgcttttcaagacttttctacgttccagaaatattttgatttaatgttcacaacttaatatctttttattaatgacagtgtccattaatactatgcaatgtcctctctcatgattgtatcatttcaacataatgacatctctatgagataggcatttaatacagagatttcaagccctcggccatatatttgaattacttaaggagcttacttaaggccccctccagagattctaattacatttattgggggatggtgccgtaatctgtatttttaaaatgtattatatgtccttactactcagtgtggtccacagaacagcagaattggcatcaccaaatgtgaaattttaactttcgaaatgtagaatattaggccctacaccagacctattgaatcaaaatcagcatttaacaagaccaccaggtggtttgtatgtaaattaaagttttagaagcagtgacctttgtgattcttatattcagtccagactgagaactgtagatttaccaggtgaagaagatgagaggcattattgagggagcagctgaaatttatattcccgatcagtggcagcattcacaagtgatgtctctctggtttggaatttctaataagacccttgacaccagagattggtcccactcatttcccaggtaggcaaacttctgagagaacaggcatgtgaaacttcacttgatgccatttccctactacaatactagcagattatattcaaatgtgaaaaactgttaacgtggctagactaaacatcactagcagggtgaagatcccgacagactcagctacatccctctagggaaggaacttctcatgtaccctaacacccttcagctttcttagctcagaggcattttgaggtatggatatctggagaggaagtacagcgaggtctcaagggtggatatcctcgttccctttctccccaaattatagaaactttcagatacaattcttcatgtcaacataactgaaccatgtagacatcaacaccaaaaccaaaatgacagtgtcaacatgcataatgggctgtctttttaaaataaagagtagggtggttggatggtctaacattttccataggtctgaagtttatctcagaattttgtaataaagtgtcaaaactagcactaaatggttaaggctagtgaattcttattctgggaggatttaataggagtcgttaaactacaatgggtgttggctgctttaaagttggaggggccgggcgcggcggctaacgcctgtaaccccagcactttgggaggccgaggcgggtggatcacctgaggtcaggagtccaagaccagcctgaccaacatagagaaaccccgtctctactaaaaatacaaaaattagctgggtgtggtggcatttgcctgtgagcccagctactcatgaggctgaggcaggagaattgcttgaacctgggaggcggaggttgcggtgagctgagatcgtgccattgcactccatgctgagcaacaagagtgaaactctgtctcaaaataaataaaaaataaagttggaggagtgtatgtctcagcctgaaggacagccaacaaatactaatgaaacattggccatatccaggcaccatcccagttgctggccttggtgcagtcacgaaggcagtcatggccttatctgtatggagtttacaatttggtaggaaactcagctataaacaagcaatcaaggtcattgaatgctgctggatgagtacaagatgctgtggaaacttagaagcaggtctcacctggtctgagtgattgagctgagccagtgacatgtagtaaacctgcaggagaagcaggggtatgccaagtaagagaaggcagaggggccgggcgtggtggcttacgcctgtaatcccagcactttgggaggctgaggcaggcggatcatgaggttaggagatcgagaccatcctggctaacatggtgaaaccccatctctactaaaaatacaaaaaaattagcctggtgtagtggcgggtgcctggagtcccagctactcgggaggctgaggcaggagaatggcgtgaagctgggagacagagcttgcagtgagccaagatcgtgccactgcactccagcctggacggctgagcgagactctgtctcaaaaaaaaaaaaaaaaaaaagcagaggtaagatgttacacagaaggaacagcaagtgtgaacgtctggaggcaagaaattatgacttctaagtctagcattgctggagaatgctggagaatgctgatgcaagagtcattgtgggaccagatgaggctgtggaggtaggcatgggtcagataatgaaatatgatttgtgtccttgaaaggaattttgtgtatatgttaagaataatgagaatccataaggactctgagcaggagaatgatgatcagatttttatcttagaatgccacagtgtgtggccgggcacggtggctcaggcctgtaatcccagcactttgggaggctgaggcgggcagatcacgacgtcaggagatcaagaacatcctggctaacacggtgaaaccccgtctctactaaaaatacaaaaaattagccgggcgcgatggcgggtgcctgtagtcccagctactcgggaggctgaggcaggagaatggcgtgaacccagcaggaggagcttgcagtgagctgagattgcgccactgcactccagcctgggtgacagagcgagactccatctcaaaaaaaaaaaaaaaaaaaaaaaaagaacgccacagtgtgaatggattgaaggctagtgagcatagcagcagggagatgaagtaagagactattccaatagtccagacaagaaaagatgtcagcctgttccagattgtggcaactgggataagcagtgggtgaattagaaatagaatgaagtacagaatctatataacttgctaggattagatgttgatcttgagagaaataaataaatgaaagaaaactcccaggtttctgacttgagcctggattccttttactgagatatgagagactggaggagcaaattggaagagtggcagggtgagataacgagtttcatctgggatctgttaagctgaggatggtcatgatccatagggagataatcaggaagcaactgctaatgcagtactaatgatgataggtttacccaggaagttcagatggtaatcagtgtcacggggacaggtgaactctttcagggcttgatctgtagaattagaacagaatttaggaaaaattcccagaaaacagcaacgtataagatactgttagagaagaaaccatttacagttgttaagaaggaatggccaatatgtgtcaggaaaccagtgtgattgcacggaagctaatagataagagtgttttagaaagaaaggaggagtcaatcttgctacatgttatgcaaagtgagatggatcagtgtgaaaagtagcgtggattttgtgatgtggcacatttctgattatagaaataattatagaaatc

SEQ ID NO: 96325 - DNA, 13155 bp, Homo sapiens
attttacttctctcctcctttttcttttattgtgttatagggaatgctgatagttatcacacacaatttagctcatagagtacaggaaaatgagataggctcatgaccaaatagaaaaaaaattgagatctgggatttgcccctagttgaagttgaggagtgttctgtttggccgcttttgcggaagggtgagcattttcacttacatgagggatggtcattatttgccaggtgctgttatattttacaagtatgaggagaatattgagagtgaaaggggtggactatagcggacatttgttttgatcatccagcttctcatttggagacatctccaccgtgtaaggcagaaatcaattcccacatctcaaattacagaggcggaaaatgccaaattcttgcattttcagcctcccttgcagctaggcatgggcacatgagctaggctctgccagagatcatctctatttttttttattaaacagagatgaggacttgctatgttgcccagactggtcttgaattcctggccttaagtgattctcctgcctcagtctcccacctccctcccaaagggattacagggcatgagccactgcatccagcctgcccccaactcttaatcagaattcagagaagccaagaagcatgaacaatgtagattagttacagtgagggtggtagttgcagggccccatctagtcagggtccagggtagggtgggcctcagtggtgtcaacagttcacgccgtgctctgtgcttaggggtaggggggttctcagggaccaggtctgagatgggattttgacattgttactggccacaccagtttattttttattttcatttttgttcttttgccacaccactttagaagcaccaccatttctccctggggtatgaagctgggagaggggaggggagagagaattcctccctttactcacaattgtctacttggcattaaatgaaaagatgcaagttaaagcctccaaggcatgaggcttatttgcaacaagtattccatcagaatcttgggctgactgttgggtggtaaaaggggcagtatgaaggtcaacagatgggaaggggatggagttccagctggagcaggtttcaggttaggccagaaagccatcagttgtgatgcgatacctgcggagctccagggcagtgcagaatttggcacagtggttcttgtggtctatgtgaggaagcatggtcagtactgctaccttgcatagctccggggggcctcctttacattgccgtctatggaggaacagagatggtaaaaacataaggttgtccatggagccacctggctgagtgatgggctgcatgactcagaaactgggttggggtggtggctggaagatggcgtgtttccccacacccctgagaggaaggaagagggttgcttatccatgttggagagggccagggtaaagctgaaccctactaaaggaaagcacacaatgcctgcgccaagaccaccacgcagcagaggaccacacaggacgaggctggggaccccacatgagcagtcctcccctcctcacctgtcttgttgtggggctctgggggacaacaaggcctctgagagagaggacttggacttctgtttagaattatgataaaatatgacttcgactacactatgcactgaattatgtcagctcccaaattcatatgctgaagccctgacccccatggggtggtatttggagaagcctttggaggtaggttaggtgaggccaggaggatggggctctcatgatggaattagtgtccttacaaagacaggaagagatgcaggctccctgttgtcaccatttgaggacacagcaggaagatggccatttgccttctaggaagagagtcctggccaggaaacaaatttgctggcatcttgactttggactccctgcctccagaactgtgggaaataaatatctattgcttaagccacctagtttatggttttgttatagaagcctgagcagattaagacaactgcatgcttattcccagagaggcaattttaataactggatttgattacagaatcatttgaatagggccaagtgcaatggttcacgcctgtaattccagcactttgggaggtcgaggcaggaggattgcttgaagccaggagttggagaccagcctggacaacaaagcacaattccatctctctctttttttttttttaataaaaaaagaaatcatttgaatggattaaaatgtaaataggaatggcacaaaagaaaaggcatttaccgtggctgattgaagtgctcaggactcagaaatgtctgcatcattttgagaataaaggtttgtgttcagacatagctgcctgagactcttcagactggttacacatgtccccagtgttagaggcccaaagaacaatctcaccattgtcccatttctaattcttgttggtagcaccaacatccacacagttgcccaacttatgaaatggcctcatcccctgtttctccctctgcacacctgccaggtctcaactcattacttttctttttaatcatgtctgggttgtgatcacttcacctccatcctcactgccaccatctctcctgagaactctgctgctgcatcccaacaagtcttacctggttcttcctctggtttgggtaatcatgttgaaagtcctggggcagcctcaaggaaaattccggagacttcctggatcctaaaaggaatccagaggcttagagactaaccaccaaaggttacaagggcagtcacagatgaggactggcctgtataattagggggtagggttctgggatttctagaagtttgttatctgtccattcttactcaagcggttcacgtacataatggatgggtgctgatcctgtcaaaagctatcagtgctatacttcaagacggtgggtcacagccaggcatggtgactcacacctgcagtcccagcactttgggaggctgaggtgggcagatcacccgaggtcgggaattcaagaccagcctggccaacatggtgaaaccctgtctctactaaaaatacaaaaattagcagggtgtggtggtgcacgcctgtaatcccagctaccccgggggttgaggcacgagaatcacttgaaaccgggaggtagaggttgcagtgagctgagattgcgccactgcactccagcctgggagacagagagagattctgtctaaaaaaaaaaaaaaaaagtgggtcagtcttgcttaaatgacagaattgcatttgttcctgtatactgggtcttgagtaaggttaactcctcatgaatcagccctttagtagatctgaagtcaaagaatatgcaggggaagctgctaattgtgccctaataataatttcttcttcaataaaagcctcttgaattcagcctgttgaattttggctgtgtactgccatctaggataaagactacctttcctaacctgtcttgcagcacagtgtatccatatgattaagttctggccaactgtttgtaagtcagagtagtgcatgaaattttgaggaggtatacttagagggaaagggcattcttttgtttttcttgctggaatgttgatgtgatgattggagctggagcagccattttggactatgatgtagaagctctgtgttgaggacagtggagtgaccagattggaggaaactgggtccccagtgagtggtaccagctctgggctgctggtgtttatgtgagacagaaataaaccgttttgcttgaaccacctttactttgactttcagattcagaatttgatacctgaagacaaaatgctgcaaatagtatctaaaatgtggcagtggcttagtggaattggtgggccagcagatggcaaagatacaaatattgccttttgtgtaatggctaaacattgatgaaattgttatctgctactgggaatgtggaaggtggactacattcagactgaggccacacacagcaagagaaaatggtgggaggatgcaagaagtgtgaatgttgctccttgttgcttttcacagtcctatacatgagatgaactggggctacagccagccagcttgcagagatgggaggtgttacagttgatgtttgtcttctccaaatctcatgttgaaacgcattccccaaagttggaggtggggcctaatgggaggtgtttgggtcataaaggtaaatccctcatgaataatgtcctccctgaggatggggtgagttctcactctcttcatttcggtaagagcaggttgttaaaaaaagcctggtccttctccccgctctctcttgcttcctgtctcatcatgtgatctgcacacactcactcccctttgcctttcaccatgagtggaagaggcctgaggccctcaccagaagcagatgtgggtgccatgctttttgtacagtctgcagaactgaggcaaataaacctcttttctttataaattgcccagcctcaggtattcctgcatagcaacagtaagcaggctaagacaggagggactcttgctttgctcagagaggtgctgtcaatagctgcactcaaagttgattaaagtcttgaagcactgaaaatgacaactgcttttgtccttcaaactgcagctattaagcgcagtggccttgaagtggcagtcttagtgcagataaggcttctctgccagaaaatgcaaaccaggttgcttcaaagaccagactaagggtgttgctcccacccatgcttctcttttaggcagcctcaaggcaaccacgtttatgtcgaagaggcagaagcagagcagatcttccgctgtgagtagctgatggattctattgtctaagaaatgcatgcctggtcttcctgaaccatgaaagtaaccctggggactcccccaaaactgcccaaggagtaagcagcctatagaagctgtggtggaccaggtgcggtgcctcatgcctgtaatcccagcactttgggaatgccaacatgggaggatcacttgagcccaggattttgggaccaacctggtcaactcagcaagatcctacactccagcctgggcaacagagcagattctatgtcacagaagaagggcagccaaagggttgagcgatggcagagagcactaattgtccctcaaacctattattttgtttctcagatagaagccctgaatttgttaggcacatggtttcctggaataaaaatgaccttccctctactctcttccttgcagtaggtatggccctgtgacaaagttctgatcaacaggatgtacaatacccaggtggcacctcctccagggagggatcatgcttttctcctccccttgcctccctcctactagctggaatgtgatggagctgtagactgaggatggccgagcaacaagtggggaggaatgtgggaccctggtgaccatgaagccaccctggcagccctgcaggacaaaaggtgaacttgtactatgtgaaagctactcgtcaggatggtggaacctaatttgggtatagaatttgccacaccaggtgatataattttgctgtgtcccccacccaaatctcaccttggattgtaataatccccacgtcaagagtggagccagggggagacaactgaatcatgggggaggtttcccccatactgttctcgtggtggtgaaaaagtctcatgagatcggatggctttataaatgggagttcccctgcacaagctctcctgcccgccaccatgtaagacgtgactttgcttctcattcgccttccaccatgattgtgaggcctcccccagccccgtggaattgagtccattgaacctctttctttcataaattacccagtctcaggtatgtctttattagcagcatgagaatggactaataccccaggacaaggccaagatgggagttcatgctcctgaccagagggaaggtggagatgagcagagagcactctcctccaaaagagttgatttctaaatgaaaggaaaaagcaaacacaaataagaaaagatttgcagaaatcaattagaataaaaatgtcaacagacaataacagtgttgcatagcttgaacatttttatattgattaaattgtttttcagtagaatcactgacagaacaggtcagaatgaaaaacattccaaatatacagaaaaaagattactgctcagttaaggtccttttccaaataacttcacacaaatcctttggttgctccaaacagaatgagagctatgagaatggtggyccagcccggccatcagactcccaagcatttggtccccggtctgaggtcacagaatctttgccacctttaccgagactgctctcagctgaggacaacaggcaagaaccagaaggtggccatccttgtctttgcattcaacagcgccaaagtctgagggacaaactcttggtgacaagtctcagaaatgtgacatgtctctgtagcagccataaagctttggtttaggattaattttgattctctggaatatcagcctcccagaatggcaaatcttgacctcatctagtccagcccaaccttccctttttacatataagaaaactcagggttgagggcaacatatcttgcctaagtccaggtctagacccaagccctgcctctcacaatctttccccatttctgctgcctctttgttgcctctggaggatgaagagggctttttcgcttgccctcaaatgctcatttmtgaggtaccccccccagaaaaaggtcaggtagcaacacagcagcaatagtatccacactaatctaaaagcatatttaaatatgaattactgtggtaggaaacgaaagacaactgtgtgatccaaccactgccccctaaccaaagttgcatttttttcttctggaaagtcaaaacaccaagtgcaggttctagagggtgacaccagcagggatctctcatcttgattaaattggcacatcaacatgtttaattagatctttcagaaagtgccagaacataggatgtaaatgtcttctccattcatatgcagccaaatttcccaggcaaaatacttatcctgattctgatgtagttcttcacttaggactaaaaaaaggcttaagtataattgcttaagtgtataaggtggtgaaacaggaatcttgagctacggattttaagtggtaatagctacaggatttacttgaattgtttgctcttttaggtaattctcttgtcttgttcttcccagtatttcctggatttgttcctggcaacctcgctgggtctgaactgctggcctgcccagtggcagaagactgcttgcaacctttggtaggctttttagaaatttatgtgaccgtaatggctgcatttctgcaaccataataaacaatttgtttttggaaaaaagcagtaaaacacccatctccaaagacatttagactactttgcaagcattttgcacacagggtgatgatgcatttttaccaaacagtaataacttgctaaatatcctaatggcatttaaatttttgccagcgttccctccatccccctttcttggagcttgctgaatttttgtgagtccagattattttgtgctcttgttctctctcttctagaagagcattttctattttcctctcataaaaacccagttaggctgggcacagtggctcacgcctataatcccaacagttttggaggctgaggtgggaagatcacttgaggccaggagtttgagaccagcctaggcaacacatcaagatcctgtctctacacacacacacacacacacacacacacacacacacacacacacacacacacacacacacacaagccaggtgaggtggcatgtgcctatagtcccggctactcaggaggctgaggtgcgaggattgcttgagcccaggaatttgaggctgcagtgaacaatgatcatgccactgtactccagcctgggcgacagtgagaccctgtctctaaaaagagagacaaaaatccagtggattctatttttgactgatgtgtttttgggctaatcactgataactaaacttttctaagtaactcacccacagcagtgtctgttgctgttctagccgataaaaagtcacatgaatagcgtgatcttattcaatcctcatgttccaactaaagtcctaagtattgtttctattttacagataatgaaagagaggtagagcttctaagcaaccaggcccgcaagtagttagtgctgagtgggcgtaggaactgaatcccctgccccttagctgcaaactttctggtggtttcttgttttcaatatggggttatggtactgtgtgacatctccctcccacctctgccatttagcagtaaaatatccatgtggaaaagaaacaaagtatgcaagtaaatatgctagctctagagataaagaatctcccatataggtcttcatccgtcttgctaccagcaaactattcaattggcaccgaatttgctgaatatcaaaatggcttcatttatgtgcattataatatgaaaacatcttttctataaataccattaagaacctggctttacttcctcttctgagtacataaaaaccgctgttcaaaaataccacattaaatgtttacacaatttattttccttaaataataatttgctacaatcctgtcacaaatttaaaaaaatttaacacggtattcacaaaggcagaattctttaggacaatcaaaatgatggtgttcttagaataaattaacatcagattgtgtttatattcagatagtctgatcctctcctttgaaatgcaatggagaccattgtgactgggggtgaatgcacacatttgttcttccatacagagactcattctttatatatactcaacggtaatttgaatcgttaggaatcctgagaaacactcacccctgggcacacacatgtacacagccccacggccaaccctccagaagctgggtttcccatggttcaattactagaagctcttttctcagaaggccaaacattcggaatatttagatgacactgtcccatctccccttgggaaaatcataaggtttcaagtggaggagcttgaagtagcagcaatacatgtaggagattcagtagtcggtgattccagtcctgggtgctgagtgtgcagtaggaggcaagcagaggcaagagacacacctgcttctacaactaagccacaagatgaccagaacacactgagagtaccagttctcagagcctcagctgaaaattcacctgaatgcacattactaatccaggttaggcaccaagagggaacctgaagagggacacaattctcagaaacatgaatattggaagtcgctgggagatgggacaaagggagggagggcagagaggtgttgctcagccttcagcctgacccccagtgccctgccatctagtacatacgtcagggtttccttagcatcagggcgggtgaatctgaattgttccagctccacctagaagcacagaaagctcagcccttacagtctgacacacagaaacaaacaaaacatccaaatgacccaagataaccacaccatcttgttgctgggaggacaacagctctgtgggtgtccggtctcaattgctccaggatgccgacaggggtgtgtgtggtgatgttagggaagaaggcattaggacaggccccaaactgagatcctttttgtatctttccatagaaatacaggcctaaatgatgccataattgcatgcttatctacaccagttcctatgtacacgatatcttttctatagaagtttaaagtgcctgggttcagaggtgcccattcctttcccacagctactggttcctcttgctgcttccagagaggtctgtcctcctctttcaaggaggatgcccttgggaaagaggaatgaactttttcacagttgtcttaactaggatccagcatttggactaaaccttcttcatacacacgaagaatcgcttcacacacaaacttgtactggctctggaaaagaaaaaaatgctgtcaagtcctgtagctccaggaaatgctgcctaccacaccctgtaccggtgggtcttttgcagcatttgtaaatattccctgagcgccaactctgggccacaggccaggtacacctgtgaagccctagttcctatatgatgcggggagggggcactcccagagaggggtgggcaaagtgtcatggagacatgacagagggagaaactggcggtctgggggaggtgggaaggagcaaaagtccctgcgggacagcccttcttgtaagtggaagtgtggaagcctcagtaagagcccattttgagaaacggggtcagggagcctgctcctggactcaacacctaggcatgtggaggaggaggggctgcacaggtgggctgggacctggttgtgggcaccttgtgttggggtaaggagtctggattgtgttttacaaagcagagccactgaaagatgctctgcaggatacagttatttatcttagcaaatacctaagaaacatattgtagcaaagtatacaggggggataaaagcatttagactgagcttctccagctaggaaaatctatctatctatctatctatctatctatctatctatctatctatctatctagttttcaagacagagtcctgttctgtcactcaggctggagtgcagtggcgtaatcttggctcactgcaacctccacctcctgggttcaagcgattctcctgcctcagcctcccaagtagctgggactataggcacatgccaccatgcctggctaatttttgtattttcattagagacggggtttcactatgttagccaggctggtcttgaactactgatctcaagtgatccaccttccttagcctgctgaagtgctgggattataggcgtgagccaccgtgcccagcttccagctgggaaaatctaccaggatgatggacttttttctttttaaccagccacgaggtcttccataccaaaaaacagggcagagaatggccctaataacataagctgattttttttctcttaacaagattttctgggtacaaactaatataaaactaccaaagcttaaaaatttattagggaaatcttataaactttgtccacagcctgtgaagagacagagctggttggaacatatagttcctgctcctttctttgctaactcctcatgtaccctgggggtttttaccagagaagacacttctccaggaagccttcctagactttccaaatcctgctttagatactcttccaccatgttctcagacagccctgaacttccctcaccgctgctgacacttagcatagactaatccagttctcctactagatacaagcctgtctctgcacccttctttgtcaaatgaatgaatgaatgaatgtgggatggtccccattttgcacagggaagctgaagcttggagagaggttcaggacttatgcaaaggttgttccatttgtggtgggaccttaatcatgctctttccacaccgcttcactgccccgcttgcagttccaggggaaatccccaagagttatcccctagagttcctcttgaggacaagaggatgttgcacatgaccctactttgagctctggcctgcccgtggaggacacagcaggtactcaggcaccacacgggtggaacagagctcaaagtagggtcatatgcaacatccactgagccaaaaggagtacccaggtctaggtgggtcggtgcgggggaggataatggacaaatgattgttcaacgatacagaatgcaaccagggctgctccctgacagacgggctggcaggaaataaaccacagaggcagcagagctcagaggtgagatgggtgtgggctgtagccactgacaagctctgtgaccttgggcaagtgattcagtccccctgagctgcagtctgttgactcacaaagcccttctctcaggcctgcctggtgtaagtgctcagaaagtgccagccaccgtaattactggatttctactcactgatgtctgcaccatcatggcgcgctggtctcgcatttttcggacaatatccagtgggtaaatgggcaggttcctctcagttaggcacatggctgtttccatagtgaccaacacaccggttcgacctattccagcactggagaggggagagaagacagacttgggatttgtctgagtagcctttctgcatggcccagcgagcagttccccgctgactccaaaggggctttcctcccttggccttcgagaagacaaaacgcacactcacggcgtgctctcaaacaggctgagacagcctgtcctcacacatctgagactgggggctagcaggcagtggaaagagggccactgtgaagtgccaaacctattccctttctcactcacacctatgacgaaggtcagctgacagaaggacaggagaaagggtgtgtgaggggattttcttcttcagttctgtgctacattcacaaagttaggatttcataaaattccaaaaaacttttgaaatggtgaagaaccacagtcaacagaggtttgtaagggcacacgactttgtgggatgtagggtgggtctggcgcctgccaattgtctccaggccttttccgacagggaaaggattccaaacctaacaaaacagcaagcgccatacctgcagtgaactaggacgggctcgctgtccactctcagagacctcacatagtttacaaattccagaaagtcggaggagtcatcgggcacaccgtggtcaggccatgcgacgtactggagatgtgtcactgtgtgttcttccccggtctgtgggagatgcagtggccttggtgagcccatccaggtggtgagcatgaggacccagccccaacccagacacagggtggccctgtctcctgatgctttctccctctgcgcacagccctgctgtggcccctagcaattcctcccctccttccccaaagatccccatcccctctcaggctcagctgtgggcctgtcctgcagggctgccttccttgatcacttctgcccagtgatctcctctgcccagtgatctcctccatttgctgctatggtacttgccattagaggccacacatgctgactgtttttttttttttttttcaactgtggcaaaatatactaacatgaggc

SEQ ID NO: 96326 - DNA, 24979 bp, Homo sapiens
  misc_feature (1)...(24979): n = A,T,C or G
cttttatctccacctggaagtccccagggtatctcaaattctacatgcccaaaatctaactctgcctctcaaaacagttttcttcctgtattccctatctcagaaaacagaatccagctgcacaaacaggaatcctatgaataatccatgacctgcctctctttcacatcccaaccccagtcaatccatttcaagtcatcatgagttctagcaactaactatctctatccccttcttgaaatctctggctattatcctcctagcctaaaccaccacagtcttccacctggaataatccaactatctcccacttggacttcacatacaatcttctcctcttcaaatccattctcctcagtgctgccaacagataatttcaaatgcaaaactgaatatgtagcccttatctgactaattagccatgccccaaccctgcttaaaacacttcagtttctatagctcttatcaaatctcttgccttggcctacaggacctgcatgatttgacccctgcctatctctcagtctcatctctaccattattttctttgctggtctttctgtttcttgactcttccattcttatagacctttgagtatgcttttcccactacctagcaaactcctttcaccctcttcacttccctccacgtcctttcacctacttatccttcaattcttggttcagtgacactatgccaaatctccctattattaaatgttctcattgaaccatttgcctttccttagcattgaacacaactgtaattttataatacagttgcctcttgaacaacacaagtttgaacttcacaggttcacttatacgtgaatttttttcaacaaaaggcaatggaaaatgcagtatttgagagatatgaaacctgggtatacagagggccaaccttttcatataagtgggttctgtaggtctaactttaggacttaagtatgcatggatttttggtatatgcaggggccctgaaaccaatacccagattatactgagggacaactgtaatttgtgattgtttcatcaatgtcaatttctcctatcagaccaaaagctccataagggcagaaattgtgtctttttattcactatcaaatcacgaagacatagcacagcacttacaacaggtgttcattaaatatttgcagaattgattatcaaatacttttttaaattttttatttattattttatttatttatttttttttggagacagagtcttgctctgtcgcccaggctggaccgcagtggcgccatctcctcggctcactgcaagctccacctcccaggttcacgccattctactgcctcagcctcccgagtaggtgggactacaggtgctggccaccatgcctggctaattttttgtagttttagtagagacggggtttcaccgtgttagccaggatggtctcgatctcctgacctcatgatccgcccacctcagccttccaaagtgctgggattacaggcgtgagccaatgcgccccgcctttttatcaaatacttttaagaagtaaaaaagaatgagggctgagcaagacgattggagctgactaccaagatcactggtgacctttgaaagtacagtttgaatatactgatgagggtagaatccagaatgcagggacttaaggagcaactgagcaaacaaaatagggaagagagaatggacaaaaaggctgacagaagggagcagcagtctcaagggaaagctggttattttcattttgttattctttatgccattattgttctgcctccaatactgagaagacttaaacagagaagaattgaaaatattagcgacaggatgtaattagtcagacaagggaggactatagttgaaaagtttgtctgaaaatgtcaacaaagaggtgaggtaagcaaagatatcataaaggagtggttaacttggccgggcgtggtggctcacgcctgtaatcctcacattttgggagggaggccaaggcgggcagatcacctgaggttaggagttcaagatcagcctggccaacatggcgaaaccctgtctctattaaaaataccaaaattagctgggcatggtggcacgcgcctgtaataccagctactcaggaggctgaggcaggagagtcacttgaacccgggaggcggaggctgcagtgagtcgagatcgtgccactgcactccagcctgggcgacaagagcgagactctgtctcaaaaaaaaaagagtggttaacaagcatgatgatacaaccagttgaaagcaatatttgagttcataaagaagttgatgagttgataaaccaacaacacctaattggggaaagcataaggaagagagctgtgttgcaatcaaaaggtaaggaagccatattcaactacactgcttagatgtaatcagcaaaatccagattgtgggagattgtacagggccaataacctggttccttcaacaaataaattgcaaggaaaaaaatgagggagaaatttaaagaataaaagaaacttaaagaacatatggatttgacatatcatgtggatttgactggatcctgacccagttaagcaaactttaaaaaaagaaagacaagtagaaaattgaactctggatatctgatgatagtaagaaaatatattaactactttaggtgtgataatagtattatgttggccgggcgcggtggcgggtgcctgtagtcccagcactttgggaggccgaggtgggcgggtcacaaggtcaggagatcgagaccatcctggctaacatggtgaaaccctgtctctactaaaaatacaaaaaattagccgggtgcggtggcgggtgcctgtagtcccagctactccggaggctgaggcaggagaatagcatgaacccgggaggtggagcttgcagtgagctgagatagcgccactgcagtccggcctgggtgaaagagtgagactccgtctcaaaaacaaacaaacaaacaaaaatagtattatgttatgcttttaaaaggtcctttaatttttcagagatcatactgaaatatttagatttcagatactcagtatttgcttcaaaataatacaagacaaggtatgtggtgatatagaagcaacaagactggtcataagttaatcattgctgaatctggtattgagttcactgggcttcattatgtatggttttttaacatttgtttgaaattttccataacaaatttttaagatgagatttggtttgcagagtaggatttttctctatatactgtattttaagtggtcatggttaaagtttcttgtttaaggtttgaccggggttcagtagatttctgggaaccacaagcattattaaatcagatctaagaaaaattggaggactaagcaatccacaaaaaaaccagggttgggtagaacacaagataccacttgcaatatgaaatattcaggagtagatccttcaagctgctatgtattaaacgttttcaaagatcaaaatttaataaaaaggataacagaaactaattggggctgcacacagtggctcacgctggaaatcccagcactttgggaggtggaggctggcggatcgcttgaggtcagagttcaagactagcctggccaatatgatgaaaccctgtctctactaaaaatacaaaaattagctgggtgtggtggcacacgcctgtagtcccagctactcaggagactgaggcatgaaaatcatttgaacctgggaggtggaggttgcagtgagccaagatcgtgccactgcaccccagcctgggctacagagagagactctgtctcaaaaaaaattaaaaaaaaaagaaaaagaaacgaactgggggatccataaggagaatgctgatgttcaaagctggaagaaaaatgattccatctactctttggtttctaagacagattggagattcaaagccaaagaaaaagtcatgctggcataagataaaacctgagcatattaaatttgctcctatggaaagaaaagaatatatgcactaaaacaaaggtccccaacccccaggccacggacaggcacctaggaaccaggccgcaaggcagggggtaagccgtaggagcttcatctgtttgtacagccactccccatctggcattactgcctgagctctgccttccgtcgcatgaacaggggtgttagagtctcacaagagcgtgaaccctattgtgaactgcgcaagccagggatctaggttgcatgctccttatgagaatctaatgcctgatgatctgtcactgtctcccatcacccccagatgggaccatctagttgcagaaaaacaagctcagggctcccactgattctacattacagtgagttgcataattatttcattatatgttacaatataataatagaaataaagtgcacaataaatgtaatgcgcttgaatcatcccaaaaccataccccctctctgagccatggaaaaattgtcttccatgaaacctgtctctagtgccaaaaaggttgggaccgctgcactaaaggagtgttatgatattgcagatgtaggggcagtcactcaaatctccacaacctacttctgtcatcttccctcctttgttctttccattttcttcctcccacaaattcaaagtgccttagaggtagcacaaaggccctgaggcaaagagggagagtaagagataatacgaagtgtttggaggaaaaggattaaacatttctcccctcccactgaatcctggatttaagaaatggtgtaagatgaacttgacaactagcacctatttgtttaaggtggaaaatgcaatgctcaggactcaagaccagttgaggtaggtttgcttggtattgactaggatattgaaccctgagggcctctcctcttgcttttacagatctcatcctcagcaatccccaagcactagattttttttttttttttttttacaggtacagatgcaaaaagagttaaaacatcgggtttaaaaaaaaaattagtggctgggcgcagaggctcacaactgtaatcccagagctttgggaggccgagggggtagaatcacctgactaacatggtgaaaccccatctctactaaaaatacaaaattagccgggcatggtggtgctcgcccgtaatcccagctgctcgggaggctgaggcaggagaatcgcttgaacctgggaggcagaggttacagagagctgagatcgcgccactactctccagcctgggcaactgggcaacaagagggaaactccgtctcaaaaaaaaaaaaaaaaaaaaagttgagagtaacaccatgtgaaggagacaggcacattccaaaagaaaacaagtgcatgtcggagcaaggcagtcggtggctggagcacagttagagtaacgtgggaggagctgtggagacgcagccacgggtcacgccagggccctgcacaccatgcagaggaaaggaagagctcagtgcgccagggtttcatacagccgctctctcaggccccaaggaaacgtctagagcgcacaggcggactcaccccagactgttcgaaccgtccctgagcgcccgccctcgtctcccggcaccactggccccgcagcagccagttgagaagggcggaggctgattccaatgaagtggcagaccgttaggcggcctctccaaaaagccagctatgtcgccgttagccaaggtttgagggtcttctccttctcttcgagggcccaacctcccctccagatttagtacaccagaggcgtcgcagcaacggctgctgcctgcgcgcctcagctaggcgggctcggatatttttaaggccacattggaaatcccgggcatgctcccgccggcggagaaggcccagacaaaatgtgcgccaatcaggatacagacttggaggacgtttaccctcaggaccaataagagggagggcggaccgggccaagggtgccggttcgctctccggatttaaacctcagcggtcggcggttaaccgcaggctcggcgcgtgggccggcagtgcgcctgcgcaagttacgcgaaagctaacagaatctgcggtgctctgctggcgactggcaggacgcggtgcagagagcggacttccgcgacgcgggtaagccgggcgaaggccggaagcggagggacgcggggacctggtggctgccggcccactgcggcgggagccctcgctccttttcccaccgtcgggacggtgcagagtggcagcttccctccgtggattccaggtcctgcctggcgagccgtccccaacgtctgcgttcctgagggaggcggccggggcagcgtragctacaggcgatgtgcgcggcgggccgcagcccctggaggtcacggtgtgcgctggccgcygccgcggtctttgccccggtggcctttctgagctcctgggccgcgcccctgggaccaggcggaggccggggacggccccagggctggaggggagtcccgaaggccgctagcgacctgggtccaagccacgcccacggccaggcggggcgactgcgagctttgccgttgaaaggcggagcgtgtcttgtcgccttctagctgcaccttttgtggactgcagcatggaaccgtccaaggtgtttgtccaccccgaaatggaaataaatcttttttattctaaacagtatacaatctcactaagcaggcaaagaaaaacattaagatatctttttagattggtaagatttttcagtaccccatgctgctgaragagtgaagaaatgaaagcaagcacctttatggcctgtgtgctggggataatctgtttttctagagggcagtttggcattataaatcagaattcaggccgggcgcggtggctcacgcctgttaccccagcactttgggaggccgaggtgggcggatcacgtgaggtcaggagttcgagaccagcccgaccaatacggtgaaaccccgtctctactaaaaatacaaaaattggccgggcttggtggcgggcgcctgtagtcccagctcctcgggaggccgagacaggagaatctcttgaacccgggagggagaggttgcagtgagccgagatcgcgccactgcactccagcctgggcgaccgagcaagactcttgtctcaaaaaaaaaaaaaaaaaagagaaaagaaaaacataaatcagaattcaagtagtaccataacttctaagtcataatccaattccaggagtttattccaaggacataaatcggacaagaatgcaaacatagtatgtacatgtttttagcaatccgagcaacatttagtacgtgtaaagaagaaagaaaatactcgaaatttcatcagtcacagataaccatcaaacactgttcacatttaggtttacttcagatatattcataatatataccttatatttatgtgatttccttataaaatgtgttttaaataattgcatgttacaaatataataaagtatgttaatttaaaagaacgtcagttaagcagattatacattattgagtcagtaataaattgggaacacatttctctgtcagtgtcgatacgcattaccatttttaatggatgcgtggcgtttgttgctatggctgtattgtatcatatattatttaaccagtcccctactaatgtacatttgtttccagtctcttcataatcataaaatggtatggtagtggtcacttgtatgtatacatgtttgcattcttgtccaatttatgtccttggaataaattcctggaagtggattatgacttagaagttgtggtacagtttaaattctgattcaaaatgccaaactgggccgggcgcggtggctcacacctgtaatcccaagcactttgggaggcggaggcgggcggatcacttgagattgggagtttgaaaccagcctggccaacatggtgaaaccaagtctctactaaaaatagaagaaaaattagccgggcgtggtggcaggtgcctgtgatcccagctactcgggaggctgaggcaggagaatcgcttgaacctgagaggcagaggttgcggtgagccgagatcaggccaccgcaactccagcctgggcgacagagagagactcgtctcaaaaaacaacaacaataataataatgccaaactgccctctggaaaaacggattatccccmacacacagggcataataaggatgcttgtttttatttcttcacacacttgccagcaccgggtactgaaaaaatcttatcaatctgaaatgatgtcttaatgcttttatacacattactgaaattgaacatgttttctgtttwytaatttttgttgctgtttagaaacagacgttggctttgtgcccaggctggagtgcagtggccagatcatagctcagtgcagcctcaaactccagggttcaagcggtcctcttgcttcagcccccatagtactgagactacaggtttatgccaccacgcctagctaatcttttttctttttttttgagagatgggggtcttgctgtgttgcacaggctggtcttgaactccttcacagcctcaagcgatcctcccacctcagcctccaaagtgctggaattacaggcatgagccactgcgcccagctgtttgttagttattattcgtttggtacggcatctgtcttttctcccctatcttactgatatgtgtaccctttaatagctttctaagaggaattcaaattactgatttttaaacgtgttacaagtatttctcccagtttgttgtctcttttgccttcwttatggtattgtttgcctttgtggtaggatgttttgttttgttttaatactgtgattctttaagctgcttgcttacctccccagaggtggagaaatttgttataactctgcaatagcctccctrtagcagtctactgacccagtccctttatctcattttraagtctttgccccttctacccttgaaatccttttgattgtaactagctaaccctaggatgctgagtcactaagacttttgaagagaagatatggttaggtatttcggtcaatgttgtctgtgtttacagaatacaagttgctctagcttttatgtgaaagtttccctctaaagagaaaggattgttcgatcttttatattagaaagagaaggaactgacagttacctatggaccttattaaagtttctattttatttattgtttgcaaacatcatcttcatatgttcaaggaaaaaaataggagtgtgacacagttgaaatgcagaggaaataacacattaatcactgtatagtaggacacatgccattaaaaaaaaaaactaactctkggctttactgccaaaaatcctcctagcccagagtctcacaaatcgttatttatgtataaatatataaaaagkgtcatttaaatttcacaacctaaatagttcctttattccaacatttatttagtccttaccakgggccagagacttcggatttgtacaaatgctgtctaagagagcaagtacttttgcaaagttgcatttgggggcttcccatttgttccacctgtgatgactgtcttgactttttctatggcaactaccaaaaatgtagtcactaaattcttactcttctagatkggataatataatctagccagacttgaagggattttacttaagatctaagaccctgatcttctgattcctttgcttctacacagtatcctaacaatgacttatggttagtgcattttgttccatgtatcactgcttcagagttaatttttttaaactctattcttcttttctaggttttttttttacttgaatgtaaataccaatcaagatacattgaaataaggtaagaaattgaaaaaaaaaaaaaaaaaaccttggtttgcacttacatatttaagttattccaccatgatcattgattacatgaaaaagagnatctttaaatcaaaagtaaaggccaaagtaattatattttaagaatactcaggacataatgaagtgttgatagactgggtcccaaaaagcagtgataatgattcaaatccagaagacttggatcatacawtgggcaattttgaataaatcttaagtaatttgtaccactaattccccatctctaaaatggggtattttctggttccctgtctgctaggatataacagctattataatgtactttttagtactacagggtcacctcaccttttgtatgctattttacttcctaaatctggaactgtttcagtgaagtctatttctgtggtccaccccccttctgtagcaattatgcagcattagtttatgatttatatattagtattgtttttaattgtcccatgtgttatttgcactagcagcttgaggatagaaaacatatttgtakacctgaagtcttgaacatgggtaggaaaaaactaattattggttggtaagtaaaactttggatctcataaacatggtagaattgtaaattagaggatcagggtcttagatcttaagtaaaatctttcaaggttgactagattatactatccaatctagaagagtaagaatttagtgactacataagtcaagacagtcatcataggtaaaataaacaagaagccttcaaatgtaagtttgcaaaattactcattctctgaggtggcatttgtaaaaattccaaatgtggtgaacactcactttagtaatgaaaattattattgaggaagaaggtctgagttcaaactttgatgtttattatttttatggttgcaaaggataatgtatttaagacaactctgagttcttttgaataaatactggtgttcacaagtaatattttgaggatcacttattaactttgagaacaagcaaagctctatctcatttttcctctctcagtatgtggtactaccagccactcattttgctcacatctgaaacttaggagttatctagaaagcctccctagttttgaacagcatatttattcactgagtcctgttgtttctactttcttaatcttaaattcatctacttctgtccatttgcctcactaaaaatctcttctaggccattttcatcatctattgcctccattactccagcagccccctaattggtcacagtgcctccaatcttgccctcttcccatccacagaatactcagagcaatatttttgccacacaattctatcgggcatgtaaattttttcagtggccctgcaaaatctaagctttttaaggaatgtctttgctctacaaatgtgacctktgcttacctttttaaactatgttcttgtcactctcaagccgtattaaagaattgagctgcctgaatgcatatgttgtcatctctaaccctttatacaaactggatcttctgmcttagacacatttaaagtggttctttatcctcattttaactggctcccacttgttctgcaagatctagcttcaatatctcctctataagaacttgcctatagtcactagcccaaggcttggcaaacaccatggcccatgaactaagagtgctttttagatttgtaaaggattgtaaaaacatgtatgcaatagaggccatttgttgttgacacagcctaaaacatttactcattaatccttcacagaaaacatttaccaacctctgcactagatttatatgctttgtaagataaggtactgtgctttattccaggtaggtaactttgtgcctggcattaaaccaatttatccaatctttaattaaatgaatttaatattcttaaattctgtcttagaaaataagacactcagatgcagcactttatgaaaattcagatgagtagtgaatatcttatctgctttggagagaaaaacacaacaaatcagatacttgcaggattaggctttaatgaatttgaatacaaggcacaggtttccaggtgtatgtaaatacatctccattttacgttctttaatcgcttaatccttttggaccgggataagagaatatttgaaatttcttattaaagcaataacttccttaatagggctttagtctttttgcttttttttttcttttaagagctgatcatctgaattcctagtacttgcaagtaaattttttttttttyccttttctgtccacctaccattaggtggttcctagatcctggcaaattgtctatggttaaatgatgcttttaatttctgtgtcaacacagaccctcttcgttggtgtctccaaattagtattstcttcctctagtgtgtcattacagtcccttttggcttttgtttcttcctcatggaataaatgtgggtgctcaattcgtcccctacgtacaaaatgctggatccgggattccagtccttggcatttaggacggtccatgaggggcttatatgtgcgcatcttcactccttctacaaaggcactggtctgctttatgacagagggcttaacatttccccattctgtcattccatccatctttggtcctattccacagggtactggaacagtgtccagtccttgtagcatactatacaacatgtgagttttgacagcatgattagcccacagttgttgtaggtgggtaatattgaactcctgagcctcctggtcatagatccacttgacattttcaaacttacagtcatataagactagaggaaattctacagccatactagagaaaaagagaaaagaaagtttgagaatacataacatccatctaacagttctttaaaaactaagggttagttgcgttaagggagcygggtagggcgccaccattgatgttaatattgcctaatagstgagaaaatatctcaccatccctaaccttgaacacctttattacaataatgaaaaatgcaacaaatcatagatcaacctgatctatgtaaggtaaatgtcagtgctaacaagacatggctccatcatactgctataaaattaaaaacagctggtattttttccaaatttgttaatggcattgcaattttgtatagtatgagtaaaattattggtatctatctcagcctgttctcaaatgaaaaatcttgactattctttctttcctaccattttggaaataggaaattaggaaaaattcagaagtacagtaggatgactactcagtgatataaaacaagcaagatttaatatgaatagtttgttcattttaattttaccacatcctaacagtaatacctcttaacataaattcagaaacaccaatgatgtagaaattaatgtctttttacttaaggagcctggtcaaaacacctgcctctttactcatgggatagaacaatgagaggaaattaaaatacactgctccctcttacatgttcataacattctacaattcagagtaaagcttcatgaaggcagaatcagtgacttcgttatttagacagttacggtggagaggaggatatgctatttctttttttttttttttaagacagtctccctctgtcacccatgctggaatgcagtggtccaatctcagctcagtgcaacctccgcctcctggcttcaagcaattcttgtgcctcaagcgtcccgagtagctgggactacaggcatgtgccatttattttttatttttaactcacctatattgaggcttttggggatttttctctatattcagcagctcatcaataatctctggcttctccattccttggccaatcagaaagaggatagccatcatacatcggacttgatgataaaggaatgcctggccagtcacttcaaactgacataactggaaaggttcttgccatctcccctcacctgggctctggcccactagctgtacttgagcagatagaatagtcctctgaaaattaatcacaccgttggctacatccattttacacaagttcctgaaatcatgggtgccaacatacttctgagctgcataatccatggttacaatatctaaatcagcacgagggaaaaaatagcggtaagtccgctcaaggcagctgaacctagcactgaagcttggttctacagrggcccaggccaatatacggatgtctggagggagtacccgattgagaatgtgggtataacggatctcttcagcagcagcattagcctcctcttttacattaaagtcctcggaatccctgccccttggaaactgagagcgaaggtcaagtgagatcacctgtggagttagacaaagatactgggttttagagacacaaataatctcagtactcagtgtgtatacctagaatatcctagtattgcttgctttgagaaacagtgtattggcccttacctgtccaaaggcactaactcctttatctgttctcccacatcggtgatagttggatgtctgtctgctttctactagtcgagtcttggttagagcttcaaacagtttctcttcaatggtattatttgtgttttcctgactagcaaagccctggtatccccagcccatataggctattcttagggctacgtgtcttcggccatgagcactgaaatcaaatgcacgcttagtttttccagctcctgmtgaattttctctaatgtttgagtcctccttatttttggcctgttcctttttaagtctttgcacctcttgctccagttctcgtactctttttaggagcttctcagtctggtttctgtctgtgtcattatmagccatgatatgacaaccccaggaataaacsaaycatacaggtctgccctgtctgaaaagagagcaaagggatacaacagtttcaatgctagttcctttgatgatgttctaatggtatataagatttaatttaatgcccaaagaatatacttttgcttttccaggratacaagcattagctttattgtgggttgatcatccacagatagcattcttttccatcctgtctggccagttcacagagggaaagaactgtttgttattcagttgtcattattaaggtttcattaaagcagtcaaaattcagggagaatgtctatagatttcatttctctatcttcactgaattgattgaggactgatgttasagatttttttctctaaaacatttccatttgatttctcactgtatttgttcaatttgctagtcataagatttctttatatgggctacttttatctgctctgagtttctattgctttccattatctcaaataaatgacttgtatgctccatcatctaatattcattagatgaatattaggtggtgcaatagaagctagcctaactgaagaagcttaccgatggttgtatttcacattggaagtagaagctagagacaagattttctcactttaagcaattttgatgggagaaaaaaagataattaagcactctgacccctttctaaagctgaattaaatgcatattttgataaaagatttctgtgcctctaatagtttaaaaagtcagtctgatgtaatgtagatgtcagtgtagaaattcctgtaatatttcaataatctgaggacaactgtactacatccttaaaattgggatggtcctagacaatctgtgactgatggttactttagttagagaagaccatctccacatctgttctaaggccatgttatctaagtataggtagcttagttttttactatgagtttctgtatctataatagattaaaagtttaaattgtaaaaaatgaaactgaaagtactagaagaaaacatggaatgacttttttctgaaattctggagtaggaaaggcatttctaagcaaaacagtctagaaacccagacactagaaaaagatgtgacctaaaaggaaaaacttctgccagcaaaaaataaaaggcaaatgacaaactgagaagaaaaaaataagtgatggtaaagtgcgaccttcctcaatatatatttcatgaatatatacatcagttttaatgaaaaagtaaaaaaaaaaaatccagcaacctgagagtcaaakgggcaaagaccaagcatttcaaacaaaaagaaaaaagcttataaaaattttttaaaaaaaattttaaatgctcaattttactcagctgagataaatgcaaaaggatatgaactatttttcarggaagtgactgcaaagacaaagtttgatagtataccactttggagagggaatagagacacaagctctattaatgtatggtcagtacagcttctttggaggtaaacattttggcaacagctgtcaaaattgaatatacacataccttttggcccacctctcccatgtctagaaatttaatccattcatatgcttgcacaaatagataaaaacttgcaagatactcgtgttagcatcagtaaacctataaacctaaattacaccagtaagggaatggctgactaaatttatgatacattcatacattggaattccgcgcaacataaaatgaagaatgtcggcctgtgctgatatagctggataaccaagattatctttaaggttcagaagagttgtgtagtgttgtcctttacggtattaaaaaaaaatgtacatgtgaatatggaaaatttctagataaatcataagaaattgcctttgagagtaaaacttggtgggggagggaaaatccttgcttaaaattatcatgtgcatgtattagtttttcagtttaaaaagaaaaatagtggggacacaggaaatagtggacagtagatacctatctcagatccagtcaggaaactagcattgggtatgtggctgattgatgtggataccaagttatttcagacactagaataaacagatttagctggcaactgaagatgcattaaaactaccmagacagctgggcgcggtggctcacccctgtaatgggaggccgaggcgggtggrttgcctgaggtcaggagtttgagaccagcctggctaacatggtaaaaccccatctctactaaaamttcaaaaattagccaggcgtggtggcccacacctgtagtagtccagttactccggagtcttagacaggataatcgcttgaacccaggaggtggaggttgcaatgagccgagatcatgccactgcactccagcctaggtgacagcaagactccatctcaaaaaaaaaaattattaaagcatagaaattatatgtatgcacgtatatacacattatatgtgtgtgagagaacacaacactgctttkgtgattttttttttttagatcaaatcactcttttatggttaaaagcagggactcagtctgaagccaaactgcttgagttagaatttcagctccactacttactagctgagtaaccttgggcaagttatttaacttccctgtgcctcatgttattcatctgtgaaaagcagataatcccacagctgaaaattacatgaattaataaatgtaaagcacatagaacaatggcaggcacataaagtactccctaagtacctgttacataatgtrcattaagcagtatgccccatatcatgtagtttcaagcttttcttatgccagaactatactgtcctgttttaggacctgaaggtggcaagacagtagaaagcaggagtaagagtggaaatgaaagcaggtaatagattccctagaactgagttaatgcccctctaaactgttctgatactaccctgtattgaatttatgatggccttagccattctttctccatttgactgctataaaacggagataagggaatgagcaatttatgagctgggaatttattatcagaaaactgaccaatgttatctcttgcagaaggtcctacagtgtaggggaagcaatggaagaacttctacctgatggacaaatatgggctaatatggatccagaagaacgaatgttggcagctgctacagcttttacccacatcygtgcagggcagggtgaaggagatgtcaggagagaagcccaatctatccaatatgatccctacagtaaagcttcagtagccccagggaagygacctgctcttcctgtgcaactacagtacccacatgtagaaagtaatgtcccttcagaaacagtctctgaggcctcccaaagactccgaaagccagtgatgaagagaaaggtgctgcgcagaaagccagatggggaagtattagtaacagatgagtcgattatcagtgaatcagaatctggtacagaaaatgatcaggatctctgggacttaagacaaaggctgatgaatgtacagttccaggaagacaaggaatcttcatttgatgtttcacaaaaatttaacctaccacatgaataccaaggaatttctcaagatcagctcatttgctctctacaaagagaaggaatgggctctccagcttacgaacaagacctgattgttgccagcagacccaagtcctttattctcccaaagctggaccagttaagccgaaaccggggcaagacagaccgggtagcccggtattttgagtacaaacgggactgggactcaatacgtttacctggtgaagatcatagaaaggaattacgctggggtgtccgagagcagatgctttgtcgagcagaaccccaatccaaacctcagcatatatatgtcccaaacaattatctagtaccaacagagaagaaaaggtctgcactccgttggggtgttcgttgtgaccttgcaaatggtgtcatacccaggaagcttcccttccctctttctccttcttaaatctttttaaacttctttcacaggattgtttgagataacctagctctttatatcttcccttttaaatagaaacaaytgtsttgagaagctcttcgaaacattttatrgtaaggacttcacctatcattggtctttcctagctatatatcacattggtatcagatgatacttccaaattgccactcaaatccagcaattgcaagataaatcatatcagagaaagaacaacagacctggtctttctattttgtcaaattagtamgggccctttgtgtcctgtaactttttttacctatcaatatgagttgctgtgcttcagtgtgtgttttttaagttgctgggcattacacttaccaattaaagaattttggaaattcatgaacttgaacattatttcatgaaatacttgcctaagatgatcttgaacctgggctatgatgagagctcaaaagaaggaacaagccgggcgcggtggctcacgcctgtaatcccagcactttgggaggctgaggcgggcggatcacgaggtcaggagatcgagaccatcctggctaacacggcgaaaccccgtctctactaaaaatacaaaaaattagccgggcgaggtggcgggcgcctgtagtcccagctactcgggaggctgaggcaggagaatggcgtgaaccccagggggcggggcctgcagtgagccgagattgcgccactgcactccagcctgggcgacagcgagactccgtctcaaaaaaaaaaaaaaaaagaaggaacaaaaacctgccttttacatagtcctaaaggatgggagaggttaacaacatggatagcctcattactaaaggtgtacaacaaatccaagtagctttaaaatactttttaacaaatgccccaaaacagtaccatataacatacaggattcaaacttgttttatttcagaattatttcattaatattttgcctgccagctgttatttctggaataccattctttttataatttgcccctgagatttttgtaggaattatgcatcatttggaagggtattcctactccagtagaaattcaaactagtaacatctggaatcagatgcaaacataaataccaatatgaacctagcctgtttgggtgcagatcaaaataggaattctgctcaccttaaattgtaatttatctgttcttgatatttctgacccaacggggaccatctaaaatctgaaagttgtcagttttaacaccagaggccagaagaatgatagcacagtttgcttgttcacagagaaaaagttctaacataaaggtgaatgaccttgaccgttactatctgcgaaaatcattttccctgtaacatttaaagccacataattcacacattcacccagttctatttgttaggcatttgtctggaaaagaagtaatcaatgactcaggtacatgtaggatatactcaccgcaaaaaagtagaaactgcaaactgtccaccaacagtggaatagtaaatgtctttaaagacattagaatattaaatagtcattgggaatcttgggaaagtaatatgggaaggtgaaattaagtgacatgaatgtatcataaactatacaggatgatctcagtacacacagggaaagatcaaaacctaacgagtagtgggattaaaggtaatttgtatttatacctcgactttttatgaggtcaaaaattacatggtgattttaacatgcaaaacactccagtgattatttggatctcaaagtccaacattaccaaagtctccaaagttcaactcccgtgctaactaaagaactaggccagggagtgagtctagttggtcataaggcagatttgtggcaaaaacaggacttggtacactacagtgctttttccagcacaccttaccctaattcagggtgaagtgcaggagttcccaagcagacgtttaaagtaacaccctggccagggctgcgaagtaaccacagagagggaattcgtgtgtcccctaagcaccaattacaaactaaaacggccatcaccagatgttccatacattgggccaggcgccgtggctcacgcctgtcatcccaacattttgagaggccaagacggggtggtggcgggggggagggggggtcgctcgaagtcaggagttcgagaccaacctgggcaacacagcgagaccgtgtgttaattaaaaaattaaaaactaggctgccaagatggcgcacgcctgcagtcccagctagttggaggctgaggtggaaggatcgcttgagcccaggaggtagaggctgcagtgagcagtgatcacgccacttcactcagcctgggcgacagtcttaaaaaaaaaaaaaaaaaagtcctaatctcaggaaccagtgggttaacacataaatagcattcctcttgataaactttatattaatccaaagggaagaagagggagtactgtccaaaggattagcagacacgcactatgatcactagaaagcaatcgtggtctgtatgtaaggcaatccccaaaataatttgaaaattgctgccacagcctcccacatactcctgggttctcaacttctactgttttatgagcacccaattctaagtggggcagcagagcacttttgtactccacagtacaagtaccactgaagctcccgtcacaacggaattaaagacgaccctactgcggcgagtttccaccgagagctccagaaagtaccaggcacaaaagaaaaatacatggtcttaagcgaggtctcatttccatacggcaatgctttcctgaaaagaccaaagtatgtgaaagagggcaaaaagaagacaacagacaaccgttcagcagtgtgtccatttgtcccttcccctgtggaacccagaaagtaacccactccaaaaatcccacacttactttccggcagccggccgcgccgcgtttccgagaaaggaagctgtcactgtgcgtcttctgcgcaggcgcccgagccctcatgggaggtgtagtccaagtttgtgggaaatgtagttctgagaaccgagcttggtgctagaatctacctgaggttttctagtccagctaccgtttctccgcccacagggcagaatctgggcctgtggcaggacagcaataaaaggaggaattgtagtgctacgctaaaataatagaaaaaaggtaatttttcaaattctgctatccttatacgaaaactaaaagattgaagatcttggctcgattttatacctagttaaatgagaagaaagttaccattgagagacaaaaacatttactattagaattcaaattaaaagctgaaatgaatatgataatctcaaaacaaacgactaggtgccctgagagtgaccgaacagagcggggagcgttgcttcagcaccacggagagatcatgactgcagtttcgtgtgggtttttgtatttttgcccccaattccagaaatgctgatcaaaatctcaaaattacaattagaaaactggggggcgggggggaggtggaatttggttctttcgtccaaattgagcggtcattaaatcattagtaccagggatccagggatctataccggattatgcaaacgcatgtaggacgtagaggttataccgaaaggtaatgtttttaacaagagaccacatttcagaataaaagctttaaaaagcctatgtggaacatcacaggtatctagggcaggaacagcagttagagcttgaacagttctgcttcctttccgcaactgtggcattcgaggtcattcgtcatatcaaattcatcagattttgtctccactttcctaaccaattcgctaacctttctgacatcttgtgatgtggaggcggaaatttccagggaaaccgacacggggcgtaaagcgcggcggggagtctggggggctcccgcctggagggctgtgtgagcggcgggccgcggggcggcgcggggggcgctctccactctgcggaagctgccccctctgccctccggtccgcgccctttcgccccgctctctgccctccgccccgctctctgccctccgccccgctctctgccccccgccccgctctctgccctccgccccttccgcgcgccacccagccttccagcgcctgcgcgccgcaccgcggtggtcgcgggcgcggacgcggacgcctgccccctaaggaagcccattggccagcggatggggccagcaccgcctcgcgccggtggtggaagcacgtgctgggggcgggagcagcaatcgcagccatggcgtcgttactgtggggaggcgacgcaggggcggcggagagcgagcggctgaacagccacgtaaccgccaccgagccggggggccacagccgcgggggtggagctcccactcgcagagggagatcggctgggaggggagggagagcccgcgagcgttcgaagtggggcgtcagatgctggaggggagatgcgggaagggtttggaagagggccacagagggagaccccgtccccacccccacgagaggcaagacctttggttagaaagggcaaaaatgacgacccctggaaatccagggtgggaacgcagctggtagtcccagctagaccccgagttttctactctgcccatttgcccattaagcctcacctcgcttccatccatttgccagcgcactttcctagccaccctccccttgttggtgccgtgagccccaagtactgcccaactctaaactagaggcctaggaaagagaaactgcatgtacagggaatacagaaaatctccaattttagggtaactcatacaggaaacccaaccttgaaaggaatctgctgctacctaatattgcaaaggaagcaatacccgggtgtccttccctgaatccctcccagcccctgtggtagggaagcactgggctgcttgagggcttgcatcctaatattggttgaaatttgtgtctctcaatagttttcaaacctcagccaaccccggaagaacctttggggtattaagagtactgcagtccgaaacataggtgagtgctgttagggcaaagcagagcgacctcaatgattaaaaagtattgttttgctttcatcacgtccctgccaagtgaaacaccgcggattcattagtgtgacattcagcactctccattaccttcccaatcgtttcgtccattcctccatgaaatgactcttcttgccagtagacactgaagagtcaggaagaaaaaattgaatagcatgctttacatttgtgctcagcatttgtctttacttgtattgtttctcttccatcctttccagatggttctattaataacatcaatgaagatgatgaagaagatgtaggtaggagatgaattcatttgcatgtatctactagcattctgtttccgtttataactttaatagtgtgagtgaataatataatctcaattggaaaaggcctgtctttgcttctgttttcttatagtgactatcaggagacacactaaattaggagtaaggtgtatttatttaaaggaagttgaaatggaatatgcagggattgggttcagaacttccatctgtcaaggatttggtctcatggagatggacttaggctactttgaagttagaggatggtgaagtaacagagcgtaagaaactgaatcctcataaagaacgaatcctcagtgctatatcattctttctggaaccctcttttagaggaaaaatgagcgtaggtgcaattgcttggtatacaaccactgaaagagaaagagcaacttatttgatgtcattcaggaagcttgatgtcctcttttttatttttgcttttctagtggatttggcagctaattcactcttaaacaagttaatccatcaatccttagtagaatccagtcaccgtgtggaagttttacagaaggatcccagctctccactttactcagtaaagacatttgaagagctgcggctgtgagtatttttactcttttaatatgggaaaaatgctgaaaaccacagaacaaacgcatctgcttatagtaaaaaccatcaggatctcctctttgttttctgatattcaatatttttttttgttatttgagacagagtctcactctgtcccccaggctggagtgcagtgatacgatctcggctcactgctctaccttacaggttcaagcgattctcctgcctcagcctcccgagtagctgggactacaggcatgcaccaccacgcccagttaatttttaatattcagtattaaagtgagatttgtacattttccatgcaatcaaaatatagctcaggccaggcacagtggctcattcctataatcccaacacttgggagctgaggagggcagatcgcccgagggtcaggagcttgagaccagcctggccgacatgggaa

SEQ ID NO: 96327 - DNA, 15670 bp, Homo sapiens
atgcgatttccaactcaaaatcctgccgttgttctggactccccagctgggggcgaggcaggctctgactccgaggccgaggtactcacggttggtctgagagcgtctcaggagaagccttggccacgtgggtgatgggcacgagcccggcgctgggctggcccgaaagcctgcgtgcgaagatgtagccgcccccctcttcgagggcacagagcctgtccccgcggcggacactcagctccccgccacaccgcgccgtgaagtcatagagcgcaaggaagagctgagggaaggggctgcaaggctcggcggggagcgtgggcactgggtcagtgttggggtccagggacccgggggtgccatggtccggctcgccgcccgccggccagatcttgtcccagaagaaggacaggaaggccagccgcctcctgaggaacggctccatcccccggggtcaccacgctgggcccgagggccatgggagcccgcgagcccggaagaggaactggcagggccggtgggacccggtgtccagcgctccctgccctggccgtggggtgacaggggaccccggccctgcggtcactcagaggtcccctggatccaggaggcacacggttcccaccggcgtccgggctggcgttggggctgggtggggcgcagggcggaccccctgcctcaggcacaccgacagcacctcctgtcctcgacctccttggcgtctggagtgcaccgtcccctccccaacccgacggcagagggcagcttgggctggggcgggggcgggctccaggaggggcccgaggagggcggggtgggcagggccagcctctctcccgccctctgcaaggcccaggcaggcggaatggctctgcccagtcaggcctggcccatgcccaagggcaccacagtccaacagccgcccgtgcccacggagaagtgggggttccacggagaagcgctgctgttcagcacctgcagtggttgccaagcctgagctgcactcaggtgaaaaattgcctgcttatttaagtgttggccagatattttaacatcattaaccctgcaccaggtgccgagcctccggcctctgcagtaaattctgaggacaggcgagtgagggggctctcagcaccccggctttcatgcagtaaaacgagatgctgattgcagggagctcggccgcaggccaggcacccagatgccccatgctgcccgatgaccggcttctgagtcagtcaatgcccaggccatacccaaaggccactgcggggaagtggaggctgcggacgcctggccccagttcagggggatgagcacacggagaaggggcggcgggtgagtccctggctggggacctcccaccctctccctggacagcgccaagcccccgcatgctgaagcaaactctgcccgctcaggtaggtccccagatcggggcaggactgggggagcaaatcccagcaaaacccagcagcacggtacagggtcctgaggcaggaggatggggtggtggccatctgcagtctctctctcctcccacatcccctccgggtcctgagtggggtggggtgggggccatctgcagtctctcactcctcccacctcccctctgggtcctgaggcacgggggtggggtgaggccatctgcagtctctcactcctcctgccggcctcccccagcagccccttccgcacctgggtggccttcagggagcctcacgcccctttcccacatctcacacgcatccatgcccccacttcatgcgtgtggctgaatgcatccctccaataggcgtgaccagtgtccagccaatgacaagcccctcgcacctgcctgccctggagtcacagatgggcttctcagaaacctcacgtctggggactggtgtgtgcattgtggggtggcagtgacacccgtggcctggctctcagggcaccccagcagccaagctgtgtccgggctgatagcctggagccagcaggggccctgggagactggacatcgccaggctcagggcaggctctgcaccagagaggtgccctgctgggggtggtggggggtgttgagaaatgtggagaattgtaaatactacattgggggtggccttcgaggggccccagcgccttctcctcccgcgcttccccccgccgccctctcctcccgcccccgccgccctctcctccccccacccgctgcccgtctcctcccgcccccgacgccgtctcctccccacaacccacccccgccgtctcctcccctccactccccccgccgccgtctcctccccacacccaccgccgtctcctcacgtgcaggtgaggcttttgcccaccatttcttttctttactttttttttggaaacagggtctcactctgtcgcccaggctggagtgcagtggcagcctcgatctcctgggctcaagccgtcctcctgccggactacaggtgtgcgccaccatgcccagataaattttttattatttgtagagatgggctctcactatgttgcccaggccggttttgaactcttggcctcaagcgatcctcctgcctcccaaagtgctgggactacaggtgtggctaccagctctcccaaatcctccctaggacgtgactcttccccgctagaacgccaaggccgcagagccccagggaggcctcctcaggccatggaaagctcctgtgcccaccacaccagggtcagatgttcagggcactgaatgcagattcctcccagacactccctgccccttagagccacgggatcatggcacaggactcagcacattccatgcccagctggaaccagaggcaggcctggccatcagggttagggccccattgggcctctgccccggcgtgtctcacccccaccgccccacctgcccacagatcagctccccacgtctgccccatcttccccctccttgcacctgctgcccttgcaccgcacacatgccagggtgagtgtggtcggcaggcagccgaggccggctttatccagctcctccccggtggtcctcagaatccccggccccgcatgcccagctgccctgtcccgctgccctccaagttgtgcccgcccgtccaccccttcctcacctcacccaccaggcgcaacacagcccagcatagggcccctgccaggtgtcggtgtcagcagccccttccctgcctgctgtgccccccccacatgacctcacctcctccctcagccctaaccgggtgggtggcacagaggggagtgaggaaaggggcctgggtacaggatcagtctggacggggtcaggagtctggggcttggccgggtgaggcggctcactcctgtaataccagcatctggggaggccaagcaggaggatcgcttaagcccaagggttcaagaccagcctgggcaacatagtgagacccccatctctatttttttaaaaaaagaaaaggctaggcacggtggctgacaccagtaatcccagcactttgggaggccaaggcgggtgcatcacctgaggtcaggagttcaagaccagcctgggcaacatggtgaaaccccgtctccactaaaatacaaaagttagtcaggcatgatggcgggcacctgtaatcccagctactcgggaggctgagacgggagaatcacttgaatctgggagacagtggttgcagtgagctgagatcgtcgcgccaccgtactccagcctgggcggctgagcaagactccatctcaaaaaaataaaaatgaccagggctggaatcctgctgtcagactcactgtccacatgaccttgggcatacagtgctgaacctccctgtgcctcagtttccccatctgtaagagcactgagcttacaatggcagtgaggacacagaccagggggatggggtgcagggcccttcctggtgttcagatggaggcttgtggcaggagctctgccacatcaggccaccccccatccgggtttatgtgtctggagggcacagctctgagggtctcagtggtcagcgtgcattctctcccccaagactggccccactacccccaggcttcaccatcctcagggcccagggaagagagcttgtccccaccagggacaacagatccaaagtgttcactgcccgtgccctggtggccacaaacagggttgagcaagactgagcacaaactggcccctggtgcccagcagtgaacaggagtgactgttgaccctgcacagaggggactatgctgagcgcaagaagccagtcccaaggctgcatactgaaagcctgcactgataggacattcttgaaatgaccagacagagccggagagatgagtggttgcagggctagggagaggtgggagggagcagcgtggctgtaaagaacatgtcagggtcccgtgggggtggcactgccttgcgtctgtatcgacgtcaaggtcctggcgtgattctgcactgcagtcctgcaagatgctaccactggggatgctggatagagggtaacgggacctctgtgttacttcttacaactgcagatgaatctatacttatcttaaaagtaaaagtttaactttattattattattattattttcgagacaggcctctgtcttattgcacccaggctggagtgcagtggcacaatctcggctcactgcaacctccacctcctgggttcaagcgattctcctgcctcagcctcctgagtagctgggactacaggcgcccaccaccacgtccagctaattttttttttttttttgagacagagtctcgctctgtcgcccaggctggagtgcagtggcgtgatctcggctcactgcaagctccaccttccaggttcacgccattctcctgcctcagtctcccgagtagctgggactacaggcgcctgccaccactcccagctagtgttttgtatttttagtagagacggggtttcaccatggtctcgatcacgtccagctaatttttgtattgttagtagagactgggtcttactatgttggccaggctggtcttgaactcctgacctcaggtgatctgcttgcctcagcctcccgaagtgctgggattataggcgtgagccactgcgcccagccattattattctttttagagacacagggtctccctctgtcacccaggctggagtgcagtggcaccatcttggctcactgcagcctcatcctcccaggctcaggtgatcctccggcctcagctttccaagtagctgagaccacaggtgcacaccaccacacccagctaatttttcaaattatttgtagagacaggggtctccctgtgttgccgaggctggtctcaaacttctggcctcaagggatcctctcaccttggcctctcaaagtgctgaggttatgggcctgcgccaccgagcctggccaaaagtttaactttaaaaaattagattagaaatcagaaattgaaagaaagggggtagggtggagcccaggagaggggagacatccaggacctgcctggccccaaaagagaaggggaggctgctctgcccccaccccgcttctccgtcagtgggctgcagggccgggggtaaggggtctaactcctactgcttcccaaccctccgcgtcagacagcacccccttctccaaacaaccccggctttgtcccctggagccctaaataacaataacaatagctggcatttattgagttccagcccaggcagggagggcagggcagaaacagcacccaacaggactgggtgcaaggctcacacctgtaatccggaaggatcagaaagacccaggtgggaggatcacttgagccccgggggtgaagactgccgcatgggtgacagagcaagacgctatctcaaaaaaaaaaccacccacatccacccacttcctgccaggcctaacccctggggcctccatgcaccaagggaaagctcttccagggtggggtcaccgggaggaggggggaggctcaagttacagaacagcctggtaggggctcaaagacgcccatcctggaagaggccccagcactgacctccgtgggggtggagatgaggaggatggaaagggtgtcttcctccagcatcttcctgaaggtgaaggaggggcaccttggggtgtctaagattgtgaccccaggagacccccagctagctggggtgtgctgtgggggaacggggggatcccagaggccctgagcccaactgaacagatacagacgggaccagatggcctcagagctcccctgcggggctccctggagctatggagaccccatttatccagagtcaggtcggtgcctgagcttgggcagccccaggtggaaggagcccatggtgggaggagcctgtagtgggaggagcctgtagtgggaggagcctatgatgggaggggccgtggtggggggagcccgcggtgggaggagcctgcgctgggaggagcctgtggtgggaagaccctgtggtgggaggggccgtagtaggggagcccgcggtgggaggagcctgctctgggaggagcctgtggtgggaggggccgtggtggggggagcccgcggtgggaggagcctatgatgggaggggccgttgcgggggaggggggagcccatggtgggaggagcctgtggttgaggagcctgcggtggggggagcctgcggtgggaggagcctgtaatgggtggcatctgtaatgggcggggccttgctgggcagagcccgcggcgggggaagccgcccctctcctctgtccaggcgctgggtggtccatccgcctggtcaccggccactgcctctctcccaaattcctccgagggattcccgaggagtgcgctcggactggggggttgagcaggaactccctcccagtcacccgaggctcctgcgccccgcccgaagccgggggtgcgtggggagtggtgcgcccgcggaagggctccgggacgggaaccccccttggagcctggctcttggaccagccacccgccgtggcccctcagtcggggacgcgggcccccagaagtctggggctctccaggaagcgaagcggatggaagattactcggctcggggtcccgggtccccacccccgccccgcccccgggccgcagcgtcacaaaggccgctggtccccagggcaacccgcggagtgcggagggaggctgggctctgggaagtccgcgcgcggctccgcttcagaggcagggcaagtgggcgcggtcctggggcggcggcgggggccgggagaggagggctgggggtctcgagaaggtaaggggcaggcagagcggccggggaggtgggcccgggccaggggagccaaggggagtgtggtggagggggtagagtgcgggcacctggtggtctcagggaagcgggcctgggaccggggcgtgtaggaagcagcgaggggctcagaaccacctttccgggttcacgaccagcctctctgggtgttccacctgggcagctgctggagactagaaaacatccctcacacgtcacagaggcacggtttccctccagcggtgaaatccgccccagcctccagcaagagcagggcttaggcctggggtcctggggtcctgctctcagctggcacctcaccccagacacactccctgctgcccccaggggcctgttctcgagggattcccgaggagtgcgctcgtgaagtcatatctgcctcacgcccaaaagggcaacccttcccgggcagatatgacttcaccacgtacctgtgtggccctggggaactcagcaactgcttagctctcatttgtgggtcgtccaaggcccaagtggctgtgacaacctgagatctccagggttgctgggagccggggcagcaaccaggggtgcggcttgctctccagggagctgcggcagagcctggggccacagctgcactcagcyggtgcacccacggacagagggtcagactcggctcagcactgggctcaagccctggatgagaacaagaaccaagcttcttagcctcaggctccatctgggaaatggagtgtcacttgtggagtccatgagctcaccagggacaggatcccgggtccacagcgagggcccacagcgtgggaggagggctgctcctccgggcccaggcctgggcgccctcctcccatgctgaccrgccagctggcctcgtctttggtgaggcctgtctctgtgccctacaactgcggtgaggcgtggagcgtccccagggagaaccggagcgggaggatggcccgcgaatgtccccragggggatcctgtgctgcttaggaccacgccgtcccctctccacggccccgaggggtgccagcaacccctttcagcagcagggttaggaactggggcccttgcaargccacaggtcaggcggttctggccagaagtccgcagtcctagttcttccctgtcctgtcccacaggccactggttgtcagtagaggtttttgcccctcagtataaactgtgtccagatctgtaggctgcccatccagccctccaggcagcctcttcccatcgagttgtgcccccgaagaaggacagaggtccagcatggggtcagtgggctgaatccatcccccgaacatgccacagcccaggggaggccagcctgcctggcagctgacacccagccctccccccagctcccggataatgagcacccatgtggcaggcctgggcctggacaagatgaagctgggcaatccccagtccttcctggaccaggaggaggcagatgaccagcagctgctggaaccagaggcgtggaagacctacaccgagcgccgcaatgccctgcgtgagttcctgacctcggacctgagyccgcacctgctcaagcgccaccacgcccgcatgcagctgctgcgtaagtgctcctactacatygaggtcctgcccaagcacctggccctgggcgaccaraacccgctggtgctgcctagcgccttgttccagctcatcgacccctggaagttccagcgcatgaagaaggtgggcacagctcagaccaagatccagctcctgctgctcggggacctgttggaacagctcgaccatggccgtgctgagctggaygccctgctccggtcgccagacccacggcccttcctggccgactgggcgctggtggagcggcggctggcggacgtgtcrgccgtcatggacagcttcctgaccatgatggtgccggggcggctacacgtcaagcaccgcctggtgtctgatgtcagtgccaccaagatcccgcacatctggctcatgctgagcaccaagatgcctgtcgtgtttgaccgaaaggcgtcggcggctcaccaggactgggcccggctgcgctggttcgtcaccatccagccagccacatcggagcagtatgagttgcgcttcaggctgctggacccgcggacacagcaggagtgcgcccagtgtggcgtcatccccgtggctgcctgcaccttcgacgtccgaaacctgctgcccaaccgatcctataagttcaccatcaagagggccgagacctccacgctggtgtacgagccctggagggacagcctcaccctgcacaccaagccggagcccctggaggggcccgccctcagccactctgtctgagagatgattttctaatatttatccactaataaagaagagtgtaaatgcacatatggaattaaagaagcaaacctatttatgttttaaaggcagcagccaccagtgtttttcctggctcaaaacatgccaagccccaggccttctgctcctgctctttcccagggggagccacaggccggacctcccaagacagctgagcctggagcaagaagtaccagcccctgacacctacgggtccaacgacgacgacaaaagctgctccacggggcctctgcggtcctagcccccgcccctcctcaccacccccatcaccgtgaccgggctccggccttccttacccacctccctggcttgtggggctccctcagggaatgacactcctaggccgtgatgcctcccaccatcccctgcccagcctcgagtgctcatcagcacgcccgcccgaggaggcagcagcaccaccggggatccctggctgtgagcagctcagccgtgcccctccatgccccgccccaccttttgttcctcaagggccttcccggccctgagctccctctctcctccaggatcagctgcttttgctaggcgtccagcccctgcgtccccccaccgctcaccttcagggccgcagctgccccttcctcccagaagccttccctggctgcaggctggtgaggtccccaagtcccccttcctagaggcgccttctcatcctctctgcaggcacttctcaagctattgcagaactactcttatttcatgacggtccaagaatagacatggtcttcaaggcagggcccgtccagcacaccaacggggccacagtcctggagactccatgctccacccctccctccacagatgcccagaacctcttttcccacagtgaccatagcccccgcgaccatctgacccccgagctggctctgggaggccacaggagcccctgtggacgcagccacaaatgggccaggtgcggagggaccccagtccacagcggccagggggtcctggggagcagctttaaaagtgggaccagcaggacagtcaaggctggtggcctcagggactttggacttggccagcctggtgacaccggagcagctctggagctgtggcttgtccccaccacaccaggcacggccctcccctccccacacaggcagccggagacaccggccctgcagggggggtcgctgccctccccacgctcctgcgcccagcgctctgcagtgggccctcgacggcctccacggccgcgtcccaaaaccgccctccccacgcccctgcgcccagcgctctgcagtgggccctcgacggcctccacggccgcgtcccaaaaccgccctccccacgcccctgcgcccagcgctctgcagtaggccctcgacagcctccacaactgcgtaccaagcacagtgaccatccacttttgccccccagccagacctcaaacacccagaagtgagaagagctttcagagtggttttatcattaaattaatatctaatcacataattcaaagatataaaaattggaatgtagaaggtggggcaagcccctccctcaggactggaggcggcagcagggacagagccgcactgaagcgggtgagcgtgcgagaaacatacagccgagcaggctgccccgaacactcagtccagggtggaagcatcgccccggcaccccccaacccccgagcccactgcgcagcccacaggaagagtgcaggcttttcacatttcagagggtggggtggggtggggtggggcggggtgggcccctggctttgggctgccctccagcagcccctgaaggacacaggcggtgatggtgggagaaaggccccctctcccagggaggcctccttgtcctgagcttgggctgaggtctctgttccagtaacagatgctggttttgttttgtttttttttttaagacagggtctcgctctgtcacccaggctggagtgcagtggtaccatcagagctcactgcagcctgcgcctcctggagtcaagcgattctcctgcctcagcctcccaagtagctgggattacaggcgcccgccaccacgcccagctaattttgtatttttagtggagacggggtttcaccatgttggccaggatggtctcgaactcctgacctcaggtgatctgcccgcctcggcttcccaaagtgctggattatgggcgtgagccaccacgcccggcaggatgctggcttttagttcatttaaatagaaaataaacctgaactccacagacaccatccagagtgattacaggtggcgtccaaaggtcaaagggcagcctccacagggtttccttcctggttctgagacttcccagggacagcagaacttccttacactggtcccaaggaagcccctcttggccaccctgagaggtgttcctgtccccagatgcccaggaggagcaagagtgtggggaccggcccttgccgttcctcctccaagtccacccacttcctgccccagggagatcctgaggccaggaggcaggctggcccaggcaggctgatggcggagggtggtggggagggtgggggggccctggactttccctcccagtcctggcaccttgcaggtggagagggctcttcaggaaggcatagttggcctcctgcagacgcgcacctggccggcaggcacgagggtctgctgagcctcgcagaagtccaggaggctacgccagagggggcagcagcgcagaaggaggtggtctcctgtgagggtgggagtcagatgggagtcagtcagggtcaggtgggaggagtcagggtcaggtgggaggagtcagggtcaggtgggagtcagtcagggtcaggtgggaggagtcagggtcaggtgggaggagtcagggtcagatgggagtcagtcagagtcaggtgggaggagtcagggtcaggtgggaggagtcagggtcaggtgggaggagtcagggtcaggtgggaggagtcagggtcagatgggagtcagtcagagtcaggtgggaggagtcagggtcaggtgggaggagtcagggtcaggtcggagtcagggtcaggtgggaggagtcagggtcaggtgggagtcagtcagggtcaggtgggaggagtcagggtcaggtgggaggagtcagggtcagatgggagtcagtcagagtcaggtgggaggagtcagggtcaggtgggaggagtcagggtcaggtcggagtcagggtcaggcaggagtcggcagctccctagcccagccctggcctcacctgtgttcccaccctggaagagcccagccccgccctcaccgatcaggcagagcccctcctgggcccgcgtgacagccacattcacttggttggggtccacaacgaagcccagaaacttcttgagccagctcttggtgggccgctggtccaggtcgctcttggcacaggtgcggacggtgctcaccagcacatagcgccactcgctccctgcgggatgggaggtgaggccctgctgccgctgcgcccaccctcccggccccacccacgagcccccagcctcaccctggctcttggtgatggaggacacggccaccccggcgatgccctctcgccgaagggccttgctgatctcagaggcctgcgcgttgtagggcgtgaggacggcgatgtcctggggctctacggtcctccccagggtcagctgcttggtgatacggacctgaggagccgagggggcaggtggagcggaccctggtgtctctcctgccctcctccaggaagccctccctgactcacaagcaccagacactcaccacctcagccacctcctccagaaagccctccctgactcacaggcaccagacactcaccacctcagccacctcctccaggttggccttggagttctcattcccttcgtccgtggacaccagcaggctccgctcgtggccctgcacgtggccaaagatgacagggcagctctccttgccagcgtggcccaggacactgggcggcctcctcaggccctgccacgtcttcagcttgctcttgtagaacgccacagaggggaaggcacagatgccctcatgctgcaggcaaggatgtgcgctggtcagaggctgccacgcggggttgtggccccccaggggctgcaggtgggctgggggctgagtggggcgggctcaccatgcggtactgagtgtccagcatatgtgcgtcctcgtggtaccgctcgaacagagaccggtccagacccaggttttgcagccgctcattcttgaccacaggccgcagctgcttgtggtctccgagaagaaccacctggaggaataggcaggcctggccctgacacccctagacccagagggaccccagccccacacgacacccgcgtctgcacacacagggcaccccaggtgggagactgtgccagggacgcctgctcatgctgcccacaccccccgccgaccaaccttctcggcctgtgggaactgcaccagggggatgagggtttcaggttccgtggccatgcctgcctcgtcaacaaggatctgcctcacgtccaggattttgaggctggcagaggctgcacaggagcaggtgcagaggatgacctcatgccggtccagctcgaacttccgagcctcccacaagaccttcttgtacctgccggggacactgcttgtcaccccagggcccccatgctgcaggcagctccaccccctggcccctgccacttaccagaccaggtcctccctggagaagagctcccctctctgcagccgggtgtcaaaggccttgatttccgacgagtaagggttgggggcctgccggatccggtggtgcagggtgatgctcctgggggacaggacacagtgagccctgtccacgcagggccatcacgggggcagagctcagtgagacccacctacacaggactgtctggacagctcggccccactccgcccaagccccaaagacagcaggcacacctgaggctctggttcggcctcccctcccgggggctcttcctgagcagcttcctgctgcccacacgcggcactgggaactcgctggcctcagcctgctcactgtacacacggaggggcttcagctccatccttctcaggagcagtcctgagggtagttgggggacgtgagtcctgccccgcgtgccagctccccaaaggcccccaccgccgaccccggcgcacctgccaggacatccaccgacttgttggaggggccgcagtacaagatgcagggaccccccagccgcttctccccacggggggggcctccgggctgcacctgctcctggtttgatttatgaaaccagaatacgatgtggaggcccacgatcgtcttccctgtacctgcagccagagaataggagattgtagcccaccctgtgggtccctgtggcccaaggcagcctgcggctcccccggcgtgggccctacctggtgggccctgaatgaccgtgaaaggcttctccagagcctccctgaccgccacgttctggctggggttcagcttgtggcggcctccggggatgttgtaggtctgccgctccaggaacctgctggggatcactgagagggggcagcctccctgagcactcatgcagggtggggctgggggccagaggggaagctggaggggtggggcagacctacctctgcagaggggctgcgggacaggccggcccagtgcgatgctggtgaccagcggggacgcctcctctagtccacgcacggcttcctccttgcggctgggggtgaaggcagacactggaaaaccaacaggactcccaggaaaggggctgctgccccacgagctcccccctcctgcaagtgaggggcccggggcggtcccccagcccagcctctgctggtggaagccactcacagatcaggaagctgcttgggcagcagctcaacggtgaacagggtgcccggcctcagcacctcttccggaaccttctccatgcccatgtggtggacgaagaggtgcacccgtctgggagcctcctgccggtctgcccggcgctcctggtcccagtcctgcgtctgcccgt

SEQ ID NO: 96328 - DNA, 14460 bp, Homo sapiens
taggacacgaagaggacgctggcctgtagctccgcagtgacggtgaccccaggctgtcctgcaggaccaggaacaaaacgagccctaggacacgaagaggacgctggcctgtagctctgcagtgatggtcaccccagcttgtccacgctgacttctcacctttcccaggacggttggcgcctttcattctctggggcgaaaacagtcaggacattcatccaacactgagccgtgtctcttccagcagcgatggccaaggcatagcctttgctattcagggactgaaagcagggaacttccactgtgtgacaacattacaaatttaaactctgtacttaaaaaaagaaagccagctgggcgtggtggctcacgcctgtaatcccagcactttgggaggccgaggcaggtgaatcacgaggtcaggagattgaaaccagcctgaccaacatggtgaaactctgtctctactacaaatagaaaaattagctgggtgtggtgctgcgtgcctgtaattccagctacccaggaggctgaggcaagagaatctcttgaacccaggaggcggagattgcagtgagctgagatcatgccactgcactccagcctgggcaacagagcgagaccccatcttcaataaataaataagtaaaaataaaaatatttgttaacgtttgtgaatgtataccacagcagcaacaagcgtgcctggcccccatgtcttggtctctgatgccattcccccaacacaaggaaccaggttcctgggagacacggctgactccagggctgggctggtgtctgagacaggaaaaaaaaacagtgttttccctgctctcacacactcaacagtcaacatccaacatggaatacttcatctctggtcaccaaaatgtgtgtggggattttccccaaacaccaagcaagtctccagtggacacctactaggcatcctccaaccctgctccagcgagtctccgcaggcacccactgggtgtcctccaaccctgttccatccagtctccgcggacacccgctgggcgtcctccaaccctgttccattgtgacgctttctccctggagacagtacccgatcctgcaggctaaggtctcagtcccacaagagtgtcctccacttcagatgccagtcccaagtacagctgtccctttgtatccttgggggatgggatccagtacctccaaaacaccagaatccacaaggccagagtccctgatacaaaatggcatgttatttgcatataaccccctcctctggacttaaatcacctcttgattacttataacacctggtatgtaaattctatgtaaacagttgttacatagtattgctttttaaatttgtattatttgtattattattattattactattattttgagatggagtctccctctgtcacccaggctgaagtatagtggcatgatcttggctcactgcaatctccgcctcccaggttcaagcaagtctcctgcctcagcctctggagtagctgggattacagtcacataccaccaggcctggctaatttctgttatttttagtagagacgggatttcaccatgttggttggtcaggctggtctcaaactcctgacttcaggtgatccacccacctccgcctcccaacagtgctggatgtacaggcatgagccactgcgcctggccttatttattgttttatttatttattttttgtattttcttttgagacggagtcttgctctgttgcccaggctggagtgcagtggcgcgatctcggctcactgcaagctctgcctcccgggttcacgccattctcctgtctcagcctcccgagtagctgggactaccagcgcccactgccacacctggctaattttttgtatttttagtagagacggggtttcaccacgttggccaggatggtctcgatctcctgaccttgtgatccgcccgcctcagcctcccaaagtgctgggattacaggcatgagccaccgcgcccggccttttcttcttttcgagactgagtcttgctctgtcgccaggctacagtgcagtggcacgatctcggctgactgcaacctctgccttccgggttcaagcgattctcctgcctcagcctcccaagtagctgggactacaggcacccaccaccacgcccggctaatttttgtatttttagtagaaatggggtttcaccatgttggcctggctggtctcaaactcctgacctcaggtgatctgcctgcctcagcctctcaacgtgctgggattacaggcgtgacccaccgcgccgggccagtattttttgtattttcagtctgaggtttgttgaatacttgggtgtggaacctgaggacagatgaccaaatgtagcaggtgtcacccgccctctggccaaccgaggttcccatggcccctcctccagttttgtgactttgctggagtggctcacagaactcagggaagcactttcctcattttattatttattgatttacttttggagatggggtttcattgtgttgcccgggctggagtgtgacggcataatcacagttcactgcaccctcaacctcctgggattaagcagtcctcccacctcaacctcccaagtagctgggattacggatgtgcaccaccacgcccaactcattttttttttttttttgagatggagtctcactccgttgcccaggctggagtgcagtggtgcaatctcagctcacggcaacctcggtctcctgggttcaagcgattctcctacctcagcctccccagtaactcagactacaggcatgtgccactacacttagccaattttttttttttttgagacagagtcttgctctgttgcccaggctggagtgcagtggcactatcttggctcactgcaagctctgcctcccgggttcacgccattctcctgcctcagcctcctgagtagctgggactacaggcgcccatcaccacgcctggataattttttgtatttttagtagagatggggtttcactgtgttagccaggatggtctcgatctcctgacctcgtgatccgcccaccttggcctcccaaagtgctgggattacaggtgtgagccaccgcacccagccaattgtttttttttttttaaatatagacagagttttaccatgttggccaggctggtctcaaacccctgaccttaaatgatctacctgcctcggcctcccaaagtgctgagatgacaggcgtgacctactgcgcccagccaattttcgtattttttgtagagatggggtctcactatgttggccaggctggtctggaactcctgagctcaagtgatctgcctgcctcagcctcccaaagcgctgggatgacaggcgtcagccaccgagctccgccaacactttatttatgtttccccatgtgtgacaaaggacccagatgaacagcagatagaggcaatgctgttcatctggaggcctctccagggagcttccaggaccctccaagcattccgccacctggaaacctcccaaccctgtccttttgggttttatggagacttcattacgtaggcatgactgattacatcattggtcactggtgatcagctcagccttcagcccctgtccctcctggaggctgcaagtggggctagaagctctgcccttctgatcacatagtagctgccaccaaccccccaccccaaggctgtccaggagcccaccaggagtcgcctcattagaacaaaagacgctcctgtcacccaggaaattcaaggggattgggagccccatgtcagatgatcctatgggttaggagattataaaggttttaggagctctatgtcaggaaccggggtcaaagaccaaataccacaataaaagactcctcctgcctctgtctgaaagggtcttagaagttctgtctcagaaacccagggcagagattcagtaggcatttctttttctttttctttcttttttttttttgaggagtctcgctctgttgcgatctcagctcactgcaagctccgcctcccaggttcacgccattctcccacctcagcctcccgaggagctgggagctgccctacaggtgcgtgccaccatgcccagctaattttgtttttgtatttttagtagagacggggtttcactgtgttagccaggacggtctcaatttctcctgaccttgtgatccgtcttcctcggcctcccaaagtgttgggattacaagtgtgagccactgcgtccggcccttttttttttgagacggaatctagctctgtcacccaggctggagtgcaatggcgtgatttcggctcactgcaacctctgcctcctgagttcaagcgattcttctgcctcagcctcctgagtagctgggactacaggcacgtgccaccacgcctggctaatttttttgtatttttagtagagatggggtttcaccatgttagccaggatggtctgtatctcctgacctcgtgatccatccacctcagcccctcccaaagtgctcggattgcaggtgtgagccaccgcgcccggctggatttaagtttttctaactaaaaagtccaggaaatacatacaaggatataccagaagatgttcaaagtggttgaatccaggtgatggaattacaggcaatttttctttctctttttagtaacaaagctgggcgaggtggctaacgcctgtaatcccagcactttgggaggctgaggcgggcggatcacgaggtcaggagatcgagaccatcctggctaacatggtgaaaccccgtgtctactaaaaatacaaaaaattagccaggcgtggtggcgggcacctgtagtcccagctactcaagaggctgaggcaggagaatggcgtgaacctgggaggcagagcttgcagtgagccgagattgcgccattgcactccaacctgggcaacagagcgagactctgtctcaaaaaaaaaaaaagaaaaaaagaaaaaaaaattagtaagaaatcattttttccggccgggcacagtggctcatgcctgtaatcccagcactttgggaggccgaggcaggtggatcacgaggtcaggatatcgagaccatcctggctaacatggtaaaactccgtttctactaaaaatcctaaaaattagccgggcgtggtggcaggtgcctgtagtcccaggtactcgggaggttgaggcaggagaatggcgtgaacctgggaggcggagcttgcagtgagcagagatcacgccactgtactccagcctgagcaacacagcaagactccgtctcaaaaaaaaaaaaagatatcatttttttcctttttaaaaacatttcatattttagcttaaaaatggaagaggtggaagtgagtgcaagtggttaaataaataaataagtaaataaataaaaaggctgaggcaggaggatcacttgagcctgggaggtcgaggctgcagtgagctgtgatctcaccactgcattccaacctgagcgacaaagctagaccctatctcgaaaaaaaagaggggccggacctagtggctcacgcctataatcccagcactttgggaggccgaggcaggcggatcatgaggtcaagagatcaagaccagcctggccaacatggtgaaacccggtctctattaaaaatacaaaaaaattagccaggcatggtggctcacgcctgtaatctcagctacttgggaggctgaggcaggataattgcttgaacctgggagccgagatcgcgccattgcactccagcctgggtgacagagcgaggctccatctcaaaaaaaaagggaagagttgagtgtttttctaggtgtttaatgtgaaggacaagtgaaaagccccagaatggcccctgcaaacagtaacagtaactaacagtcaaatgtctctgccccaggcaggttagggacgagacagaatgagggtggggagcggggctcggggagcagaggccacggtctccatgctctgctcctctggccgcagcagaaccctgtgaaccccaggcaatgacagcaggatcctgaagcccatgcaggctctgaaccacgcggccatccagaaggggtgagataaatgttggggaaaccatccccgaccccygcgagccccaggagcccaggctgccgcctcctgcctcctacacccctcccccccacagctggccctggaggctgctggagctggggttaccccgtggggaccctcatgctctttgctcccctccttctccctccccctcccccacaagcgtgaaaccaactgaccggattgacagatgcaggtgcgcgggaggcggaggtgggggtggtgccagcagccaatgggttaatggtccyggcaggggctccacaggggaccaggggtcagatgtctctctaagatggggacaggcacgcaagctgctattccggggctctgatcacggctgtctatttatagcgctggggggagccgcctcacatagacagcagagaggctgccctgctgcaatgtcaccgtcgtcactgcctctgcaggctgcaggcacctgccactacygcagaggactgaggggccttggcccagcagggaccccagggccttgggggactgtgtgagctggaaacgtggctggccagatgggcagcaccatggagccccctgggggtgcgtacctgcacctgggcgccgtgacatccccwgtgkgcacagcccgcgtgctgcagctggcctttggctgcactaccttcagcctggtggcycaccggggtggctttgcgggcgtccagggcaccttctgcatggmcgcctggggcttctgcttcgccgtctctgcgctggtggtggcctgtgagttcacacggctccacggctgcctgcggctctcctggggcaacttcaccgccgccttcgccatgctggccaccctgctatgcgcgacggctgcggtcctgtatccgctgtactttgcccrgcgggagtgtycccccgagcccgccggctgtgctgccagggacttccgcctggcagccagtgtcttcgccgggctcctcttcctggcctacgctgtggaggtggccctgacgcgggcccggcccggccaggtgagcagctatatggccacggtgtcggggctcctcaagatcgtccaggccttcgtggcctgcatcatcttcggggcgctggtccatgacagccgctacgggcgctacrtggccacccagtggtgcgtggcygtctacagcctgtgcttcctggccacagtggccgtggtggccctgagtgtgatgggccacacagggggcctgggctgcccctttgaccggctggtggtggtgtacaccttcctggctgtgctcctgtacctcagcgccgccgtgatctggccagtcttctgtttcgatcccaagtacggtgagcccaaacggccccccarctgtgctcggggcagctgtccctgggacagccagctggtggtggccatcttcacctacgtcaacctgctcctgtacgtcgttgacctcgcctactcccagaggattcgcttcgtgcccagcctgtagcccacagtggcagcccacccacctctgctctctggccaccagctccaggytctgcgagggaaactcaggtgaaccaaagtgtcaagtagcgagcaggagggaagccgcgggctcaggggagatgaagtacaacgggagaggtcrctccccgacttccagactgggctcagagggacaagggcaggacagtagggcagaggccctgagcagacgcaggggagagcctcacctaggccaatccccaactcactctctctcaccatttcccagcgctcctggggctcagtgctggtcactggaacatcataagggaaaactttaaagcagctgctgttgtgacccattttgcagctggggacrtggaggctagaagcatttgcgaggcacccagtacctccattagtgtctggagaccacagtcaggctgggtaaggcaagctgaaagaggaatgacttccagaggagacgaacccaggagagtagctgggccaggcaaggggagggaggggcgtggggagccggaaccactcctggttcagagaggcagctcccagaaccctgggaagagagccctgcctggggagctgtgccagctcacagagaaggagccagaaatctggaccagcctctcccacccacgtccgggaagcctctgggctggtagccacagtgtttggaagcaggcttcctccggagtctccgcaggctggaggtggcgcgggtggcctggaagagcctgcagagcccggcggcaccgagtgcacagtggacggggaggacctggttccgccatagccacggagccccacctggacactcaccattggctgtgacgaagcagcttcagcagtgcccggcgggcatctgtgcactgtgggcatctgtggcactgggagggagcccggctgagggcggccgctggacacagaatctgggtactgcttgcctctgctcaagggtccagttgccgaaactcctgacgccggggccatcatcctccaggctccagccagcttctcctgcacagaagcccagcctggtccagccaggagctgacccactggccacccctgagtccaagccgggtgggcagtggcacaacagcccctcagcccattgactgggccccattgacgtccttgagcaggaaataaatgctgacatttatacgtaccctgcctctggaccagcagtctcttctgaggggactgtgggcacttgcccctcctggcggcccctcctagcgtgctctgggggaaggctgaggaaggaagtggcctgggatcacagtcagggcaggctgggctcctgagggtctgagcagcctcctggggaaggggcaggcagcgtcttctgcctcacaggggtgacaggccagcctggctccgacgggcctgtggctcatgcccgtccctcccagaggcccgcagcactcacctcctcccccacgcccatctgggggtctcgagaggccctggacacagcgatggacagacgcactgttgctccttttagacggcggtccccacagccaggcctgtgctgctgccatgaagaatgtgaggaaggggcctcactggccgctgaggaggggtctcgctcacgttagccaacaaacagggtccggccgacatcctttactcagagggggtgggtgttttggggtcaatggcagatcccagatgagggcagtcagctgttcagggcctgccgctggctgagggcgatacagagggggcatagggatcacctgcttcctgactcaggggagacctgggcaccagtcttggagaggacccagcctccttctctcctttttttcatgtggccagaattctgaaacgagttaattgtcaccaacttcccaatttcctccctgtccggtggtcctctgccaccttcgcaaaggtcctgagggacagaaaggaaggggaggggacccagggctgggagacttccttcagagtcagtccttttgacagtgtatccctggcccagagggctgtccattttgggtttttgggtttttaggtaaaagtgttacttgctgttatcacttggggaaaagtgattttgtaacagcctggggagcttggctctcaaagcgcctaggcgatgctagcctccgtgccccaggtttgagctgtccatctggacaagctcttcccatggccaccacagagcagcctcccagtgttggtggtggtcattacgtgttcacggtggggggaccaggtagacagatagccagaacgcgtggccctgccgctgtggcagaagcatcccaggccttctgaaatgatgtgctagaatagcctgtcatcatctaagatacagcacagaaaaaataaggcagctcctctcaccccttggcaggggaatgggctgccagtgatcccttctgacttcgcccttaatcttggccaccgacagggaccctgactatccagagccccagatgcaggcccgaatcagatgaactctgagcatgtcctcagggggaagtgactggagcttcactccccctaaaacccaggcaggcgagaggtttgggtattggaggatgctccgggctgcgtgggagtgggggcatgatggggtgggcttccttcgtttgcttagtggagcaccgctgcgtgcccagttagaggaacacctgtggccgcactgtcatgcctctttcttttcttttcttcttttcttcctttctttctctctctctttttttcagatggagtctcgctcttgttgcccaggctggagtgcagtggcgcaatcccggctcactgcaacctccacctccagggttcaagcgattctcctgcctcagcttctcgagtagctggaattacaggcacctgtcaccacgcccggttaattttttgtatttttagtagagacgggggtttcaccatgttggtcaggctggtctcgaactcctgacctcaggtgatccgcccgcctcggcctcccaaagtgctgggattacaggcgtgagccaccgcgcccggcccaaatggtgatatatttaaaatgcttccacttggcaaattattttcaactctgcccccaagggaaaaaaaaaaaggaaagaaaacgctgtacagccgggcttctccaaactcgatgacagtagaagggactgattcccagagagagccggccgcgcgcccagggacgccagctggacgcgtccgtgtccgggtggcccaagacaaagccctgcgtggagggcccctcacaggccccaatcgggccgccccctccgcccgcgtcctcggaccccacgtgtaggtcccgggaagcgcgaccaggaggagcgcgggtcaggggaccgcgtgccggagagggtgtctatccgggggccgggggatcccggggcgcgagagaggcgagggccggcggtcggcgtgggaggggcgcgcagatgatgcaaccgctctggcgccgccgcgcgctctgattggccagcgcctggcggccgcgcccggattcgctggcgcgacgggggcggggcctgggtgcgggtgccgcgtggcggccgcagcgctgaggggtgggtacgacccgcgcacggtagctgggttggggtcgggctccgggaatggtgggcggcggtcgccgggtggggcgcgacggtagcccagttctgggcggggtgggaacccagacgggggacccctaggcgccgggccctccctctccccgtacttttcccccttcccagtcatttcttctgcggaacctccacccctccagtgggtgcgggaccctaggcagcaggccaggcaccgccgctctgactgggggccccgaagcagttaacgggccggacagcaaagtggaaagttagaccagctgggaccaggggaggtgggcacccggctgcgggaggagcggccaggctggcactgcccccctaacttgctctcgatcctgccggtctcgtcccgcagagccggtgccatctgtgggggctttgggccaggggtctccggacagcatgagcgtgggcttcatcggcgctggccagctggcttttgccctggccaagggcttcacagcagcaggtaggcccccaggtgggggacggtgaggcccagtgggagagactggcctctttccacttctgcagggctgggggctgaaggtgggtgctgggtcacaaggcctgagtcctgcgggaactggcaacttctgtgtgtttggggctttacctgtgctgtctcactcttcttcctgggaatggggagggagggaagccaaagctagccatgaagaggaactgtttccggccgggcgcggtggctcacgcctgtaatcccagcactttgggaggccgaggcgggcggatcacgaggtcaggagatcgagaccatcctggctaacacagtgaaaccccgtctctactaaaaataccaaaaattagccgggtgtggtggcgggcgcctgtagtcccagctactcgggaggctgaggcaggagcatggcgtgaacccgggaggtggagcttgcagtgagccgagattgcgccactgcactccagcctgggcaacacagcgagactccgtctcaaaaaaaaaaaaataataaagaactgaagaggaactgtttctcccctcaggcgtcttggctgcccacaagataatggctagctccccagacatggacctggccacagtttctgctctcagggtaggtgcagatgaaagggagaaaggagactgagtctctgtggggctgggtgtgagaggcaggagtgtgtgctgtagcccccaccccagtgagggcaggggccctgggctggggtctcatggaccccacctcctcgccctgctgattgctcttgggacctgggtggtgggcgtgtgtacagctgataggagggtgttgttctggaatggagttccctgcacagggttaaagtttcgaggggtcctctgggggcctggcaggtggggccacagcctggcagccaaggaacacacctgggggctgcttgagaccaccactcccacgtggagagcccggtctggaggacggcagtcccaggctgggggcagattggtggcatggatggagggtccttttctgtctgcagcagggacatattccacacagagttcttcctccatttctgggtgggaagggtcatcaagggggtggtcagagccctgagcccccagccctgcccacccccaactccagcattctctgtgccattctacctgtggggctcttggcttggtgggggtacagacagccacgggaccaggctgagcccacctgttgcccctgcagaagatgggggtgaagttgacaccccacaacaaggagacggtgcagcacagtgatgtgctcttcctggctgtgaagccacacatcatccccttcatcctggatgaaataggcgccgacattgaggacagacacattgtggtgtcctgcgcggccggcgtcaccatcagctccattgagaaggtagcaccgcaggcccagtggggtgtggagaggggctgtctagagcccgggccctcagtacttcagttttcatctgcaaaagggttgcagcgtcccggcccactgggagagctcgggcactgcttggtggggtgagtgcatctaggcactgcgtccatggccagacggacacgctggtttctcttccagaagctgtcagcgtttcggccagcccccagggtcatccgctgcatgaccaacactccagtcgtggtgcgggagggggccaccgtgtatgccacaggcacgcacgcccaggtggaggacgggaggctcatggagcagctgctgagcagcgtgggcttctgcacggaggtggaagaggacctgattgatgccgtcacggggctcagtggcagcggccccgcctacgtaaggactgcgggggaagctggcggcggcgggcacttcccgggaccaccgggcacatctgtccctgctccccctgggagggccagggtggagggctccaaggctgtgggaactggagcttgcccagaagggaaggaggagaagcccaggagagaggctcagggtgccttctccccacaggcattcacagccctggatgccctggctgatgggggtgtgaagatgggacttccaaggcgcctggcagtccgcctcggggcccaggccctcctggtcagtgtgtttcctgaccctctggtggggccactctttgcggggccctggggcttcactgggaggagccaagtggggcgtcagtgtgtgctacagtggctggggcagtgccccgcagaggcaggtgcgtgcccacagccgtcagcctttcttctggctgcagggggctgccaagatgctgctgcactcagaacagcacccaggccagctcaaggacaacgtcagctctcctggtggggccaccatccatgccttgcatgtgctggagagtgggggcttccgctccctgctcatcaacgctgtggaggcctcctgcatccgcacacggtgggcccccgcgctgcccgcttccctggtctccagtccttgcatggcagaggcctctctcacacacatctgctcattcacgcactcagcagatacgtattgagctccagcccagtgttgcgcaggacacagggggccccgaggttccctgggttactgtgggcagtgcccctccccaccttccgtttcctgcgaggagggaacatccatagagggacccggatgctgtgccctgtgctccccacataggttcaccattgtcatagctaggagtgtcatttgagccaggggccacaccagtggggtggcggggtggccagccacattaggaaacttctgtgggggcccaccttcctcctgccctcgctgtgggattaagttagaccagtaggacacgcagcaacatccaggcac

SEQ ID NO: 96329 - DNA, 29121 bp, Homo sapiens
cttggaaaagatctggatgaattccctggattactaggcagagactcttgttctcttccctcttgttctcttcccttactttctcctagacaaatggagtctctctctatgttctgagccacttggaactgggggtggcatgacacaagcacccttatggccaccactaggactgtgttgggtcatacctgaagccagcacagcactgggtctctcccaagtcctgctgtaaccactccctggctaccagctatgaccactcaagtccctgggctccgcaatcagcagatgcaaagccagcaaggcctatgtccttcctttcagggcagcgagctcccccatgccccaggcaggtccagtggtgccatctgggagccagggactagaataaaaaaacctgagaagtccacctggtgttctgttgtattgtggctagcctggtactcaaacccgaaaatgcagtcctttccactctttcttcccgtttccaaaggtagaggaccctcacctcatagccattaccatcacaggcccatggagagtactgccagactaccgccaatgttcccttaaggcccagtgtctcctaaatcagcttgtggtgaatgctgcctggcttggtactcaccctcaggataatgggctcccttctggcccagggcatgtccaaaaatgctgtttaagagccaagtcctggaatcatagaccccaagagccttcctggtgctctaccctactgtggcaaagctgatacctatgctgtaagactaagtcccttttatttttccctccagttttctcaagcaggagtttcaccctgtagccaccacagctgggaatgtcttgtcacctgaatccagcaagtctcagagtctcacccaaggcccttaatatagtatctgagtatcgctgctggttactcagggtccaagggctcttcagttagcagatgatgaatcttgctgggactgggtccttcccttcaaaggagcgggtttccttatggcttagggtatgtccaggagctagggcctggaaagggggcctcattactctgaccagtgccctatcctgctgtggttgaggtgggcgtggtggtacacacttgtaatcccagctactcaggaggctgaggcaggagaattgcttgaacctgcgaggtggaggttgcagtgagccaagatcatgtcactgtactctaacctgggcaacagagtgagactctaccttaaaataagtaaataaggccgggggcggtagctcacgactgtaatcccagaactttgggaggctgaggtgggcggatcacctgaggtcaggagttcgagaccaacctcaacatggagaaaccctgtctctactaaaaatacaaaattagccgggcgtgatggtgcatgcctgtaatcccagctacttgggaggctgaggcaggagaattgcttgaacctgggaggcggaggttgcagtgagccgagatcgtgccattgtactctagcatgggcaacaagagcaaaactccatctcaaaaaaaaaaaaagtaaataaataacgtaagctatacattgattggcaatacagtgttctgtttttttcagagacagccttgctctgttgctcaggctggaatgcagtacacgatctcagctcactgcaacatttgcctcccaggttcaagcaattctggtgcttcagtctcctgagtagctgggattacagatgtgcgtcactatgcccagctaatttttgtatttttagtagagatgtggtttcaccgtgttggccaggctggtcttgaactcctggcctcaagtgatctgcccgcctctgcctcccaaagtgctgggattacaggtgtaagccaacacgcctggccagctatacattattctttgtatcacaaatttcaagaacagaaaataatgagtgagggagctagtcaaaaacaaaatgattttaaaacagtcacccccaagcaaattcagttataaaaagtctgaatgggggcaggtaatgactgaagttctatactcttgtctctgggcctgatgaattttgcatgcttcacatagctcagactgctctgagctatttttcttttctcagtatgattgattaaatccttggccattggtggttcaactcaaccttcatcctctcccctccctgaatgataagggtatgcacctggaagccccaactctctaatcataccttagaatcctgaagctctctaagggcctccagacaccagtcatttcattaacatacaaaagacacttattactccagagtagattccaaggacttaagaggtttttttgtttttgtttttttccaccaggaaaccgggagggagaccaaatctatctttgtcaatgtcacagcctcccaggccagtctccgtgtctcatatctgtaatcttagcactttgggaagctgaagtgggagaaacatttgaggctaggagttcgagaccagcctgggcaacatagcgagaccttgcgtctactaaaaattgttttaaaagttaactgagcatagttgtattagtcacttctcatgctgctaatgaagacatacccaagactgggcaatttataaaggaaagacatttaattgactcacagttcagcatggctgagaaggccacaggaaacttacaatcgtggcacaaggagaagcaaacacgtccttcacatggtggcagcaaggagaggtgctgagtaaaaggggaaaaaccccttataaaaccatcagatctcatgagaactcactcactgtcaatagaacagtatggaggcaaccgcccccatgattcaattacctcccaccaggtatcacctcccgtccatgatacatggggattatgggaactacaagataagatttcggtgaggagatagccaaaccgtatcaatagtgatgcacacctctagtcccagctactcaggaggctgaggtgggaggatcacttgagctggggagatcaaggctgcacagcaagactgtctcaaaaaaaaaaaaaaaaaaaaaaaaacaaaacattacagccttccagggcaaagggacatttggcaatgtctggagaccattttagttgttacaactgtaggaggtgctactggcatctggtgggtgggggccaatgatgctactaagcattctacagtgcacattatagccttccacagcaaatatttatcaggcctaaaatgtgaacaatgcagaggtttgtttagagttatttggtgtaatcacatctagtaggttcaaagtgaagcttctccttaactttaaagaacaacattctttttgtttgtatcgcactcatgctccatgaggtttggctagtggtagtatggatgctttaatctattttcttgtttactctgattagatattatagtagcttgaaatggtaatttagacttttgtttctttggttttttaaacagctttattgagatataattcaaatattatacaattcactcgtttaaagtgtatagttcaatggcttttgtccatgttttgattgttaccacaatcaacattagaacattttatcaacctaaaagaaaccccatgctctttaactatcactctatccccagttcccttcccaccaccagactaggcaaccactaatctactttctttctctctaaatttgcctattactgacatttcatataaatggagtctgttgtgcctggcttgttttacttagaataatgctttcaaggttcatgttgtagcatgtatcagtacttcctttctttttataacattgtatggatataccgtatttggttttttttgtttgtttgttttttgagatgaagtctccctctgttgcccaggctggagtgcaggggcgcaatcttggctcactgcaacctccgcctcctgggttcaagtgattctcctgcctcagcctcctgaatacaggtgcccgccaccacacccagctaatttctgtatttttagtagagacggggtttcatcatgttggccaggctggtcttgaactcctgacctcaagtgatccacctgccttggcctcccaaagtgctgggattacaggtgtgagccaccgtgcctggctagatataccctatttgtttatccactcatcagttgatggcaatctgggttgtttccaccttttggctgttatggataatgctgctatgaacatttgtgtataagtttttgtgtggacatatgttttcatttatcttgaatatatagacctaggtagaattgttgggtcaaatggcaactctaggccagatgtggtggctggcgcctgtaatcccagcactttgggaggccaaggcgggcagatcacgaggtcaggagattgagaccatcctgactaacacggtgaaaccccgtctctactaaaaatacaaaaaattagccaggcgtggtggtgggtgcctgtagtcccgctactcaggaggctgaggcaggagaatggcatgaacccgggatgcagtgcttgcagtgagccaagatcgcaccactgcactccagcctgggcaacagagtgagactccatctcaaaaaaaaaaaaaaaatggcaactctatgtttaaccacttgaggaactgccaggctgttttctaaagagactatactattttatattcctgcctgcagtgtataagggttccaatttctttgcatccttgtcagcacttgttattatctgtcattttactctagccatcctagtgcgtgtgaagcagtatctcattgtgcttttgatcttcatttccttaatggctagtaatgttaagcatcttttcatgtgcttattggccataacttagatgtatctaagaatcagagtcttgaaagtgacctatatggaactggcttttagaagtccagattcactgggtggcttatgcctgtaatcccagcactttgggaggctgaggcaggaggatagtttgaggcagagtttaagacctgcctgggcaacatgtgagacacccatctctacaaaaaattaaaaaaattaaccaggtgtggtggtgtgcactacttgggatgctggggtgggaggattgcttgagctcaggaggtcgaggatgtagtgagccatgattgtaccactgcactccagcctgggtgacagagtgagaccctgtctcaaaagaagaagaagaagaagaggtccagactcaatgcaaggactgagaacaggccaagccatctggaaattagataagattgaagggagtatatcactgtccaagatacagccaagaacgaggaaattttaagttaatgactgaattagtggaacaggagtcagaatttagatgtcagggataaaaaatcagttataccacaataaaaaaatcaaggagtttcctaaattaaactcagatgctaaagttataccacaaccatcagtacaagaccaaggtagtccaagtgcggtagctcatgcctgtaatcccagcatcttgggaggctgaggcaggcggatcacaaggtcaggagttcgagaccagcctggccaatatggtgaaaccttgtctctactaaaaatacaaaaattagcagggcatggtggcgggcacctgtagtcccagctactcgggaggctgaagcaggagaatcgcttgaacccaggaggtggaggttgcagtgagctgagatcctgccattgcactccagcctgggcgacagagcaagactccatctcaaaaaaaaaaaaaaaaaaaaaaaaaaagaccaagataagccaaatacttgagtccacagcagtagttaaagctggtgttatatagggggttatccttggcccactccctgaaatggagggcaagaagatgtgaggcaggataagtatccacatccggtgccagttccctgacttaagcaagaagaggacacccaagaaaggtgcatattgaggatgcaaaataaattttaactgtgttcagatgtgtctaaactcaaatttacttttatagaaactataatgagaaacatcaccaacaaaaagtcaagcttcaaaaagtcaagtatcgtttaactaatgaagtagaactacgagataagagaattaaccaatttgaagatgaaattggaatcctgcaacataaaatagaaaaggtgaggaaaaaataaaaggtgaagagctcactggtgattcccatggtcagccatttggagaaagccttttcattttaaaaattatttgagaccccttcatagtcctcgttttcatttcttttctttgcaccatctttcaataagtaattctttaagccctgaccaaaagtacataagactcctagtgctgctacacggaattgaatactgaaaatactctgtactgccaacttatgatcaatgtctttcttcagatggaaatgccttttcttgaacactcctgagcacagacttccaaaccactctcagtaactcatttctgctttgtggagccctcattttgcctcagacttcagtgtcagttttaaatggcagtgaaaataggtgatccttactcctttatcagtccttgccttcaagcttttttatgtttgtcttattgcccttgtgacttagtggtggatgaataaacaggaaatgggacagatgaatagaatcaaatgcagaatggttgtgggattattaaactatataaattcaggatggagagtaactgactaggccagtaaggttttcccttcttggggtcactagccctttcagaatattgagaactctatcatcattcctaaaatattcatttccacactcaacaaatttttataccaccactgtgtgccaaggataccataaccattaatgtaatttcagtgattccatcaactatcctgggaccctaggtcaagaattcccagactatacacaataaagcatttttggaatataataggtgggtcacaaatattgcattcttagttttaaaaaattggctgggtgcagtggttcatgcctgtaattccagcactttgggaggccaaggcaggaggattgcttgaggccaggagttcaaggttacagtgggctataattgtgcttataaatagccactgcactccagcctgggcaacatagagaagctctgtctctaactaaaataaaaaatcctcttgatactctaaactatagtgagagaagaaaaataagttggatttttgcagtcctcctttttttgccattaatttttcaaacttttagagactgagatccagcttagaactaggaaaagactatggaaagtgtataagaaaaagtagtaatccattttaatagcacccatgggcaaaaaaaaaaaaaaaaagaaaagaaaagaagaggcagggcacggtggcttgcgcctgtaatcccagcactttgggaggccgaggtgggcagatcacctgaggtcaggagttcgagactagcctggccaacatggtgaaatcccatctctactgaaaatacaaaaaaattagccgagcatggtggcacatgcctgtaattccagctactcaggagactgaggcaagagaatctcttgaacccaagaggcggaggttgcagtgagctgagatcatgccattgcactctagcctgggggacaagagcaaaactccatctaaataaataaataaataaataaagagtaagagaaagaaaggaaaaaaaaaagtagcaaccctagttcatgggtccatcagacatatcatcagcctatttctatattatcagttctttttcatacttttgcattttgcttctaggccagaaaaacagtcttctgctttcaacaggcatgctagctttcttcctgactacactgggttgaatagcgtccctcaaattcatgtcctagaaccttagaatgtgaccttatatagaaatagggtctttgcagatacaattagttaagtgagattatcctggattagggtgaatcataaatctaagatgattgctgtccttataggaagaggggaaaacacacagacagacacagacaggggaagaatgcctcatgatgatraattcagagactggaatgatacagctacaagccaagaaatagcaagggttgctggcaaccaccagaagctaggagaaaggcatgcaacacaatctctcctggagcccccatgagtaattaaccctgacaacaatgtgatttcagatttctgtcactcaaaactatgagaaaatgttatggcagccctaggaaactaatgcacctacccaaagaaccacaggtcttcataaaatgtgctggagctcccaaataagcagaggctgagagaataattggatcttttgctcactgccattgaagggtactgtgggctttggccttaaatagacttggattcaaattctagccctgcctgtaagcttggacaagtctctgtgtatcactttcctcatctgtaaaatgagggaaataatccctaccttacatacacaaggcttttgtgagtattaaaacatacaatttctaaagtggtacttggtacatacacatttttcatagatgttattttcctttttttggtatataatctcttagaagggccaggtgtggtggctcatccctgtaatcccagctacttgggaggctgaggcaggagaattgcttgaaccagggagatagaagttgcagtgagccaagattgcaccattgcactccagcttaggtgaaaagagtgaaacttcgtctcaaaaaaaaaaaaaaaaatcttagaagaatgttaattggtggattcattgttcacatgagaaattgttgacagaattagaacgacttagcctagagaagactgatgttagagcttttaatgccacagtggtacaaacctaggaattcttattttatgtatattttagggcccaaggaccagagcactgagcataaaaatgccagatttctttctaagtctccaaaaagtaatgccacttcttttggcttcattccttcagctttttctttatataatgagtcaattgagacttctgttgtgaccactcaaaccagactttcccattttatcctattatcacagcatgtgtctggaatttttgtttgttttaaaaaatacagtatttcccaaggacaaggtgtcagtcaccttcctcatgcagtacactttttaatccagttagagctgtctagggtttatctgtgggatgattgcttctattctcaatccttaccaatacattattaattaaatgtctttaaattatagcaggtcagactaccattagatattgccgggtccctgagatggactttaaaatctggaatagctttttcggaacataatctaatcaacatcctacaggtctttaataatagatggatggccaggcatggtggctcatgcctgtaattctagcactttgggaggccgaggtgggtgcatcatctgaggtcaggagtttgagaccagcctgaccaacatggcaaaaccccatttctactaaaagtacaaaaattagctgggtgcggtggtgggcacctataatgtcagctactcaggaggctgaggcaggagaattgcttgaacccagcgggcagaggttgcagtgagccgagattgcaccactgcactccagcctgggtgaaagacaaaactttatctaaaaaaaaaattaataataataatagatggccagtcttttctgaatgacctacattagtatcttatttaaaagaaacatgtaggttgggcacagtgtctcatgcctgtaatcccagtcctttgggaggctgaagcaggaggatagttcgaggccaggagtttgagaccagcctgagcaacagagcaagaccctgtttctactattttattttattttttatcttaaaaaaatttttttgagacagagtctcattctgtcacccaggctagagtgcagtggtgtgatcctagctcattgcagccttgaactccacacatggcttttgtgtgtgtgtgtgtgtgtgtgtgtgtgtgtgtgtgtgtgtgtgtgtgtgtggagacggggtctcaccatgttgaccaggctggtctcacacttccgtggggctcaagcaatcctcccactttggcctcccagagtgctgagattacaggtgtgagccatggcaccaggcatctgactctacaaaaaatttaaaaattagccagctgtggtggttcatgcctgtagtcctagctactcaggaggctgaggcacatgatcacttgagcccaggagtgtgaggttacagtgagccatgattgtaccactgcaccccagtctggatgacagagctagatcctgtctaaaaaamcaaaaaaacaaaaaaaamcaaaaaaaacagctggacgcagtgcctcacgcttgtaatcccaaacctttgggaggcctaggcgggcagatcacttgtgatcaggagtttgagatcagcctggccaacatggcgaaaccctgtctctactaaaaatatgaaaattagctgggtatggtagtggatgcctgtaatcccagctactcgggaggctgaggctaaacctgagaggcagaggttgtagtgagccgagatattgccactgcactccagcctgggcaacaaagcaagactccatgtcaaaaacaaaacaaaacaaacaaacaaaaaacaacatgatctcactactttcagggtcatgaaaaagaagaaaaaaaaatacatgacatgggctgggcatggtggctcacgcctgtaatcccagcaatttgggaggccaaggtgggcggatcacraggtcaggagatmgagaccatcctggckaacacggtgaaaccccrtctctactaaaaatacaaaaaacttagccgggcgtagtggtgggcacctgtagtcccagctacttgggaggctgaggcaggagaatggcatgaacctgggaggtggagcttgcagtgagcagagatcacgccactgtattccagcctgggtgacagggcaagttctgtcttaaacaaacaaacaaacaaaaaaawatatatatatatatatgacatgacataaaataacctcttgaaaattgaaaaactatttagctacagtgaatgacaatgtcagcaaacagatagaaacagactaggggacaggaaaaaaaaagtaaataagggaaaatttctgctagatttagaaacaggcttatgctcttaaatttatcatactttctcctgctgtggtaattaggagactttctaatccctaggagaaggcaatacaggaccagatcactgcccaaaatgataccctrcttctagaaaaaaggaaacttcaggagcaagtcatagagcaagaacagttgatccacagcaacaaatggacgatatcttccatccagagcaggtaggtgccatcctgcctgggagccaataaactccacaagaggatgtttctccctcaacaaagagatggttctagagactgtcctttgagtttgtagcctaccctatgactctcgctccgctgtctgctgtttttggcagatcatacaagtggcagaaattgttaaattaaagagaaaaatatcatggaggaggctggttggctatttagataggctgtttcataatgtcattgcctcactgaggacttggctgtgtgcattctggcctgtcattttgtgtgtgttgatccacatttttattattggatacctatggaatcaaggtagaacaagagagaattaggctcacagaagtaacttaaattcatgaaatccacaggatatcagtgtattaatttttaatgagaaatattataagcagaaaataagtcatatatcagccagcctgagcattctcttcttcataggagactttcattataatcaaagagagtgggttgatgttaacaaataatgtcaccaataataactggaatgattaagatttgtctgagcaattactatatgctaggcactgttctaagctctttccttcatttaatcctgacaccaatcccaggagagaggcactattagccttattttacagataggaagccaaggtctagagaggtgagggaactcactcagcccagtcagtgacagagcagcatgtggacctcagcagcttggccctagaccatagcaccatagtctggggagaggactgccaagcagactgtaatgttcttgtccactgctttgggcacacgtctctgggcaggcttggagaatctctgatcttttactgtctgtgtctccccttttagatgtcccatataaatcattgctcttctcaaactgtcatagcttctgacagtcaggatccaacacaattaactcattacctttgcattaacattaatcatatttctatcttgccctactgatgacacaatcacctggactggattgaatgttttccttacagtaagtttcttccaaggagtatttcctcattttacaaataaggaaactgaggctcagatttgtcacaacagtgtatatttcatcaggttgctgtgcatattaaatgagctaatacatgaaaagttttaagtgcttactgtgtgggtaggttacattgcataagtacatggcaagtacttgaaacatggttgctgctgctgctaccactatttctacttcacaagaaatcagaatccgatcagtatgataacagaaccagatgcaagctatgtagctacaatatttgaagggatacagagtctctcttgtttcattcccaccctaaatgggatcatatccttccttaaatttttcaagggctagaattaatactcttgtacatgtatttaataaccatgtacagcccagaagtttattaacttttacttggtgtattagggttctcttagaggaaaagaacagaataggagacataaatatgtatatgtaaaggagagtatatacatatatataaagaggagtttattaagtattaacttacacaatcacaaagtccacaataggctgtccacaagctgaggagcaaggagagccagtccgagtcccaaaactgaagaactcagaatcctgtgtttgagggcaggaagsatccagcatgggagaaagatgtaaactgggaggagaggcctgtctctctttttcacgtttttctgcctgctttatattcactggaagctgattagattgtgcccaccagattaagaggggatctgccttccccagcccacgactcaaatgttaatctcctttggcaacaccctcacggacacacccaggataatactttgtatccctccatgcaatcaagttgacactcagtattaaacaacacacttgttcttggaatatggtgggaattattctgtcaaacttgcttctaaaatctggacagtagtctaagatccrgggccagtgggaagtgggatgtagttttgggtttttagtaatgatacagaaatctctaatcatgccactgatttatgccattcttagggtactttacatggataaagaaaataagcaattacaggaaaatagtcttcgtctcacacagcagattggcttcttagagcgaattataaggagcatccatattcgcagaggagaggtaagatgtgtgcttcctattgggcctgcctttaatgtgaagttcgggttgctacggctgctgtgctgtctcttgccttcatctttatatagctgtagctgggctcttggcctcatggtaggctgtggcaaagaggctcttggctgcacaccaggatagcagaccctgagactgctcttgatcagccagattttagtaaactatctcctcctgtgtgatctccaagcaatttgtatatgcctcatagcttcttccttaatacactgtattgtcattgccctttttctcctctatctcattaactcagcagtgagttcctggagggcaaggagtgtatctcatatattactgtatctatggacaggtactccataaatatttgagaatgaataaatattcagtkttttaacatatgtgccttactctcaacagcactgtttgccatgtatgattctagccccatctaaaacatgagcaaatctgagactcagttaagtaaagtgaagtttgctatggcaaagagtcaagcctaaagagagcatctgagtgaaagagaagcaattatgttccaaaagtccaagcagacaagtggccaaatacagagagatgcagaaaatagtacaggttcagatcaggtccatagtctgtctggtaagcaagtcagcaagagggacttcaatgaacagaatcatattctgaagccaagatggaggctgattactttcttctctggtttatatcacctactagatgtttcttcccaagatactggatagtagatcctgcttgttgatcactgttgctgtaagacttgtttggtctcagagaggtgattatttccaagctatatgagtgggttttcgtttttttttctgattttgtcaaaagtagaactgccaagtagtgtggcttgatatccagtaatttatgtctttccttgagccacaactgttttcaattgtctagtcattcattcttttacttattcattcaatgaatacttatcaattccaggaaatggcctaggtcctgggaataaaaagatagtccctgttttcagaggcctttggtctactagagaaggacaaacacatttgtaaataagtactatagtattacaagtgctgagttagaagacttaatggagtatgtctgggaccaatagctttgcgatccatattgttaaccttgaatgaagataagaatggtcacatggatcagaactatagcacatcaaactcartattccgtatgtgtcaaagrtactaacttctaacatcttgatacctattgaaataaataactccaaaattgtttttaaacttagaatcttaaggagtttcctgttccaaaatggtggcatagaggcaagctrgcttctctccctccaacaaagaaacagaaagaaatatacagcactgaggtcttcaccagcaacaatgcagaactccagcatgaggatgagtcagttcctgaggccacagagaagtggaaacactctgagcagatggtaggagaatccaacttccacatccacaatacccttccccacattctgccaggcacccactgtttggaaaatctctcaacttatggtttctacactggaaaaagtaaaacggaggtagtcaaacagattccccactttcttgggtttcctagccagaaacctgtccttgtcttaacccacaggtagtagtatcacaacttcctgcaggcagaaatatccctgaagacaggcatatccctgaaatatccctgaaacagaagaggtgggactctgctctgtaactcagccaaagaagacataagagtggctgtaggagctatgtcccccaggtctcctgggcatgagcccctagacagccttccctcactgccaggataacccctttgggacctcccctatttgggacaggcagtgctctcaccatttactagagccaaggtgaacctgggcttaaggtgccacctagagccaaaaaggaggcagggatctagcattaaagatttggctgggtgcggtggttcatgcctgtaatccactttgggaggctgcggtggatgatcacctgaggtcaggagttcgagaccagcctggccaacatggtgaaaccccatctctactaaaaatacaaaaaaattagctgggcgtggtggtatgtgcttgtaatcccagttactcaggaggctgaggaaggagaatcacttgaacctgggaggcagaggttgcagtgagccaagactgagccactgcactccagcctgggtgacagagtgagactccatctcaaaaaaataaataaataaaatcaatgcaaaaaaataaaagtcagcaagtagctgaatggataaagaaataaaacccaactatatactgccctcaagaaacccatctcatctataaagacacacagagactgaaaaggagtggaaaaagatattccatgcaactggaaaccaaagaggagcagaactagctatagtcatatcagataaattagactacaagtcaaagactaaaaacgacaaggggggtaacctatataatgataaaagggccaattcagcgagagaatataacaattataaatatctatgcatccaacaccagagctcccaaatatataaggctaacattaatagacctaaagtgagatagactgcaacctaataatagtggggactttaacacccaactctccataatggacagatcatcctaacagaaaatcaacaaatagtggagttaaactacacactagacctagtagatctaactgacacttatggaacatacccactgttgcagaatacacattcttttcatcagcacatagaacatttttcagaatagaccatatcttagaccacaaaacaagtacaaatttgaaaaacagaaattgtgtcaagtatcttctttgaacacaatgaaatgaaactagaaatcaataacaggaaaaaccttggaaactacacaaacacatggaaataaaacaacatattcccaaatgaccaatgggttaattaagaaattaagatggaaattttaaaatatcttgaaacaaatggaaatgggaatacaaaatctatgggatatgataaaagcaatattaagaggggagttttttgttgttgtttgtttgtttttagatggaatttcactcttgttgcccaggttggagtgcaatggcgcaatcttggctcactgcaacctctgcttcccgggttcaagcgattctcctgcctcagcctcctgagtagctgggattacaggcatgtgccaccatgcctggctaattttgtatttttagtagagacggggtttctccatgttggtcaggctggtctggaactcccgacctcaggtgatccacccgcctcagcctccgaaagtgctgggattataggcataagccaccatgcctggccttaagagggaagtttataacaacaaacacctatatcaaaaaagtggaaagacttcaaataacctgaagatgcacctcaagaaactagaaaagcaagaacaaaccaaacccaaaattgatacaaggaaagaaataataaagattagagcaggccgggcgcagtggctcacacctataatcccagcactttgggaggccaaggcaggcggatcacaaggtcaggagattgagaccatcctggttaacacagtgaaaccctgtctctactaaaaatacaaaaaattagctgggcgtggtggcatgcacctgtaatcccagctacttgggaggctgaggcagcagaatcacttgaacttgggaggtggaggttgcagtgagccgagatcacgccactgctctccagcctgggtgacagagcaagactctgtctcaaaacaaaacaaacaaacaaaaaagattagagcagaaataaatgaaattgagattaaaagaacaatatagaagatcaatgaaacaaaaagttgggtttttttttaagataaacaaaatcaacaaatctttagctggacaaactaagaaaaaaagagagaagacccaaataaataaatcagaaatgaaaaaggagacataacaactgagatctcagaaatacaaagaatcattagagactattatgaataaccatatgccaacaaataggaaaacctagaagaaatggataaatttctagaaacatacaacctaccaagattgaaccatgaagaaatagaaaacttcaacaaacgaataatgaatcatatgatcaaagccataataaaaagtcttccatcaaagaaaagatcagaacctgctggattcactcctgaagtccaccaaatatttaaagaaggaataccaatcttactcaaactcttcaaaaaaaataaagaggagggaatactaacaaactcattaaatgaggccagcattacccagatgccaaaaccaggcaagactataaaaagatcattcaccatgatcaagtgagatttgtcccaggaatacaaggatggctcaacatatgcaaatcaataaacatgatacaccacattaatagaatgaaggacaaaaaccatatgatcatcttattacatacagaaaaagcatctgacaaaattcaaatcctttcatgataaaaactctcaaaagattaggtttaggaggaatgtacctcaatacaataaaggccatatatgacaagcccacagctaacattatactcaatggagaaaagttggaagctttttctcaaagatcaagaacaagacaaggatgcccacgctcaccacttctatttcatatatactggaaatctttgccagagcaattaggcaagagaaagaaataaaaggcatccaaataggaaaggaaactgaaattgtgtctacttgttgacatgatcttatatatagaaatccctaaaaactgttagaactaagaagcaaatatagtaaagttgaaggatacaaaatcaacacaccaaaatcaacacaccaaaatcagtagtgcttctatacaccaataacacattatccaaaaaagaaataaagaaaataataccatttacaataacttcaaaagaaataaactactcaggaataaatttaaccaaagaggtgaaagatccgtatacttaaaactacaaaactttgatgaaataaattgaagaaaatacgataaatgaaaagatattaatgttcatgaatcgaaagaattaatattgctaaaatgcccataccacccaaagcaatctataggttcagtgcaatacctatcaaaattccaatgtcatttttcrtagaaatagaaaaaacagtcctaaaattcatgtggaactacaaaacccccaaatagccaaggcaatattcagcagaaagaacaaagctggaggcctcatactacctgatttcaaactatattacaggttgggcacggtggctcaggcttgtaatcccagcactgtgggaggctgaggggggcagattgcttgggcccaggagtttgagaccagcttgtacccaggagttcaagaccaacattgcaaaaccctatctctacaaaaaagtaaaaaattagctgggcatagtaatctcagctacttgggaggctgaggcaagaggattgcttgagcccaggtggtagaggttgcagtgagccatgattgtgccactgcactccagcctgggtaacagaacaagaccctgtctaaaaaaatatatatgtgtgtgtgtgtgtgtgtgtgtgtgtgtgtgtgtgtgtgtgtgtgtgtgtgtataacagaactacagtaattaaaacaacatgggactggcattaaaacagacacattgacaaaatgaaacagcatagagagcttaaaaacaaacccacacatttaaaattgatttttctttttctgctgcccaggctggagagcagtggcaatcacagctcactgcagcctcaacttcctgggctcaagcaatcctcccacctcagccttccaagtagctggaaccataggtgcacgccatcacactcagctaattctttaaattttttgtagcgatggggtcttgtcatgttgcccaggctggtctcaaactcctgggcttaagcaatgcttctgccttggcctcccaaaatgctgggattataggtgtcagacaccacacctggcctacagtcagttaattttttgacaaaggatgaaaatgacattgagaaaaggacagtcccttcaacaaaacggtattgagaaaactggatatctatgtgcagaagaatgaaagtggaccgttacctaacaccacattaaaaaatcaactccaaatggattaaagacttaaagacaagacctgaaattgtaaaactactagaagaacactacataggggaaaaactacatgatattgacctggacaacaatttttccaatgtgacacgaaaagctcagggaacaaaaacaaacatatacaaatgggatgggattatatcaaactaaaaagcttctgcacagcaaaagaaacaattaacagagtgaagaggcaacctatggattgggagaaaatatctgtaagctacacatctgataagggattaatatccaaaatatataaggatctcaactcaatagcaagaacacaacccaattaaaaagtaggcaaagggcctgaatagacatttctcaaaaaaagacatacaaatggacaacagatatatgaaaaaaaaaaagctcaacatcatgaatcgttatggaaatgcacattaaaaccacaatgggatatcacctcacacctgtcaaaatgactgttatcaaaaagatgaaagataagggccaggcatggtagcccaaacctgtaatcccagcagtttgggaggctgaggtggaaagattgcttgaggtcaggagttccagaccagcctgggcaacacagcaagaccctgtatctacaaaaaaaaattttttttgttttaattagttgggtgtggtggtgtgcacctgtggttgtagcttctcaggaggctgaggtgtgaggattccttaagcccaggaggtcaaggctgcagtgaactatgttcatgctactgcactccagcctgggtgacagagcaacaccctatctcaacaaaccaaaaatatgaaagataatgtgttggcaaggatgtggagaaaagggaaaccttgtacactgttgtttggaatataaattagtacagcaattatggaaaactgtggagtttccccaacaaagtgaaaatagaactaccatatgatccagcaatcttacttctgggtatacatccaaaggatttgaagtcagtatgtgatatacactatggtgtgtgaaaatgtggtatatatatatgatacaatactatttaaccttaaaaaggagggaaattctgtcattggcaacaacaytggtgaacctggaggatattatgctaagtgaaaaaagcctggcacagaaaaacaaataccacatcttctcacttaaatgtggaatctaaaacaattgaacacatgtaagcatagagcaaaatgctggttaccagaggctgaggggtgrggaggcaatggggagatgttggccaaaggtgcaatgtttcagttagaccggaggagtaagtatttgaggtgatggatatgttaattacctcaattcaatcattccatattatatatcatagcatcactttgtacaccgtaagtataggcacttataatttgtcaatattcaatagtataaataaaaatttkaaaaaactttctgaccatcacaatatccaagagaaataaaaatatatgtcctaccagaaacttgtagataaatattcatagcagcattattcataataactaaaaagtgaaaacaacccactctccatcccctgatgaatggataaacaaaatgtgttttatccaaacactggaatattattcagccataaaagasataaactattgatacttactctaacataatgaagcttgaaaacatgataatattttaaagaaggcagacataaaaggccacatattgtatgattctatttatatgaaacatccagaataaggaaatccataaagacagaaagtatattagtgattgccaaggatttgggggaggaataaatggggagtagactgctcctgggtatgggcttttttggggggtgatgaaaatattctggaattagacagtggtgatggttgcataagtgtgtgagtacattagaaagcactgaattgaacccgttaaaagggaaaactttatagtatgtgaattacttctcaacaaagcagttattttaaaaataaaattttctgcaatatctccaaaatttatataacaaaagaagcaaggtgaagatagtatgtatagtaccatgtgtgtaaaactagatagacagatatagatagatcgtctatagataaatatagataggttatatatatagagagagagagggcaaccagcttttcattctgtacccttttatgtttttcattgtttgtactatgtgcaggtattgtatctattatatatatatttttttctaggatcatatagctaatggtttatcattataacttttcacattcatcctttctttccttttaggaaacaacaattagtgacatccttgaatccgaagtagtgaatgaaatattgcctttatcaaactccaggttagtaaagtcaagacaaataaagtcaagtctatctgagatggactgtcagccatgcctgagagtcatggctgcctaactagtcctggattgctggcttgagaaggcatagctttctggggtcattttctctacatgaattatttgaatcttcttccaattcctccccttgccactccttcaactctaaaccccacagaatcctgacttaaggtaggaaataaaatatgaacataggtttaaggtaaattttatttggctttgtgtaacagttgcaaaaaattgaaattctatcaatgcctgtatccctgtaaccccgaactgctaccaacaaactctatgtacatgatgtcctcacatatggcatttcttagtttttcaggaaaaggtttggtagagtcatttgcaagtcttcaagagactgaagagatcaagtcaaaagaagcaatggcaagttcaaagtcccctgaaaagtctcctgagaatcttgtgtgttcacagaattctgaggctggatacataaatgtggcttctctgaaggagacacatggtatacaagaacaagaccaaaagtcagaactataaaatcactggtgcctaaagctatactgaacaaaagtggtaatttaaagcctggacaaaaggtggaccatgacattgagaagagttaccacagatcccaaatggatatcacccaagagtcttcaaaactgctgataaattcattaaagcagttgtaaaaatggatttctcaagtttgtttgatatcctcagatgccttgtattgaccaaaatattgactttagttcaatgatttatttaggtttctcttcagcagagcacatgtagggttaattcaacattctttcccattatcatgggtatcttttctgatttattttttaacagtaaaaacaatacagtcacattaaagcaaattttgtttttaaaaaaaccctcctatgctgggcgtggtggctcacgcctataatcccagcactttgggaggctgaggtgggtggatcacgaggtcaggagatcgagaccatcctggctaacacggtgaaaccctgtctctactaaaaatacaaaaaaattaaccgagtgtggtggcgggtgcctgtagtcccagctacttacaaggctgaggcatgagaatggcgtgaacctgcgatagcaccactgcactccagcctgggtgacagagtgagacttcgactcaaaataagcagaatacacgtacaaaaaccctcctataataccataagctttttttttttttttgagacggagtctcttactctgtcacccaggctgaattgcagtggcatgatctccgctcactgcaacctctgcctcccaggttcaaccaattctcctgcctcagcctcccaagtagctgggattataggtgcccgccaccatgcccagctaatttttgtatttttagtagagacaaggtttcaccatgttggccatgctggtcttgaactcctgacctcaggtgatccacccacctcagcctcccaaagtgctgggattacaccaataccacagtcttaacacaactaattttattttacagttattcccttttggtcctaattcaagtacatatattctaagtggttattataatattgtatattcattttcacagtttgatttttaatttactgtatataccatggaaacattttcaatcgccatatgatattcaatcatgttgatgttctataattatttttatgggaaaagttttaaatgtttaatgaagaagatttagagcaatacattatttaaaagtggataggaggttgggcgtggtggcttacacctgtgatcccagcactttgggaggccgaggtgggcagatcacctgaggtcaggagttcgagaccagcttggccaacttagggaaaccccgtctctaacaaaaatacaaaaacaattagccaggtgtggtagtgcgcgcgcctgtagtcccagctactggggaggctgaggcaggagaatcacttgaacccgagaggcagaggttgcagtgagccgagactgcaccagtgcactccagcctgggtgacagagcaagactccatctcgaaaaaataaataaaataaaataaaataaaagtggataggaaaataccaagagcttttcctgggggagggggtatgagaagagagttcacataaaccccattacacagaaactacccctaaatatttccaaacaggagtacaaagtaggtgaacagtctccagctcatctttagtgtagtgggactgcttcttcagaaaagatcagcaacattcacatccatttcatctatcagggtggaacagtactgctcagtatctctgaggatgtggatgttctataaattaaacgttctcttgtttggcatttaagctgtttttacttttttttttttttttttttttttgagacagggtctcactttgtaacccaggctggagtgcagtggtttgattactgctcatgcagcctcaacctcccatgcttaagtgatcctctctcctcagcctctcccaagtacaggcatgtgctaccatgcctggctcatttttgtactttttgtaaagacgaggtctcactctcactctattgttcaagctggtctcaaatttctgggctcaagtgatcctcccacctaagcctcctaggtgataggattataggatgagcctctatgccaggcctggttttactttgttactatttaagattatgctgtgttgaaggtctttgtgcatgtagttcttttcttcttttgaattactccagaaaacaaattcgcaagattggactgagtcaaaggatataaatgttaatattgctctaggacatcacttcctttgctttaaaaaagggttctgcctgaccaggtgcggtggctcacgcctataatcccagcattttgggaggccgaggcaggtggatcacttgaggccaggagttcaagaccagccaggccaacatggcaaagccctgtctctactaaaaatacaaaaattagccgggtatggtggtgcacacctgtagtccctgctatgcgggaggctgaggctcgagaatcacctgaacccaagaggtagaagtttcagtgagctgagaccactccactgtactccagcctgggcaaaaagtgagactctgtctcaaaaaataataataataaatacataaataataaaataaataaaaagtgtgtcaacatactgttttcatagtcaagttactcaacctccttgagcctcaatttcttgattcctaaaatgggaacaataatagttctctatcccatagggttgtgaggaccaaatgaaatgaagcatgtaaagtatttagcacgtagtaactgcttaataaatgctatcatcatttattttcactagaggtttatcaatgtactatttttttcacaacctcatcaacattggatattatcaattttaaagatttattctaaaacagttggtataaaattatactgaagcgtgactgctgctgttccttttccccctcctcccctttcttctttttcagttggaggagaccaagaggagaggatcagtaaccagaaataaaaatgaccctttacattgagacacactgtatttttatatgtaatccttgctttctcagacaacagagctagaaagatgatcataggaactaggaaataataactattttattaaatgcatgctgttatattgaatgagccttgcccaaggtccccttctttcactaaattcattgcatctattatttattgaatacctactatatgctattcagtaggcgacattgcagctacagctgcgaataggaccaggagagtctctactttcatggagtttatatgctatcagggaggaagattatgtgtgtgtggcaggaaatgaggtgtagacacataccatacgaagataatgtggaagtgggggtggcatgaagaaaacaaaccagtgatctgaatgaccaagggctactttagattaggtctaatgttgcctctcaggaggtaacatctggggtgagccctgaactacaaggagcattacttcccacacgcataccccaaccaacccccacaatcccccgccaacccacattaagttctggaaggaatatttcagacagaagtaacagctattacaaagccctaaagagaggagggatctcagtgacctggaggaacagacaggtcagagcacagtaactaagggcaagtggtacaagatgaggtcaggtacgtgatagccagataaatgcactgtagggcttcgtatgcacggaattggattttattctaaatatgggaagccaggagttatttttaaaataaataggaagcacaagagttattttaaaaataaaaaataaaaaactctagttgctttatgggaaatgaattggaaatgacaaaactggtagcttttgtggcagaacaaacattatctattgtcctgacttagaggaagggatatttacttagcaagcctgtacgtgccaagctgttctaaacgctgaggatgaacaaaccagagttcctgccttcacggtgttcacactagcgggcagaagacagacagcacgtgtggcggtgcagagggcttggctgcaagagccgataaggaggaccctggcgactgcctagtccaaaagtcctagctagagcaagatcaacttgtactgcccttagtacagccacgtgagtggggtgaccattgaccttaaccaaaaagatgtcaaggctttcctcctcctcactcccgcgtccccagtgccaggcagagtctctcagctagaccctagcagtctcagcacacaccgcacggggcgacagcttccgggggcggagcctggtctcgctccacgtctaccgcgcctgctccccggacgaaatccgcggaccgggctttaggttcgccggaatcccacgctcccgacttctgcttccgggtcggagccatggcggtggcaaattcaagtcctgttaaccccgtggtgttctttgatgtcagtattggcggtcaggtgagatccaggaggctgcccacacctgcgccgaagggaaactgctcggggctaggcaggcagaactcacccagagagagcggactcgggaagccagccagaaagtgaaattgcacccgaacctaccgacctgccgggcggggggaaaggaggaggaggagtctccccaatcctagcgccccgcttctggaggaactgggcggttagactagggaggcggaggtgggagataccgagcggcagggtggtgggtcagcccatcatgccccctgctccgtgaagccctcatggtcttggactgggccttctgacactctcccgctgattgcaggaagttggccgcatgaagatcgagctctttgcagacgttgtgcctaagacggccgagaactttaggtaaggacgtgctccagctccgctggattagctgaggcagaagtcgggctccagtcagccgcctgaaatagcctgtctacctctgtccgtccgctcactgctcttgagacctgattcctccatgcattgctctgtctggttgccgtttggattgttcccgtgttaatttacgttgttagtctgtgtgactgcgtgtctggacgtctggctggccgattggtggacttgctggctccagtgtttattctttcccgtatttagaggcgctcacgactgtgacatcatagtgattgaatcattcattttttgtccctttcaggcagttctgcaccggagaattcaggtcagtttcagatgtgtttgacttctttgcctgctccagaggggtgttctggggctgcagtgagggtatcggtgaaccacctgctggccttgaatgattgctggtgacagtgatagaaggtaatgccccaagggtctgtccctagtttatttgccttctttatgtctgtcaaccatctttaggagagtccttttggctccagtgcatggtaaactggaaaggccttgtgctacctgctgtcactccaagtctctttcttttcggttataggaaagatggggttccaataggatacaaaggaagcaccttccacaggtaaggctcttggcaagccatcctggagtctttcagaaatatttcctgggggattaggctctttagaggaaaataaaaccagagggtaattcttacatttcttgagaagaaatgtttttgtggactcaacaactgaagatttattaaatgttctaactctacttacactcccccacttcttaggtctttaaaacagaaactactcatctttacaatatcttgtctttttcatgcacttgtttgtgcgaatgcagattttttaaaaagtacacttgtaatcctaaagtgcatataatatatcctgctggttgatatttataactaattcctaaaatgatcatatatgattgtccaaggataatcatatttcctggggagtggagtatgtcaacacttagtctcatttcaatatagaatctttctcatggcctcactgtggttagtaacaatgttagcacataattatatcacagctttagagctttgggtctctaatccccagtaagactcctgtgaagtggtatgggtgatctgcattctacagaggaggaaactgaggataagaaaggttaaggaccctccctaggggtaatagctaacagttgttaagcccttacatgtttagcagtacatttcacataaattctctgtagttctttcccccaaatttacatcaaacccttgctctgccttttgctttggcaagtaagctttcagccccttcttcttattactgttcaggtaccagatcatgcacttgatcaactctaacat

SEQ ID NO: 96330 - DNA, 13960 bp, Homo sapiens
agtgagctcagggtatttgtctccctggcttcctctctgctaggaagcagtgtgttggttctgtccttttaccaaaattcacagcttctgtgagggggtcctctttatagagctgtctgtgtgaggttctggtaaccacactcaccccttgcccctaccagcctgggggatggcaatcccccattgtttctaggccaaggatactatactattccttgaggtttccttaaaccctgcccatacctttgtaagtattacctttattaaactctctttcaatttcacctttagagtgagccatctgtgtcttgacagagccttggttaataccgtgtctataacagtttgtcaggctcaaacattagctagaaaatgctgatgaggtatgttagaagcatagaaatcaattgaaaagtgaattacccagagtaactaaagttataaccatctcaagaatgtctctggtagaaaagaattttacaaagacagaacattttaatcaggatatgcaaaaaaagataagaacaggacttcagaaagaatctacttcttccaggtaggccttttgctgtgaaactcatcagctttagaaccacaaattcagaattacaaaaagacatcacaaaatctaatccagcagcctcatactgttaggtttatatttacttgtttctgaacatatttttaaaaccttatttattgtggagtcagaatattttgtcttttgaagatagagaggacagaaaaaaatagataatatagttaaccatgggcccaacacacacgaatcactggattcttagactgtgtcactgattatgtagactcttaaatcaggcagctggtgcaaagtcatcaccaataaatgtcactggagagaagaaaaaagaggcccagtatgtggttcagcaccaagaaatatccatttttttcatttagttatgtatggaatgtacatgttataagtaacaggcaccattgaaaacagcaagacagatacgtatgtactgacagggaattatatctaagacattttgttgaatgcaaaaagcaagtcacaaagcaatatgtataatatgtatgtatacatgctatctagtatgatgtcatttatagtaaaaagagagagaagggggaagagagagaaaaagaagaaaagagagaggtaattgtgtagaaatagtttagggacaggcgcggtggctcatgcctgtaatcccagcactttgggaggccaaggcaggtggatcgcctgaggtcaggagttcaagaccagcctggccaacatggtgaaaccctatttctactaaaaatacaaaaattagccgggtctgatggcacacacctgtaatcccagctacttggaaggctgaggcaggagaattgcttgaacttgggaggcggaggttgcagtgagctgagatcacgccactgcactccagcctgggtgacaagagtgaaactctgtctcaaaaaaacagaaaaaagaaaagaaaaagaaatagtttagaactgtgctaatatggtagccattagtcacatggggctatttaaattcaaattataattaattaaaattaaataaaattaaaagtagtttgtcattcacattagccacatttcaggtgctcaataacccatgtgactactgggtactatactgggcaatgcagatatagaacatttctatcatcacagaaagttctactggacagcactggacttgaatgatacacattgaattgttaattggggttacctcttgggaaggagataatattttgagagaagagatgaagagatttcattgtttattccatatatgtctgtcattttgttttatttttaaaatgagaatgcattcatgcaatgttcataatgcaaaaataaatttaaagaaatatctcctctcctttaaattcagagatgcagaaaatttaatcaaggctcaggtctcccaaatgtagcagggatgggggagggaggtctatattaagaaaagaggagtattttgaaaaataaaaactattatccagaaattaactgttaaatgatatgatttgcaggtatatggaatatttaaaactcatttgagctttaaaaaatttttaaattactttcatggtatctacccgtaattcatttttctaacatcagacaaacactttttgagtccttgctgtgtgccaggcactgttctagcttctgaggatacaacagggaacaaaacaaaacaaaaaattttgccctcataacacttaaaaataataaacaagcaacaaaaaagaacataaaacatgtagtattttagttaaagggtgattaagtgttatagaaaaaaataaggcaaggaaagggaatagggagtgttgggggtatcactgtaaataggatagtcagagaagttgatgtatgtgtaaatatataaaggatcaagtgagccatgtggagaaagagcattcctggcagagaaaacagtaagggccaaggccatgaggcatgaacatgcctggcttcttccaggaataactagaaggccagtatgcttggaggaagcgagcaaaaaagaaaagatgtagccagaggtgagaccagaagaaaggagatgagaggcacccagtcgtgtgagctttttaggacactgtaaagactggctttcactctagggagatgggagccatcagagcgtttcgttttgtttcgtttttgagagggagtctcactctgttgcccagggtggagtgcagtggcgcgatctcggctcactacaacctccgcctcctgggttcaagagattctcctgcctcagcctcccaactagctgggactacaggcgtgtgccaccacacctgcctaatttttgtattttaagtagagacagggtttcgccatgctggtctcgaacgcctgacctcaggtgatctacctgcttcagccttccaaagtgctgggcatcagagcgttttgaacaaggcatgataatgatctgacttagctttaacaagaccatctggctaatgtgttgagaataaactgtaagaggtcaaaggtagaaacaagaaaaccactgaggtgtctggtgtaataatcaggcaaaagaagacagaggcaggggtcagggtgatcgcagcggaggtggtaagaagtggtcagattctggatagattttggatccataaaacttgaaacagattggatgtagggtgtgaaagaatgagaggaatcaggataattccaaagctactggcctgaagaactggaaggatggcattgccattccctaggaggggtaaaacactggaagagtaggtctaggggtgggagggacaacaaggatggggaaattaacaattccattctcacagatttggtttgacacacctattagatctccaagtggagatgtcaggtagacagttggatgtataagtctggtgtttgggagaaaggactaagctagagatgcaggtttagaaactgagagagtatgtgatatataaagccattagactagattcactcattcagctcagggcatggatgcaggtagaagagaggtccaggtcatcagatgaggaaacattgtatatttaagctccgtctctccctgctattagggaagctctaagaaagcaaggacttggtctgtctactcattgctatatccctattccccagggcagtacctggcatatagaaggtccttaagaatatttgctgaatgggggaatttaaagtcacaggagtgagaatgataattgataaagacaaatacagactttaaactcaataataaaataaatatatttgtcaatctttcatagctttttcttatcatcatcataatatatattatagaaaatttgggaaagttaagagaggaaaataaaagtcaccaataattctttctacttcccagagacaactatagttaactccttctatatttcattttaggctttctggtatgacatatatacatattaacaagtttggaatcttgccggatagacagtttttttcactcaatatatcatgattatcttatcatgtcacttaaatagttttcaacctcactaattttgatagctgtaaaacatttcactgaaaaagaaccgtaatttaaatacttctccatcattgaatattaaattatttatactttactaatataaataacatgctaaacataattctgaacctctgattatttccttataacagatgcctagaaactgaattacttagatcaggggtatgaacattttaaagataaatatttgaagaacatttcaacatgtattggtaaattgcctcctacaaaagctgtatcatttatactcacattacaacgtatgaaagcacctatcttgctgccatctcactggcattgagtattacctttgtcaattttatagaccaaaaaatggtagcatgctgtttcaatttgcattattttgattacaaaaagattgaacatttttcaaatgtttattggccatttgtattttcttcagagaataatctgtcctttgcctatttttctattgttgagaataagtatcttgaagttggttaaaactaaaacaagagcacagtttaaaaattatcttaaatatcttttaaaaacacattttccaggctgggctcagtagctcacgcttgtaatcccagctcgttgggaggcagaggcaggcagatcgcctgagttcaggagttcgagagcagcctgggcaacatggcgaaaccctctctctatgaaaaattagctaggcatggtggtgtacgcctgtagtcccagctactctggaggctgaggtgggaggattgcttggtccccggaggtcaagcctgcagtaagctgtgattgcatgccactgcactccagcctgggtgaaagagtgagaccctgtctcaaaaaaaaaaaaaaaaaaaaaaaaaaaaaaacaacacgtattttccaactttatttagagttcccacataataagttcattttttaaaccagtaaaccagtgcctgaatgctcacatctaggtcagcttagtacatactgcccttttggtgatcagagatcagaatttttattatgccctggagatacaggcttccttaaaacactgaccacttataaaccaaactccatctcatgcggccactttccaacctcacagcagtgagtgaatatcaaatagctagaagactcatagtactataagtaaagtcacatttcattgattctaaaatgtacatttctccccacattttagcatctctgagagtaggagggatcttacaatagatattatcttaaaatcagtgttggccattttttcacattgtaacaccattgaaatggaagtgcaacttaccatgaatagcctcttagactcattaaatgcatagatgctattaacaatagaaaacaatctttaccaagatataaaaattccacattctaaataattttttcttagataattgaatttaagtttatagtgaacatcaataacaatgttatatcatattcatattccacctccttccccaaagaacttgaggtgattttaaaaataaaatttgaaagtttaaaataatagttgcaagatctggggtgaggaggagaaatatgttttttgatgttttttgtttgtttgtttgttttgttttgagacagagtctcgctctgtcacccaggctggagtgcagtggcgcgatctcagctcactgcaacctccaccccctgagttcacgccattctcctgcctcagcctcccgagtagctgggaccacaggtgcccaccaccacgcccggctaattttttgtatttttgctagagatggggtttcaccgtgtcacccaggatggtctcgatctcctgacctcgtgatccgcccgccttggcctcccaaagtgctgggattacaggcgtgagccaccacgcccagtcaaaatatgtttgttttctaaaggtcaggggtgaaatgagcccaaagaaatgcatatcacagtcctctatatttcaaaaaggtaagactacaaaaatggctttaagctcccagtagtcacagcaaagaggaaaacaaagttaatgttgtccttaagcacaaagcaaaatagctattgaggaaaaagcacagcattttcctgatgctgagttctgagagaaattcctcccgtggtgccaccttaaagggtatgatgggtaatactgtagtaacatcggtactgatacactcaacaacagccccctagtacagaaagtcctgtttttgtttgyttgcttgtttgtttttgagacggagtcttgcattgttgcccaggctggagtgcagtggcgcgatctcagctcactgcaagctctgcctcctgggttcacgccattctcctgcctcagcctcctgagtagctgggattacaggtgcccgccaccatgcccggctaattttttgtacttttagtagagacggggtttcaccatgttggccaggatggtcttgatctcctgacctcgtgatccgcctgcctcggcctcccaaagtgctgggattacacgcgtgagccaccgcgcctagccagaaagtcctgtttttttatgtttgtctccatagtgccttccatgtaaggcagaaccccagcaccaaaaagcggttcagaaaagcattttcttyaaggggccaaacgaacgtgcaccctgaaaatacagtttttttctccctgatggttggatccaatggtaagatttagaatgcctaaaccaatgttttctaatgtgggatgggcaagacaatccattagacagcaacacttgtgtttatacctcagatccttgaataatgtcattttgttcgatgacctttcattataacgtggatgagaaaaaaaaaatattttggttccaggtcagggctactgtccgtgaagcattttcgcattctcctcatatctgtgtgggttttctctgggtactctggtttcctcccacatcccaaagatgtacacagcaggttaattagtgtctttaaattgtcccaatgtgggctgggcgcagtggctcacgcctgtaattccagcactttgggaggccaaggcgggcggatcacctgaggtcaggagtttgaggccagcctggccaacatggtgaaaccctgtctctactaaaatacaaaaattagctgggcacggtggcgcatgcctgtaatcccagctactcgggagggggaggttgcagtgagccgggattgcaccactgcactccagcctgggtgacagagcaagactgtctcaaaaaaaaaaaaaaattgtcccagtgttatgaatgtgttgtgtgtgtgagtgtgccctgcgatgggatggtgtcctgttcaggtctggttcccaccaggtgccctgaggtgccaggataggtcccagtcacccattaccctgaactggaataagctggcaaataattatcttgtttttattagtctttcttaaatgtatacatagctcacatgtatttcaatgttgaatgatactagcagtgttttggtctttatttagaagtgtggtggtgttgaagtggcttctttctcagtatagttattgatttgtggtgacatgcctgaatcagccaagtctgttcctgctccaaagaagggtgccaagaaggtggtgtgaccaagagccagaaggatggcaagaatcacaagcatagccacaaggaaagctactctatctacatttacaaggtattgaagcaggtccatctcaactctggcatctcatcgaaggccatgggcatcatgaactcatttgtcaatatcttcaagtgcatcattcctgatgcattacaagtactcgacgatcacctccagggagatccatacagcttgtgcctgctgcctagggagatggccaatcacactgtgtctcacaacaccaaggccctcaccaagtacaccagctccaagtgaacaacttctactttcaaaaagcaaaggctcttttcagagccacttaagccaggtatagaaagacaaatactgcatgttctcactcataagtgggagctaaacaagttgatcatatggaggtagagagtggaatgatagataccactatcattgagatagtggctgggaagtgtgtgtgggtgagcggggctagggatgaagagaggttggttactgggtacaaacatacagttagatagaaggaataaattctaatgtttgatagcagagtaggatgattatagttaacaacaatgtattatatatttcaaaatagcttgaaaagtggccgggcacggtggctcacgcctgtaatcccaacactttgggaggccaaggtgggtggatcacctgaggtcaggagttcgagaccagcctgaccaacatggtgaaaccgggtctctactaaaaatacaaaaatgagctgggtgtggtggcacgtgcctgtaatcccagctactcaggaggctgaggcaagagaatcacttgaacctgggaggcggagtttgcactgagccaagatcataccactgcactccagcctgggcaacagggcaagactatgtctcaaaaaaaaaaaaaaaaaaaaaaaagctagaaaacaagatttgaaatgttctcaatacatagaaatgataaatactcaaggtgatggacaccctaaataccctggcttgatcattacacattctatgcatgtaacaaaatttcacatgtaccccattaagtatatacaaatataatgtaatcaggccaggcacggtggctcacacctgtaatcccagcactttgggaggccgaggagggcaggccacttgaggtcaggagttctacaccagcctggccaacatggtgaacaccgtctctactaaaaaatacaaaaattagccgggcgtcgttacatgcgcctgtaatcccagctactccggaggctgaggtgagagaatcacttgaacctaggagatggaggttgcagtgagccgagatcacaccattgcactccagcctgggcaacagagcgagactccgtctcagtatatatatcaataaaaaattttaaaaagaagtttggtgatgttgttgtggccagaaatacgccatacgaacttaactcttgtttacataaattagcctatgttaaaactggtttcattccacatcattttgcttaaagttacagttcccaagaacctcttgataatgttatgtgaggacttactgtatttatttttcatgtcaaaaaataagaaaaaaagctttacaaaaaccaagaaaaatatctatttttgtttgcttgttttgagacaggatctcactctgtcacccaagttgaagtgcggtggcaccatcaccactcactgcgccctccaactcctaagtacaagcgatcctcttgcgtcagcctcctaggactacaggcacataccaccatgctcatctaattaaaaaaaaaaattttgtagagatagtgtcttactatgttgcccaggatggtctggaactcctaggctcaagtgatctttccacctcagtgtcccgaagtgttggaattacaggcatgagccatgacgcctggccttctaattctgatatatgggtttacactggtgccccatttctgtccacatcaaatacatgaggtatcctaaagggaatgtgaaagttgggtggcctgcatcgcctgacattttttcatttgctttcagcttattgcaatatactgcagttcacctgagcctagataaaggtatttgtggattatattatctagttttaactaaaccaatgcacataaatcagcaggtggcttaaaacatttcctgcaggccgtgcgcggtggctcacgcctataatcccagcactttgagaggctgaggcaggcggatcacgaggtcaggagttcaagaccagcctgaccaacatggtgaaaccccgtctctactaaaaatacaaaaattagccaggcatgatggtgcatgcctgtagtcccagctacttgggaggctgaggcaagagaatcgcttgtacctgggaggcagaggttgtactgagccaagatcacgccaccgcactccaggctggggacagagtgagactccatctcaaaaacaaacaaacaacaacaacaacaacaaaaacatttcctgcaatgaaataggaaagcaaagataatgcaaacacaagtgaacaacaagaaaatggcagagctgacccttctactccctgtaaaagttctgcagccaccacattatcaggtaccaaccacgacaacccaatctgatctgacaagaagatagctgaattgaaaattatctcacagaagaccattagaaatatctgctaccaataacattaaatatcaccttgagatattagctaatgatggtatgaagttattgtaattaacatattttaaaatgaagcatccagaacatgaagataaacctctatgatttttccatgtttaatgtttcaatgttgtgagtcatgtgatactcaatccagcatgtcacaaaatactgttacatgtaacgataaatgtttagaagcctttttgagtttccataactcaatagagaaaaaacaaaagtctcataccattgcaaaatcatctattcttcatgctacagtaaaactagctgctctaatgtgtagaaaaaaaaactgatgtcaaactaaaatgcattcctttgtcagcaaatatatttagaagacatatagaaaacattgttgaagattgaaagaaacaagcattagaacaaattatgcagtgtgggaggtttgcaatatacttggatagaagtacagatatttctaacatgtctcagcttgaggtatttgctagattctatttcaataataaaacctctttttttctgagtcactaaaggaaagatgttccaaagatgatattttctgcaaagtggatgatttctttaacagaaaccatattttacaagaaaactgtaactaccagtaaggtgattgctttacccttggacctctgatctcccacctatttgagaagtactctctgtcttcttttcctgactctttgtctattggatctctaaatgttgtcactcagggttccatcctggaagactgtggggtaaagtagattaatttaaccagatttcctgtagcaataggcagataaaaggaggattctaaaagctttaattacagctcttctatttttccccttcccaaaccctgatgcaaaggctctgggtcagctattttctagaattcaccctgtagcagggttattctgaggtactcttgctacctaaccaatgccatccatttcctcagcccacaacctgtctgactgtgaggccaggcatagtacacaattgcgggccacggattttaattcacagattacctgactagggctggactggtcctagacataaggtgtttcgttcaagtgctcactagactctctttggggctggatatactggcccctggaagggctgagcactttgaagctctgttagcagccaagagctataattgtaagtaggatgtgatgcctttccttagagtttattagatcaccagaattatttggaaatgggaaatacaatgtagagtgttccctttcttcattattgtgaataataatatctttaaactttgcactaaagaataatagacttatagagaagtacacatatcagccaggaacagtggctcatgcctctaatcccagcactttgggaggccgaggcaggtggatcacctgaggtcaggagttcaagaccaggctggccaacatggtgaaacctggtctctactaaaaatacaaaaattagctgggtgtggtggcacatgcctgtaatcccagctactcaagaggctgaggcagaagaaccgcttgtaactgggaggcggaggttgcagtgagccaagattgcacgattgcactccagcctgggtgagagtgagactctgtctcaaagaaaagaaaagtacacatatcctaagtgcagctcaatggactttcacaagctaagtacacacagccacatatcacgtaacctaacacttccagcgtccatcccatgctcctaccactacaccgatttctaacatcaaagatgagctttgcctattttattttatattttatagaaatgaaatcatgtggcgcatattagtttgtatctggcttctttcattcaatgttacatttgtgagattcatccatattcctgcaggtggttgtagattcttcaatctcactgctacccagcattaaattgtgtgagtgtactacaatttttttaatccattctgcttctgctgggcatttgggtagtttccagtttggggttattatgaataacactgctaagaacatcctaatactagtttttttggtggccatgtgtacaaatttcttaggaatgcaactgctgggtcaaaatatttacattgaatttctagttttactacaaagaacacagatatctgatttatttctactcctgttcccaaacacagcagatatgactgggagggctaaataaagcatctctaaaagtgcatctaggcacatcttgcttccgaatcacctgggagcttgagcaggcaattctctgctcactgaagtttgtgaactatgtgtcatggaaataggggctttagaagtcagacaaacctaatttcaactcccagcttaatcagttaatatttgatctttggggccgggcacggtggctcacgcctgtaatcctagcactttgggaggccgaggcgggagggtcacttgaggtcaggacttcaagaccatcctggccaacatggtgaaaccccatctctactaaaaaaaaaaaaatatatatatatatatatataaattagctgagcgtggtggcgtgcacctgtaatcccagctactggggaggctgaggcagaagaatcacttgaacctgggaggcggaggttgcagtgagctgagatcatgccactgcacccagcctgggtgacagagcaagacttcatctcaaaaatatacatatgtatctttttggatctttgggaaattacttgattatttatttccttacttataacatgaggaatagtaatgcttatttcatgggtctgcagcctgattaaatgagataatacatatagagcattcaacacagtgcccaatacagtgtgcactgtgaatggttgttcaattccccgacttgcccatggagaaaaaggagtgagaccactagccttgcatcccatatagaacaattaccttataactaaacaatttggaggtacaatagaatttattattatgtgactgtgcctacagtcaatattaggcacaccagagatgaaacacagaagcctgcatgtaccaggaatgggctttcaacatcatttggttggcaataggctgtacacatcattcatgatgtttctattaacctattaccgttgttatttttcttaaatgacagtttaaataaccctcagcatcctgatgtcaggttcagcatgcatgaattaccgagtagaaaacaaaaacaccaagtcaaagattttggcgggagggaggagattatatgaaaatgaattctgctcaataggctagccccgtgtggccctgcacactattacacaggcgcacactaccagggctcactgctttattttctaatcactgtgttttcaagtctgccttcaagattgttgagtgctaaactgtctctttatccccaagcaaggtcagcttcccagcctcccatacaacccagttcatgctgggataaagaggaaggtaggaatgttaaaacaataatgctatggtctgaggccagcaacgggtaatcagatcctagcaaggtagaggctgttacctgggagattattggaagaaagtaggcctagcttgcaatgacttagtttgtttctaccttccttgcttttttttccttttcat

SEQ ID NO: 96331 - DNA, 16229 bp, Homo sapiens
gatggagttattactcaaatcactcttcttgagctcagaggttagagtttttatagatgatttggtgggcaggggacttctgattggctggggatgaaatcataggagtgttgaaaatgattcacatgcactgagtccacctttgggtggggccacaggactggctgagttataaatcatggattcaggcaggatcagttgattgccaggaagtctgaaaaaaaatctcaaaagaccaatctaggttctacagtagtgatgttatctacaggagcaactggaaagtcataaatcctgtggcctcaggccacatgactcctgagcattaagggattatagaaaccatacctacattttatcagaactcaggcccctcccataatcctaatcttgtggcctttcattagtcttacaaagggtggtttcagttccccaacagggaagggatttgttttagggagggattattatcatccttgcttcaaagttaaactataaattcctcccaaagttacccaggcttacacccaggaatgaccaagaacatcctggaggtcagaagcaagatggagtcaactatgtcagatttctcttaccgtcatcattttgcaaaggtaatttcaatcatacaagaaatacttcaaatcccaagcatgaaaatacaaagtaaagcacatctggtcacatcaaaataaagctgccaaagaccaaaggcaaagtcttaaattaacatcgggtagaattttaaaaagcatacttccttcaaaaagcaacaattagattgatgctgacttctcaacagaaacaacagaaaccagactaactgaaagaaaataacaactaacctataattctctaaccagtagaaatacacttcaataatgaaggcaaatgggattataaaggataatacgtctgaataagaaaacaaaggcacttctatttggatttcagtgttgtgtagtacctaattatgttttcttcctttctattaaaaacttagagccaatactatgataatacaaattcatcagagacaaatgttgattttgttatcaattgtttacagagattaaaattcatttcttatctatgttttgaaatcacattactatgaaattctctataatgtaaagaacaggaaaatgaaagtggcatttgtttacacagcagtggaaacacactaagcaaaccattctaccgataacacctgttagctggcattaaaaaaaaaaaaggtaaaagtattttcaacaaataaacagtgagagatttcatcacaagacccatactaaagaatatgattttttgagtacctgaaaaattatcccaaacagaagcacagagatgcaggaagaaatgaagagcatgaaaaaaggtaaaaatatgggtaattacaaatgtatgttgactagcaaaatcttgaggagtcttgaatatacgcagaattaaaatttatgacaacaaaatgaaaaaggtagaaggggtataagtggagttaaaatcatctaagattctagcattatcagagaaacagtaaagataaaaatccattagactttaacaactcaaggatgcctattataatctccaggataattgctaaaagaatatatagctaatgacataatagaggaaaatggaataataaaattatttaattaatccaaaagaaaaaaggaaaagtaacatttaacaggtaggagtagaaaaaacatggtaagaaaatagattcaaatctaatataaatcagtaattatattaagtgtaaatatttttaaaaaccaaataaatgacaaattgtattacagtagaaaaaacaaaactcaactatatgttcatcataggaaatacactttaaatataagggcacagaaaggttgaaataaaaggatagaaaagatacaccatgcaaacactaataaaagctgacgtgcctatactaagatcaaagtagaacttaaggcaagaagtattactaaagataaaacggtggcattttataaaaatcacagtgtcaatatgccaagaaaatataacaattgtaaaatatgcatgtatctaataatatagcctcaaagtatataaaacaaaaactgacctaactggaagaaatagatctgcaagtacatctctctcagtaactgacagaacaggcagccagaaaaatctataaggatatagaagatttgaacaacataggtaaagactcaacctaattcagacatagagagagagaacactgcatcaagcaactgaagaataccaattattttcaagtggacatggaacatttaccacaattgaatgtatacagggccataaagcaagtcttagcaaattgaaatgattgaaatcagagtatacaaaccatatactttgtgcaaaccataatgaaattgagctggaaatcagtaacaaaaagataattggaaaatccccatatatttggaagttaagcaatgtacttgtaaatagccaatagatccaagaagaaattccagtggatatcagaaaatattttaactgaatggtaattaaaaggtgacatatcaaaacatgtgagacgcaggtaagtgtacttagatgaaaatgttgtaggactttctccttagctcagctaaaaaccgggttctttgggttcttgtcacataaccaggaaaagattaggcttgtggacacacagaagggtaagaaaaacgaaatttattgggtgtaaaaggaaaaaaactcagcaaagcgaaaggggttcctgttaacaggcccccatctcacagactgaatcctaggttgccacccagaaacatgagaggccaagctccttcccccctgcaaacagtgcgaacttcccgaggtcccgccccatccacccggtggcaggtcggaggttctcccgggagccctttttacttggctgtttcggaaactgatggtcttaagcacacatattaaaaaagaagaacggttaaaaaccaatgattgagacttccagaatgactgagtaagggttaggatggattctttccatcctcaaagaatttttactatttgacctgtttggcagttcactgaaaagcttccttcacagaatttgtctttatttgacttgactcagagcttactctgtgcaaataaccctatcctcagggcatttgtaaaaaaaaaaaaaatggtaattgtttaatatcatagctgcctgatttggcattactagctggggttaaccataggcttgaccaataactgaaaaagaaaaactggagaataagacggagactttgaaaagttttgatatagtcctgagaatttgggtcacatgcatgtgactgtgcacatggctgagaaagacctgagaaggccataatctctcacctcaggctgactttgaggctctcacaagaaggaagcgaaggctaggcagaatcataaactgcctgcatgatcactaaaggtatgcccaacctgcacccccgactcccaaccaaacacacacacacacacacacacacacacacacacacacacacacacagacaccccctcagcaaaggaaaggagacatcagttcatggagatctctgtccagtcattagctgatcgttaagctaataagcagactttaatgcccacacacgataaaaaatatagacttcatagaatttgtccaagaaagtcactaaatgaacaaatagcaacagcaacaacaataaatgccaccaacaaaacttgggagtggaaatctcatttttagttactatattattttaagtgtccaacttcaacaaaattttttgaggcataaagaaacaggaaaccctttattgcaaacagagttatatataaagggggaaaagcagacagtagaaactgttattctattttttttttttgttttgagacagggtctcactctgtcacccaggctggagtgcagtggcacgatcatagctcactgcagctcgacctcctgcactgaaatgatccttccttcctcagccttccaagcagctgggactacaggcatgcaccaccacaactgactaatttattttagttttgtagagacagggtcttgttatgttgctctggctggtctcaaactcctaccaggaggacgctcaaaccatcctccctcctcggcctcccaaagtgctaggattacaggcatgagccaccatgcctggcctgaaactgttattctctgagtaattgtctttttggttataaactgtctctgaggaattgcagatattgggcgattaaaccaagatttttagtcagctattacaaatgtagttaaagaactaaaagaaaccattccaaaagaattaaaggaaaacaaggccaggtgtgatggctcacacctataatcccaacagtttgggaagccgaatgggtggatcacttgagcctagaagtttgaggccagcctgggcaacatggagaaaccttatctctaaaaaaacacaaaaaattagctaggtctggtggcgcacgcctgtagtcccagctacttgagaggctgaggtgggatgatcacttgagtccaggaaattgaggctgcagttagccaagatcataccatgccattgcactccagcctgagtgacagagacatgtctcaaaaaaaaaaaaaaaaaagcattaaaggaaagaattaaaaactatgccttaccaaaaagagacagaaaagtatgtgtgcatacatatatatatgtgtgtgtgtatatatatatacacacacacacactttgtatacatatacttttatatagatatatagaaaaaatatatatatagaagtgtgtgtgtgtgtgtgtgtgtgtgtgtgtatatatgtatatagaaaagcacatatatccttttctatatataaccaaacaaattctggagacacagtgaaaatttctggagaaattctggatggactaggggtccactgacagatgaatggataaagaaattgcagcatgtatataaagtggaatattattcagtcataaacagagaatcctgccgtttgtcacaagatagatgaaactggagaatattatgctaagtgaaataagccagacacagaaagaaaaatgctgcacaacttcacttatatgtagaatattaaaaaaattaaaaagaagaagtaagaaaaaagtcaaatacacagacaaagaataaaatggcagctgctacgtgtggggagtggacgggaagagggaaatcaaagggtacaaagttgcagatatataggataaataatttagagatctaaggtacaacatgaggactgtagttaataacactgtattaaagatttttgctaagagagtagattgtgggtgctcttgctacagtgcacaaaaaagggtaactatatgagatgatggatatgttaatttacttgactatttaaaaattttactacatgacaaaaatcttggagttgaaaatgaaaaattaaagagggattcaacagcatatttgaactgacagaagaaaaaaatccatgaacttgtaaacaggttaattgagattatctaatctaagcaacagaaagaaaaaagaatgaagaaaaatgaacgtaactttagagacctgggggacacactcacgctactagtattcacataatatgagccctagaaggagaggagacagagaaaatggatgaaagaatatttgaagaaataatggccaaaaacttctgaaatttgatgaaaaacggcatcaaatctgcatatccaagaagctcaacaatctccaagtagaataaacctcaagaccaagacacatcatagtcaaactatcaaaagccaaagacgaagaatctggaaagcagcaagagaagtgattcatcccacacaaagcccccaccagaacatgacttcctagaaccatgctcccggaaccaatgctgacagaatctaaggtaacaatcacttgtgagtcatcaacagcactgccctatcagtgaagtcaaagattgaagaggaactctttcaaacctttcaagtgccccctcctttccttaaagtcttttataggggtccccttcttggccatctccatcctgtgagtcaggactgaaagggcacagacaggtcactgccagcattgttggggcaagcctgcaagcacgcatcactggggatctgacatgacaatggccgcctgccccctctgagggctacaggacttaccccagtgggaagcagctaagcagtaagtaactgttggctttagactgtatagtatttgttctaagcataaggtaatatataatattttccttaaaaagaagctcctagtcttacagtataactgaaaactgggcatgtatctttagtgcatgtttttacagctatacagatacacatctacagttttatattgtactttatattttaatacacatctacctatttgatatggttcttattttctttctttcttaaagaaagtttagtgttcacttgagaaaaacttggaggtgaatgttttccaacatcctaacccagtagacgcccattcatccagctactatttcctgaacacctatcctgtggcagaacatttcgctggatgccagacatagagatggaagatgaggtgtttctagtgggacaggaagggcacatgctcagtctgagcttaggagagatggcctggaggaggtatctgagtgctgaaggattcgctaggtgaactgaagtgaggttgggcaaggatatccagggagagggggccagcatgacatggaagtgagggaggacttcacatattggagggattctaggcaaagagccatacaacacagaaaatcaaatttccaaaatgcagttcaattcagttcaattcaaccaacattttcaccaattccctcctatataggcggcgttatattatgatagctgctgggttacagagatgtcaggaagacatgtccacacctaatttcaatcaagtgtgacaagtaatagtggagtaacagacagacagtatcgcagaggtggygaggaactttgtctggagggtccgagtagctttcagaggggaaaggatgtacaggaattcaagcccaccacaggaacaaaaggggctctcagtagaggatgcgacatgtgcttcaccacacaggcaggaaactgcaggcagagtgccaagagctgaatagagcccgttaatactgggccttagatttggagttgggygcaggctgggtaggaaggagagggagaagcaagctggagttgggctgcacaaggccttcctagggckttcagctttgatctttgggctacagggtctttgaaggtgtgtgaactgatgtgataggacgagagagtgttctagaaaacacctgtagggctacagtgcaggggcagatgagagggtaagatcaatacagagagcagcgagactgttacaggcatcctggcctgacctggctgtcatgggggagatggaacaggggcatrgtttcaggaaatgttaaggatctggatctcggctaggagggcttgatggttgaggagagaagtctggtgagggagagggaaaggtcaaggatgtgcccctggttctggtttgtgtgactggatggatggtgatgccaccagctgtccacagcctagccactgtgtcttcatatgcacgcgcacacagacacacacacacacacacacacacacacacacacacacaccagctatgtgtcttttctcctcctccactccctgttcctaaaccagaaatggaaaaatacagagaaagccctgaaaatttccccaataggtctcacggatgatgggttggtgagatccactgagtgagggccggaccctggcagcttcctccagaaagcacaaaatggaaaacaatgctgtcagcatgtgcctgcactccttatctgacaacactgagctctttactgcactctaaccaccttcctatgtccagcactttttctcakcccttgattcatgtttgtagttacagggattgctatggataattctgctatctgattcctcagatatatggcaatgtttgaagatctttctccttccctccctcccttccttccctcccttccttccttccctccctctctttttcttttctttttttcttttccttctttcttcctcccagcttttattttattgtgaaatatactgtattgactggggtacataaaatatccatgtaccacttaacacatttttataacaacacacatgaaaccgccaccaagcaaagaaagagtcctgctagcactgcagaagcctctctcaagtactcacctaatcacaccccttagtctcacctcctcatcccacactccaaatcctcccacaccagcaactattactctgactttgggactcacttccttgcttttctctttctgtgttgaagtatgttcccctagacaatggcatttagtcttgcttgtttggaacttcattctttgaaattccctgatcctgcttctctctttcagcattgggtttataagatttacccatgctgttgtaggcagccatgctgtctgccatgtggatatactgccattttttattccactctattgggatggtcattggattgtttccagagttgagctcttatgaacaaagctccttgaacacacttgtacatgtatcctagtcacagttcctaagtttcctcagggtttatacctgggactggagctgcgggtcatctggtgtctttcttattgttccatattactaaatattgtgtgagggccttcttggtccatgtccctggaaacattcaccatcgtctctcacctttttgttttaaaccacttttcccaaaataaactcctctcctaaaatacactctcctcctcccctctgaggtcagtgggcctgtcttctgtgtcccaggctcgtaacagaggacattcacacgtgagcatgcccataggcagataggaacaattctcaagtgagtacaccaaaacctaaattcattcggattgatttaacaaacgtaaattcttcttggcctcatcatgtcacacctatgtgttctgataccctagttgacagccactgtccttcttggctgagtgtctaygtttttagcagccttgagcttgaatgtactgactgcctctccagctcaaagccatgaccaccycacatgtttttctaccaaagcttgtccctcacaaacaccaccatgtggacaaagagcagtgattacattttctcaaattcagtagtacagaaccaagggccgtcccctggcatgtgatactcatagatctgtcttttctgctgcccccacagggtctgaccagccgacctggacctggccaagggtcctgtcatccctcatggccaccccgccattccggctgataaggaagatgttttccttcaaggtgagcagatggatggggcttgcctgcttccggtccctggcggcatcctctcccagtattcgccagaagaaactaatgcacaagctgcaggaggaaaaggcttttcgcgaagagatgaaaatttttcgtgaaaaaatagaggacttcagggaagagatgtggactttccraggcaagatccatgctttccggggccagatcctgggtttttgggaagaggagagacctttctgggaagaggagaaaaccttctggaaagaggaaaaatccttctgggaaatggaaaagtctttcagggaggaagagaaaactttctggaaaaagtacyrcactttctggaaggaggataaggccttctggaaagaggacaatgccttatgggaaagagaccggaaccttcttcaggaggacaaggccctgtgggaggaagaaaaggccctgtgggtagaggaaagagccctccttgagggggagaaagccctgtgggaagataaaacgtccctctgggaggaagagaatgccctctgggaggaagagagggccttctggatggagaacaatggccacrttgccggagagcagatgctcgaagatgggccccacaacgccaacagagggcagcgcttgctggccttctcccgaggcagggcgtagccagcatgcaggtgcagggccctgtggtccagactcccctgggttgggattcaagtccagggtgagcccatgtgctggagaaaatacacactcattggtctccttgctttgaaagatccaataaagtcctgaggcaaggtttggaaaaccaacttatttgaggaaggctggctgcattttttccaggttttgtgatgatccaaggtcatgttcccacctctgggccacagagatcggtcccaggcagctcccagtgaccccagcctgtgcgggtgtttggaagtggagacgctttggctctctttaagagtcaaaatggggaggagaggctcgggccatgccagctagagacacacagggacagagaggagctgagatgccgctgtctccgccacgctgtggggaggtcacttctccttcacttggggcagtcttggaggcctggagagggctggcagcattccagtaaaggcctctgtgctgttaattcttcatttgtgcctcttcctcctctggtagggcatgtggaggacacaggcagaatccctgtacgacccactcactggtagttccgagttccaccaaacgtctcagctgccctactcaggcagcgtgagaatggggccttggcgtgggggctgagactcaagagtgcggcccccaagagcactgacgcccctgatgagggagtcaagttgacccatggagtggcctgggcaatgcatgggcatgctccctgtccctgccctcacatattcccactcacataagtctcatggtccctgtgtttctgtattatacattctttttggggggcttcctgctttcatctattttaaaattaaaataccctagggagtagtacattgaatgaatgtacatgaatgtggtcaagcaacttatgtgcccaacttttcttctgggggtggggagattagatggcctttatagggaatgctacacaaatgaccggagtgagggagtaagggagtaagaaacgccacgacaaatgtgtcctgcttcccctttccttaggcctggccttcactgtcattaacacatcaacttacctcaccgtagtgggtcccctactactagacaagcactttctcatgcacctcctcatgtgaccttcaccacagctctgtgggctggcagggaaggtgcataaacccattgtacagatgaggaaacagagacctaaagaagcaatgtgagtgcatgtggttcagcaagtagcaaataggagggccaggaccaaaacccacagtgtctgtctcttggtattgtggccctttcctaatacagccctgggtcacgggaagtgacttggctgatagtggtgtcaatactgggagagccttaaagtacactaggatttcacagtggcttgggggtggagagctagggagaggagaggacagggatctttacaaagtcaagggtgaacaaatacccttggtgccaggagagtgggccgactcccaggagcagccaggcctctgaggcttcagaagattgtgggaaagcctgggttactgcatggccaatggaaaaattggcgctgggaaagtctgggttccctgcaagtcctctgattctcagaggaagcagggtcagagagcagtgggagcagctttctccttggtcacacacccatcctcagctctccatgggtcccagggcaaggacttcagcaagccatggggaataggatgcagggtggagagaattcgatttcaagagggctgccaggggcccacactcaagacctggacggtgtgggccattggatggtattcacactgcaggaaccccagtgcagagaaaagctgcagattcaaaaatccccagagattctgccaaagacaaaattcaggatgaagggagatgaaaagtgtactctagacctccacaattgcagactccttttatctgctgtggaaaggaagttctcaaagcttgtttagcacctgggtgaactcaacctttcttcttgttccctgccatccaacaagaaggtgtgcagccagcatccctttgctacataaatcatttaattcatcatccacttatgtatttattcatcaccactgtgccttgccaacactatgctatgtttgggaacgagctaattcttgcctacgggaagctttccgtccagtgcgggagagtcacacaatcacaatgtcattatttggaaaatctggcaaatgctaggagggaagaggcccatggggctgcctctctgagagagcactacagcagtgcatgtcactcgagtgtgctttaaacgctatgcaaagatgcacagagatgaatgaaaccgagttttagccaaaaggaaacctaaggataagtaagctgtgtacaactaatatctgggaatcacctgaccttcagcattgtttcacagatagagtgcagataacattcacagaaacatctcctaacttctgggcttttattaatactgttagcacaaatgcagatagatttctccacaacctcagcagcagccaaagctggcttcccttagccagcacctgtgacagcaaggctgaactcctgagagagttcctgggtctttcgtaagacaaagcacaggcaaatatctacggagtggctcagtctccctgctttgagctcctggcagggagaaatgtcatttatggtgtttcagagtcctgctcatttagctgagttccagactcgaaatgaatcatcttttattccaaaatcataatgcagatactagaagattcagaggcgccagaaacagcatctattgtcataactgttgtttcaccactaaattcatcttccccgcaaagcctgagctgtgcctccacccagaagtgcttacccaaattacccaaagctgccagaagggaaaggaaatatttttgaaatgcagtgggttctccagtgtcttctctggtttaaaccatctgtggtttatctccaggaaaggggctactcacccaacccctctccaccttgccatccctagactcatgcaagagtttagatagagaaggcatcccactggctgtctagttgaacccccttattttgtagatgaaggaacaatgctcagtgaagagactttggctgtggtaaggagtggagctgtgtcatgaccaaggtctgactctagttcatctattgctctctccatcctcacattattaacctcaacaaagctattcctcattgccccgaggagggtggaccatgtcctaagttcttatgtgccagcattagacgtcgtgctatcaagaattatcttgtccctttaaacggtatcaatggggctagctccacccttgtccctaaattaaaactcgagtagacaccatggattcttccagtcactttaagttaaaaaacccagtcccaattcagtaattttttttttttttttgagatggagtctcgccctgtcgcccaggctggagtgcagtggcacgatctcggctcactgcaacctctgcttccagagttcaagggattctcctgcctcagcctcctgagtagctgggattacaggcacctgccgccatgcccggctaatttttgtatttttagtagagacggggtttcgccatgttgtccaggctggtctccaactcctgacctcgtgatccgcccacctcagcctcccaaagtgctgggattacaggtgtaagccaccgcgcctggcctcaattcagtaattaagatgttccattcccatgtaataaagctctggaccctcaagtacgctctgcaggaatcagaaatcctgcagtcgaagagggatgaatacttctcctttttctctcctggttgtgctcatgtaggttcggatccttccgaggtagaagtagaggggacggagaagcaggatagttcttccatgactgatcctattcaagaggtctagctttgaccctctctggattcgacagctgtttaaagctgctgcttcttagtctttatggtggcttttgtggttccttggttacccctttccctgtgaaagtcgttgatgccaaggtgaagtcacttacatcaggcctaagcaaagtggagccgagggggtcatgaaggaggggatctcacactcaaacagcatgacagtgctgttgtggttggataatattttgaaatatataaaagttctttggttttttttgtgtgtgtgactatctatttaaccagagccatccattttattaggataaattaaaaatacacatagaaagggtctttattcagtttttggcttttaaaataggttcttggcccatttcagaagctttatgagaggaggaaaaaagaaaaaacaaagaataattttcaaattaaagggcaaagcccagaagaaatgagaatgaaagagaagaggaggggatgtccagttaaagataacaaagcaaatgcatgcactggcttctactccctccttaagtcccgataaaacacagagaaggggttgtttttaaaaatcagaaatccacaagaacaaaaagaatcagaaagaaaccaatagcaacacaattttgaaagcagaaaagctgaggaatgagtggaaacggaattagcaaaaataataaatctgaattctaagctggcagtggggaaagccaagaaccaacccaacttatactacagagccacctccctctcaccaaggctggaaaattagcaggccaggtgcttcctgaagcacggggatagatggagccaaggacaggaagactacgttttcaagaagcaaactcttagattctctcccctacaaactgctcctccattttgtagaagataggaggtttattctttggggaggacaaaactcagggtccttaaactgcagatatcagatattgcagaagatggtggtatctcacaaaaaactggcaaaaaataaaattgtacattatgtgttgagaccttcctcctccccaactcccgcctggccccctccccaccataggagccaacctcccagatgactcctagtgattctccccctctggtatgcatacccttggaccatccccacccacactgagtagggctgatctgtgtgaccaatggaataataagaaaaatgcagagtatgacttttttttttttttttgagatggagtctcgctctgttgcccaggctggagtgcagtggcgcaatctcggctcactgcaagctccacctcctgagttcacaccattctcctgcctcagcctcccgagtagctgggactacaggtgcccgccaccacacccagctaattttttgtatttttagtagagacagggtttcaccatgttagccaggatgacagagtatgacttctaaggctagatcataaaagacactgtggcttctgccttgctctctcttgaatcacttgctctggaggaaggcagctgccatgtcacaaggacacatagggagcaaatgaagcctcctgccaataactagcatcccttgccacttgccaggaatgtcagtgagccactttggaagcagaacctccagactgagccagatggttgcagctgttccacacctcactgtaacctcagctagaaccacccagctaacctgttcttagattcccaactcacagaaattgtgaaataataaatgtttatttttgtaagccactaagttttagggtaatttgttatgcaaaaatagataataatctccccctacacacacacacacacacacacacacacacacacacacacacacacacacacacacacaaacagagacgcccagaggctttccagccttccttcctcactcagctcccagaatgctggcagccaaacttgtcccttctaacaggagaatggaagcatcttccccagggaatctgaccagctcaggagaataggcctagaagtgctaattctggggactcgcccatgcacacagagcttctaataactgttttatcgctcctctcttaaatatgagcagatgtccaaggatcacggggcacttttggaaagcctctaatatgatatagcctaaaattaacagataactgtagcttggaggaaacagagaatatacagggagaaagaagcttctaaaagattataaattattattaatatccatagagagataagaaagatattgcatcac

SEQ ID NO: 96332 - DNA, 35416 bp, Homo sapiens
agacccagagtggactcaggataccagagaggttctggctcagtcctgcagagagacaagaagttgggctaggatagaatccgcacaaatgatgagaagcagatggaatgggaaagatattcaggaagcaaaatcaatagacattggtgatggattagatgtggtgtgtgcagagggtggagccaaggatggctcccaagtttctgatcgtgctacttggtgactagcggtgcccaccacagagctgggaaccttgcaggagtatcagatgtggagaaaacagatcatgattctggttttgaacatgtagaatttgaggtgcctttgggatatccaagcgcaatgtcaattatgcaaactagagttcagagaaagacttagtttggagatataaattttagattcgcttatgttctcctttttaaaactcttatttcaaaactgtactttgaggtgctacaccatgaaacagagaaaaagagtatgggcttcatagtcagaaaagccagggctagaacctttgtgccatcccttactggttctgtgctctggtacaagttactactaacctgactaggtttccctttccttctcttcagtgaagaaatgctgcagcttggaagcacatggtgatgaaaagaaacagcacttgaggagtgcctggaacagagtaagctctcagcacagtcagcctccttgacagccaggaccatgtttatattaacactttctgtataccccataatacccatcacttggcaggctctgtgactaccaaaagcttttttatattgtatctaaagtcctagatacccaatctattcacaatactttgctctcctgtgatccgcacagttctgagaaaagccaagactggcagagggagaatttttcatttctcccctcatatttctgaaggagcaggcagatagcactccctcaacacatcctgggtttacctgggaatactgaacacttcaggaggcttatacttggagcaacagatttactatgtactggcaatattgggtatgcagcagaatcacctgaaggcctgtcctccatccatagagttcatctgcatttcttttctttcttttcttttcttttgagtcggagtttcactcttgtcacccaggctggagtgcaatggtgcgatcttggctcattgcaacctctgcatcccgggttcaagcgattctcctgcctcagcctcccaagtagctgggattacaggcacctgccaccatgcccagctaatttttgtatttttggtagagatgtggtttcaccatgttggccaggctggtctcaaacccctgacctcaggtgatccacctgcttcgggctcccaaggtgctgggattatagttgtgagccaccgcgcctggcctcatctgcatttctaacaaattctcaggtagtgatgactctgttggtctaaggactgcactttcagagtcactgccctggcttcttccatggtattgggactgttgatgtagctgatgttcaaataaataccagctcaaataccacctttatgtgaggcatcataggaattgccttgtatatgaacaccaaagtgtcttaattaggaatgaatatgtttatgatttaggtacatttagagcccattttaacagtgtagcaacgttttgttttgtgcttgataatttcctcttctttgttcactactattcatttctaagtaaatggaagaaatcagtctttaaatagagacagtgttttcttaataatcatgccagaatttatcatctaaacaagtggttttctcatcctaaagggttcggtcatcattgtaaaggagctgccatagctaacacgtaagcactgtcctctcagtctgattcagcttgagtaacctaaatgatggcccacttcatcttgacaggatggatggggcttattcatgtattcatttaaatatttactgaggacctaccatgtgccaaacactagaaaaacagtgttatgaaccatggcctctgccctcaaagagtttataatcttgggttgaatgtgagtttggacacagggaaacaagtgaaatacataaatgaataagtatccgtgttaatctgtttttgcattgccataaaggaatacctaaggctgcataattcataaagaaaagaggttttattttggctcacagttctgcaagccgtacataaggcacagtgccagcatctgcttctggtgagagagggccccaggaagcttacagtcatggcggaaggtgaagggggagtccatgtaaaagagggagcaagggaggggtaggagatgccacacgctttgaaacaaccagatctcatgtaaactcatagagcaagagctcactcattaccatggggagtgtactaagccattcatgagggatccatccatatgactcaaattcttcccatcaggccccacctctagcatggggaatcacatttcaacctgagatttggaagggacaaacgtcaaaactgtatcagtatccctgtgacaagtgaacaaaacatatggagaaggtctcctttaggttggaagaacagaaaagtcgccaggaggaggtgatatttaagctgattaacttagagaagcttaaagtccattcttgtctctgtaccctgaaccaaactcactattaagccactctgggcatttgagaactacgcttactcaatactttcaaataaaaacagaatatatttaatatttatttttctcctaaagaagataaataatgcaaaattattcctaggcattttggttaaaaaagttgtagtctagtgaataaatataatttatgatttaaaaaaaggactactataaactatcaacattagtatctatcagactgcctaatatttctaaaatggttcgaaaaataatagaatcattagaataattatggaacatcccaagatttcgaagagtgatattcatttggatatataaattgttcagtaaacacttattaaatcctcaccacctgccagacacagtgccaagttccaagaatacaaatataaataaaacatgatgcttaaccttttccattgtcaaatatttgctgaacacctatgatgtgcttactactccctcaaggaggtcgttgcattgctttttaattgttgttgctgttttgtttccttactttattaccaaacatatgatcaagtgatccagagagcacaatgatgggcatggtttgaaaaagaaagaaaaaaagtgtatattaaattaaaagcccactatgaaacatgtcgaatccactgcatgtcttaagtctgtctacgaagcaaggaaagcacatttttatggctcgctctaattttatcctcccccacaaaccccttgctcagcatgactgaatggtgaaggcttaaatatcaccttttctcttacaaactgaatgaactttctgcagtcctgtctgaactttagttccaattcaagataattataatctctggacccctagtacttacaattccaacccttgcctgaacttccactgaaagacatacacacccattttaaaaccaggagcaataccaaaccctcaatgctttatatttcattgcaatttcacaattgattttctaaaaacattagagaaaatgagtctcaagaacttactgtgcatccatcatgtaaattacccaaacatgttacatattcattgtttattgagtcccataaacaatacagaagacttcctacaagaacacacacttcatgttgtttattccagtgctagtttgttttaacttaaaatgataataccaaggcactgtcagcttactgaacatgcaaccttgtcccaatcactctgtttcaaatctttccaagagtaatctagtttgggcaggattcctgtgttttcctgtgtgattatctcctttatatacctctgatgaagcgatacagaagtaaatacaattgagaatagaatgtacaaaagcaagcctgttttccctgacctaatcttatatatgaaaaggaacctgactgaatacaattctctgtcaatagcagctgattgtttacgacacagtaccccaaaaatttcatcataaattaagtttaaagttgatttttaaaaagaaaaaaaataaaacagaagcctaggtttcctcccaccccagttctctggcactcagcaaaaagtaacacatcctgctctattgataagaccacaaatgaacagtagagctacataaagtacagttctaactggccagcttctaaaaaaaaatgaaggattccttccaactcccattaatgcacttgatacaaagagaacatgtttcagcaacaaatacatttaggacttgatgttttacagaatctactgaaggctctggccatagggggaaaaaaaaatttccaggatattaaatgttctgactcaccatctaacagaagtacaagcaaaatgcaaatgcaaattgaatgtatacatatttatgactttaccagctgcatgacaaggctacctttggcttctggctttatatatcaggaagagaagttgagaataccagcatacatttgtgtttcttttcctttcttttctgagacaaggccttgctgtgtcacccaggctagagtacagtggtgcgatcatagctcactgcaaccttgaactcctaggctccagtgatcctctcacttcagcctcccaagtagctgcgaccacaggcacgtgccaccatacccagctaattttttatttttgtatagatggggtcttgctatgttgcccaggctggtctcaaactcctgggctcaagtgattcgcccacctcggcctcccatgggattacaggtctttggtttctatttgaacagtttcctctctcccagcactgattggagcaaagtattatttctgagtctggtgatgcacataagccagaagaatcacagtgaatagataaaaacaaacattttggccgagcacagggtctcacacctgtaatcccagcactgtgggaagccgatgcctgtggattgcttgaatccacgagttacagaccagcctaggcaacatggtgcaaccctgtctctgccaaaaatacaaaaattagccaggcatggtagtgcgtgcctgttgttgcagctactcaggaagttgaggtgggaggattacctgagcctggggaggttgaggctggagttgggccactgcactccagcctgggaaacagaatgagaccttgactcaaaaaacaaaaaaaaagtaaagagaaaaaaacatgttatttttaatggcatctgcttgggcaagaaaacttaaacatataaatgctaaaccattttcaaatgtactaactctctaataatgatagtaaacagaagttttctgttaatctctatgatttctaaaagtcaaaactgtaccttcaccatagaactcctgggacaaactcaaatatgaaccttcttaagaattccacattgatcttggtcctcctgctatcatctttgtgaccataagtaagtcaattcacctaagttttagttttcttacccataaacggtacttctaaactaattaatatttaaattctttatcagaaggaaacatacatcaatccccaatgtaaattgcagatccattaataatatttaagatcactatattctttattatcattcttccaaacataaaaacactacttgtctgtatataaagaggaggagtagaaagagaagattgttaaaaggaacagaaactaggttggttttgttaactaggttccccctctgaaaccacgagacagtattagcatctcctgaaatttattcaataccctgttttaaaaacagaatggttggtttccccatgtcaagacataccctttcataaaatgggacaagtcaatttctaggaatgtatctttcagcagctgtaatactaacaactaaaggggcggggggggcggcaaacaaaagagcataacatagatgacatgagtctactgtctagggagaaagaaaagctcttccctatatgatgccttcagaaaagagagcaacaatgggctctgtacccgccagcttcaggaggcacatgcctgtaggcaaattatcttatgtgttgggaatttacatggtaagatgctttctatgttttacagcatatgttttccttatgaatgacttcattcacccccttcattaattcaacagctatttactgagcacttactttatgcaaaccataaagctaaaaaaaaaaagttatgagcttacaattagaatattcaagtaagccctgacatgtaccttacagtactttaacccctcagaatattttcaagtcaaacagtaaactaaacaatatactgtagatgttaagctaaaacgcacttgttaagtttcattccttygatgaagtggcatgtagtaaaggkgggaagggataaactaaaggtgaaagagtaattagctaggtctcttaggtgatgtggggtacaaaggtctccttcctctagagaaaatgataacattggattacaaacacattggtaaacatcacaaaatgctaaagttggaaagaraaaacataatttcatacaaacgttttgttttatatgtgagacacttgagacttggaagtgatatgatggcccaggtcatacggccaaatgtagtcccagaactagaacccaggtcactgggggcatgcttaacagtcctttgtgtattgcagtttccatgatgtgtcctcattgctatcagaactgaaatgatggcagaatacacaaagcaatggactggacatcagaagatccaagttctagtcttgcaaatgccactaaatgagatgtaaatccatggaaaactcccactgcttgtctaaacctcagtttcctcatctgtaaaatgtaaacagtaatttacagtgagactatgcagaccacaataaatgcagaagaactctgccatttaaaaaaccaccttatataagtacagagcaggcacctggttatgacagaaaacctaastgtgattctaataccagcacttgttaccttgataaatctctgaatctgtgagcctcatgttccttctgtgtttacatggtaaaaagtctttgccctgcctccctcagaaatgtttggaattaggtgagaacactcaaaagaatttacaaattgcaagacactgatgcaaatgtaaggtgttattattaaatctctctagtcttaacgtggacaaaaatgtaatgtggttctatcatttagtgcttcacagttttccttctcaggtaagatgtcatcatacatcagtctcaaactcaccagctttctcatcagtcctcataagtctctgcccacaggaccatatcagaaccaccgtttccctccgctcagagatcacacatgaaactcactcaacctcccactggtttacacttggccgattaaggttttttcccagcgtctcctttcagctgggaatgctctagcaaagcttccatgaacactaccctacttcatcacattagagtcctaatgaaacccatccttacttcatcacattagagtcctaatgaaaccaatcctttcgcctttctccactccaacagctgcagaacgcttcagtctcttcgcagaacaggggagaagtctctggctgaatgtgcttcattagagggacaaaaggggttccccaaaccgagactcagaagtactgacacagagaccgcttcttccttgcacgagattaacacattctgaggtcctaccggtcccttaaggatcattccccttaaagctagggcctcctgcatctgagaatgtcacagagaggtagtgatgatagtgggtgttatttctgatctgtaacacgctccctttaaaaaagcatcagagtaactaggattgccttgttcggagccctgatttcagtagattcgatgaaagaattaatcaatctacccaaataacttctccggaataggtttctactcagccacgctgggcaccagacaagagagctgggggttgggggggataagaaatgacaacacgctcatctgcatagatgccagataagcagacatttgttttcttctgttctggcgactcctggcaccggcatagtaaatcaaacccgggcattctccctccccagtgcccctacactcccagcccctgccccagatgttgaagcgtcacgttgaccaggctgggggagaaagcctgggaaacgcagaagtctgttgctgcatttagactggaaccataccgcacctgttcaatccggcaccagcgccagaaatgagcagaacaccaactcgcaagcccctcttgagataccagggcgcctaacaagttcaccgctgtttcgtaccgggggagggtggtgggagacctttccttccgctgccaaactctgcaggttccccggaaaaggggagagtactcctatttaagtgaacccagagtgatctccgagtgtcactgcggccccggggatccgggtgacgagcgggtgggtgtccgttgggagcgcgcagctgtggcccccgcggaacgaaggtccgcttcggtggccacgggcgccctctccacgtcacccccagcacaacgcagacaggcaaagtggaagggtagagagaccgacgggtttcagcagagatgcagagcccctaagcgcragcccctcagaagggtctagtgggaaggggccggggacgcacaggaaacttacctcacccgggcagcattcgggtgcctccgctaccaagaccagttgcgccacagtctgcaagttatcgggacgttgtcgcttccccacagcgaagggagagcagtgcaggcgaggggcgggaggggcgggaggggcgggagggcggagggggcggcgggcggggccggggccgggggcaacgctgagggcgggcaggtgccggggctggagccgcggggccaaactcgctccggacgcgccttggcgggggcgcgcggctacgagtgtgcagtgcgcgcgcgccgcggcgagtgtgtgtgtccccgctttccccttccttccccgccggtcctccggccagacggagcagcgagcggccgccaaagcccagcagctccgagcggctccactgccgggcgcagcctcgccgcggcgcgttcggggaccgggaaccggggaccgagaggagcagcagcggcgcccgccgggctcgggcgcgggttcccgcttggtgcgcgccggagtcggagcgaggcgcagagagagccggctgcgcggcggctgccgcggctggggaggctgcaggccccgcctgccggccgcccaggctcttccccttttctctccacccacttgccccatccccgcaagccctgcagcgaaggcagaccggtttgcagcacctgccgcaacagcggccggagcttcagccgcagtgggctgggcgtctcagccggtgtgtggggaccgggcgcctgtcccgccgccgctggcccagactgagagcggggttggggtgggcccctggaattggcgggtgcctccaagactccaggggttcccggccgttctcagcgtcttgaagccctgcgaaacagggctgtggggatagggcgtcccctttccccaggccacagaactcagctacgcctggtcgcccgcctgctagactctgcctgaggcggcgaagccggcacttgagcgcaggcgcccccttcacgaggaagggacaggccaggattccaaggcgttggttgctcccattctaaggacagcaggtgttcccagcaagtaagacctacccaacaggtaggggtaggctggcgaggaggtcctaggagagagaagctgggggatgtcatgggaaagcgctgtgacggggctgagggccaattcctactgatagcgcttagtgggctgggggcacttgcaacgtcacctgatgtcagtctagctgcgaagagggtaggggtcagatctaaaggactcctttgggaaaatgctatcatgaaagctaaagctaaattcacttaataggaaccaaaaggtagcggatccttcgcggctgaattgaagcaaatggtatttttcagcctcatcacttccttccacttacccttctttaccaaaaacaacgccggtggaaaacgtgggatacattctgtctggggaataacaacatttcatgatccttatcttcagagatctctggcttccagtttctgtttgaaggatactcccttagttctctgcaaatgaacacctcttttcagttttgtaatctctttgtttctctcaccccccaccttgagtgagtctgctatggtttaatatcagccttgaatcaagtgcaataatttcttgataacagaagtatctatttttttttagctttactgagccataattgacaaataaaacaaatatctgttattcttcagctgttttcccagcctgcttcttgcagatgtggctggccattactgagagatttaaggtatggtttgtttagaaccctgtgacttgggtytggttttctcctggcatcctagacgcttcacmgctcagagcaggaggaacatacatctagtccagccctcccrctttacagatgaggaaactaaggtctcaagacattaagtaacccaaggaccagaacacagtttccctgactctcaatccctgaacaataactagcagaaatattgtattaacaaagttcaagatggggtggatagaccagtggtggaggacagaagaaccgatcaaagaaccgttcatctkactggtacgaatcactgtatagggggcagcatcataccgctgtaactagcaggctagtttggaatctgggaatggtaatcccagtctctccttttcctgcttctcagacttcagctatgaaatccagagtggaaaatgaatttgcctcccagggaggcggtggtaagtgaaagtgcaaagtcagtttctggtaatgcaggggagatgaagacaggtaaagccaaacattggatcaaaagtgatcacgcattacgtataaatgtccaaatacatgtatccatacacatgaccsttttcccattaatgagcctggtattgagccacttctgtaaagcccaaaagcaaacagccttaggttttcagagagaagtgtccaaccagactgcccactggctatttagagagctaactttatgaagcaggattctaaggaactctaccaagagccttacgattgcattattactgtgaattgattaatggaatgaatgaccatgtagtatgagacctggtatttcttcctgattctatctccaactctatcaacagggatttaggaaagtcatcctgtattggaaataatacaacaacatcaatatcatgagcaatagtgacttggccagaaattctggaaacctatttaaaaatcagaaaatattcatctaattattttgcttaattttaaatgtaattttttcaattgattcctgacctcagtccaaaactttaataatgctattgaatactcctctaactatgagaaacatgcatgggttcctagtagtacatttgatagtattagtggccccccaataaatgacctccttttttctccaaggtctttccctctaaccttgtagtccactcctattctgggcccaaccgtatgatttactttgaccaacaagacagtagccggcttgatgtaaatgaacgctggaaaaatgtttacacatttctgtttccagtcttggaattctgacatcaccagaataagcctgctggaagatgaaagaccctgtagagcagagctgagtcataacagctgaggcatccttgaccagtcagccctcacttgactgtggaggcacaagcaagtctgaatgagattggctaggcttggtccagatcaccagaaccaccctcccaactcatagattcatgagaaacaataaatggttgctgtttaaagccactgtttcagatattgattgctgcttaacaaacaatcccaaaacttagttgccaaaatcatcagtcatttactatttttcatgattcagtgggtcaactaagcctagctgagtattgcctaaggtcactcatggtttttttgtttgtttttgttgttgttgttgtttgtttgcttgcttttgagacagggtcttgctgtgtcacacaggctggaacaggctggagtgcaatggcatgattacagtttactgcagccttgatctcctggactcaagcaatcctcccacctccgcctcccaagtagctgggaccacaggcatgcaccccaacgcctagctaattgtttttatttttttgtgtggagataaggtctcactgtgttgcccaggatggtctcaaactcctagctcaagcaaccttccaacctcaacccctaaagtgctggtattacaggtatgagccactgtgcctggcctaggtcactcatttgacggcattcaactggccactggcagctggactgaattggaaggttcaagaaggcctcattcacatatcaggcacctcagttctcctccacatgacctctctctgtccatccagctggcttgggcttcctcccagcaaggtggttagacttcttctatggcatcttgcttccaagagggaggaatagaaactgccaattctcttaagggttgagtttggaagttctagaatgttatttctgcttcagtctattggtcaaagcaagtcacaaggccagtcagattcaagaggaggggaaatagactctgccttctgacttgaggggtactgtgttatgttcaggaataaaagagctgatagcagccattttttgaagactacttcatccactacgtgtttgggtgctttgtgacaccacatcagatcatcgatatattcttcttagctacgccactttgaaccagttacacattctttctggacctttctatgaaatgcbggaggttgcatttctctaagttgctaatgcacatttagcatttttttttttttttggtgatgtctcaagagcaactgaagtccaataaatattcagagggaacttgaggaacattggtgagctatggatagttccacctgttcatctgtcctttattttttttccaatgagaaaaaaacaggaatccagatgaaaggcatgcattgcattcgttgacattgaagagtagagaagtagagccagcatccttcccaaatctctagggaccatcctcctgccacattgccctctctttctagaaacttcatgtctaagcagacaagaaaggctaaacgcttagctgatgcccctgtataacttgagacactaatttcagaggaccagtttaccctgggaaccttacattcaagcaaaggcttgacaacctcatatgcatcgccttccttttcttcttaattccctgtaccctcttctctttcatccagctttgctttcttttttgctgccttttttttttctttctttcttaatcctatccatccccttgttcctctttcctctcaggattggaaagagcattgaattaggagccgtaagacctggtttgtcactccagctctgtccccacaacagtgaaatctgcattctttcttggtggcagattccttgtctgcaccatgagagagttagacaagatgctctgaaaagtcccttacatgcctaacatgccaaaggaatgttccttctgcaatacatttagtgccaaggcttggaggagtttgcatattaaagactcagaaccctttagaagaggtgcacttgtatcttaagccttcatgagtgatttacaatacctctcagtacttttttcttgagtttttaaaagctagaatatatgcaaatctaccagacacatgtcctatttaacttactgttctttgcccagaggttggtattatctagctcttctcaaaactcattgatgtttacattcagctaagaacaataagaaaactggaggcccagtgttagcaggcatacaggtctgaccctggaaaagttctccaaaatacctggtgacccatctaggaagcaggaagaagagctaagcaatgtgcgcctaaaatttcatagcaaaaacataaaattatatatatggagattataattatgtaaaaaataatgcacatgaacgataaatacctggaaaagaacaatgtttaaagttctcatgttagggtgggagaattctttttttttgtaatatttttgtcaatattatttatttttcatcctcagtaaccgactcaatagctgtatgaaggtaacagataagcttgatctagagagcacatgtgaagtttttgttttttgtttatactttaagttctagggtatatgtgcacaacatgcaggtttgttacatatgtatatatgtgccatgttggtgtgctgcacccattaactcgtcatttacattaggtatatctcctaatgctatccttcccccctcccccsaccccacgacaggcccccatgtgtgatgttccccttcctgtgtccaagtgttctcattgttcagttcctacctgtgagtgagaacatgtggtgtttggttttctgtccttgagatagtttgctgagaatgatggtttcattcctacaaaggatggtttcatgtcctacaaaggacatgaactcatccttttttatggctgcatagtataccagggtgggagaattctaaggtttaaaaaaattgatgttatattgtttctaacattaaaaatatatatacaccattaagaataccagtctaatttccaccagcctgtataatctattttcttttgaattcagttactccttttctctttaacattttttctcgttacaaactgacccacatacatactttttttaaggtgagttttcactttgcccacaagttacaaaaacaacatgaaccaaataatgattgattcgaggagtgaacaagaagcaagagaatatcagaatggaggagagaaagaaggacaaaaaatagagaattgccgggatagcatagagaatcaagctgcatttcagaaagattcttaaagcatgcaaaatttatacacacattttctatatcaagtctgaacctgggttttaaggaagttgaaagtcatggccttgataagggagagagaaccgtcgcgccacccacccccaccctgccccgctttttggttggagaggccagttttaaagcttgaggtagaggaaagaggcagaagtgagtcagcagtgttcctcaacacacaccaaaataattattgcaatcattataccatgagtatcgaaacaactttcctaaggtcacagaaattatctctggaaccaggagtcaaaccctaggctgccattttatccccagagcaggaagtgatcagcagaatatgcccaggggtcttcatgattgagcatagatttttcatgctcaacccttctttgttataacatgcaaagtagtttgttttctacctactcaaaacatttttaaaaaatcctcatcaattatgaaacatttgacatcaaattagtccaaataaaagggtgactggtctaggaagaataccaagaaatgatggtatttcagctcctgggatggctgcaaaagaaggaaaggtaatgaattcaacaaagtcactcaaacttcctaagtagaggcartagctgtctgcccaagacatagctgacaccttcctggggccatttcagggagggctcagttgcttacagtggacgaggcagatcctaccctgtgtggagggaaacttccagggcaaagactcagactttctcagctttgttttgtgaaggaaggtagcatgtgtgacactgatgacaccacaaacacttgttraacagacatgcatgttaacgttagtcaaccagtgaagtccacgctcagacgctcaagccctctgtgacactgtgccatgtgaatacactgggaagacacattgattttcacttttatttctcaaaacatttagtgactctcctgacttggaaccatttaggtggaaccttactagcaagactgtctcctcctgacaatatttgaatttgaatgttttgctagcaaaatggagcttcctgttctgacaccccttataagatgttgtcagcaagctgtcacagcaacctaaaatatttggctgggatgggagaaaagcaaaaggagctgtgttaatcagggtatgcaaaccgatttcacatacaacccgcaagcctcagtggattagtataataaagattcatttcttgttcatgtcaacattcagtgtgatttggtggtggggctggttttgtgcaatcagccagagaccctggctcctcctgtctcatggcgccattatcttcaacaagtggcctctgaaatccttcctgaactgcaagacagaatgaaagatttagaatgccagatggaggagtggcaatcatcacgtccactcacattccactggccagaaattgatcccacagccccacctacttgcaaggggtctggaaaactccatgtaagcgctgtgcctgggaagaagagaagagcctggacactggggagcactatattctcagccccatgcactgaattaaacacgagccattcatcttacatttaatcttgcacagctatgactggaggcttatgagggagagtctttagtagtcaggattcttcttctgtgctatatcctggtatttcccccggattttcacattggaagcagcctgttgtatgtgtgtggttttggatggtactgctgtcttgaagtgtttgtggacatacatgggagcttaaagagtcagcagcctatattggtacagaaaattgaacatttaaagcaagtgtaaaagaagtattcttctggagctcttgccaggatgagagactatttaatttcattaccataggagaaaatggaatctgtgcaatcagcttttaaagttgttgcaaccagaaactttggagcctttgggataggaaaaaaagtgaagagaaacataactcatccctctacctgcagtcagcttgtcctgatggcatgggtgatttcaggaataataattgtaatgagggaaagagaaacaggatggggaaagcaagaggaatacagctttttatagcacatattttaaggaaaaatatgggagttggcagtgctttggagattacaaataatttaacccaaaaggcaaagctattctgtgaagatacaagttagaaagtattggagagttgcccagcatcttcatactacttaaaactgtctgtcttttccagtgtgaagcaggcagagaacatcagactacagcaaaggactaggcgatgacctcttaaaagtctgctgtgtcctaggtttgtgttgcccataggttgggaacagtaggtgttgcatgtttgkgtagttttttcttaattttggagtaatgaatgtatgaaagaagcccttctttgtgaccattctgcatgccaagcgatatggtggcatttcctctacagactttcagatgaaaaaattaaataagaggtttatttaatatgcaagagtttgtctgtgatatcctgataagaataaaaggcataaattgaacatgtacatatactacaacctcaaaaaagtacgcaaagttgagaaaagtcctgaaaagaaatcttccgaaatgttagctattgttgcctctaggttaatattgtatcttctttaacaaaactttcttgtgctaatttttcaaatcagaaaaagataaagaaattgaggaaaaatgtaaatatttgaagatgacaaaaaattatgtttgtttttaaaacttaggaaaatttagaaraacaaaaaagaaatcactcttcattttcttcacccagagactgccaggtccaacatttgttatttgcttaccatgctgtcaaatatcttacagtttttctagattaaaataatgttcacagggcaaaggatctaaatagacatttctcaaagaagatatacaaatgaccaataagcatttgaaaatatactcaactttattagtcattagggaaatgcaaattaaaactacaaagacatctactatacaacactttatatctactaggatggctagaatcagaaagagagataataataagtgttggtgaagaggcagaaaaattggaactctcctccattgctggtgagaattgaaaaagaagcaaccacttttgaaaaaattctggcagttcctcaacagtttaaatgtagagttaagatacracccagcaattccactcctacatatctatccaagagaaatgaaaacatacatctacacaaaaacttgtacacaaatgttcatagcagcattgttcacaatagccaaaaagtggaaacaacttaaatatccattaactgataagtggataaagaaaatgttgtatattcatacaatgagatattatccagcaataaaaaggaatgaagtatcagtacatgctacaatgtggatgaaccttgaaaatgttatgctaactgaaataaaccagacacaaaaggctacatgttgtttaattacatttatagaaaatatccagtatagacaaatctgcagagacagaaagaggttgcctctggctggggagagggggcataataggaaaatgaggagtgactgctaacgggtacaggattgggggtagggaaggtgataaaaatgttctaaagttaatgacgaatgcataactttgtgaatataccgaaaaccattgaattgtatactctaaataggtgaatggaatgatatgtaagttatttctcaataaagcaccttttaaaaaaggaaaagataatgtgcatgtatcaaaaatttcaaagcatatagaggagtctaaaattaaacataaggtttttcttcttatctaccctccaacttgtggttctagcctcgtgggaagaccactgttagaagattctggttttttattcttctagtagttaccgttttaacattaaataatataattayatattatttaatatataattcaatctcttaattgagctgtcatttttaaaagtatgtttaacactcaactttgaaaagaaaagaaagttgacacagtttgactgtctcccacatcctctttccctttctgctttccaatttttctgaatttattttggtaatagtttctacttttataacttcaaataacatactcaagcttctatttcttgatttatcaatttcagacaccagctcttatctagaagaaggtagactttaaatgtttcgtggctgtaaactacatgggagragtcccattaaataaaatattgagtcctatcaacagaagaatgctctctactcggtttaattatgacattaagaacttaattcaatgtttctcaaagatgtttcaaaatttggctaagtgataacacgattatctgagaattgactatggtaggtaagagtactgaccatgttgcctaggtaccaagaataaagaggccaaattctagcctcaccttaaattcttcatagaatttactygatgggtgttatttaacatattttaagaagagaacacatctactgatgggaatctgtcagatgatcactggaaagttggacagacaaccactgggacttcctttccacatggagaatgtgtggttctagaactctgagtttgtagggatgttctgctgtctcctgttagcactgtatctcaagtctagtcatggtgattattttggatcttggaccaggtggtgaatagaggatggtaaagtctagttcaggactggggcatactgtgggacagaggagatagagaagagtggaaagggagagtggctttaagacacaccccaggtattccagtgatacataatcacttgaaagaaatgcttaacctcagcagcaaacaaacaaacaaacaacaaaaaacccaacgtgaagcagctctaaattcccattgcatactccttacaagggaagaatagacattagcggcctatttactatataccgtgccttgtgccgatgctttgcctgcactatctcattcaatcctcaaccctgaaaactcattatccacatccacagataaagcaactgagacagagagtcgaagtaaggtcccttaaattaccaagagcaaagtaatrattcaaaatccagtgttgacaaggctttgggaggacagatacactaggtaaatattggtataatcttcctagagaacaactaacaagaggcatacaatgattaaacctaggttctagtcatcccattttagagaatatgctctaaaaacaaaaatatgtaattaaaaaatgattgtacaaaactattcattgcactgatatttttaaaatgctatcaggcaataaatctactagccaataattgaagactgattttgttataaactatcattaaaaagtggtcttatttggactatattgatgtgccaagaaaattgtacataagacaatgttaagacaaaaaagtagaacccaacagatagtatgtgaacagcaaaccgagtatataaaatgccatgtatagtattaatttgtcagattcacatagctcacaagtcagtgcagatatttgttaattagattatttttcccatgaacttaagtgcataacaatgtattgattttaaattcccacaagtaattctgtactctctagcactgggattcatttgcaggtttgaagaaaggtatgagagaaaggggaagaactgttaaacacacgctgaaagcaaagaagggttgccccgaaaatctctcttgtgagttcctgaagacttttcctctgggaagccacgaattctgttgtgatgtcaataatgctctctgagggaaattccctgaaggggaaatagtgatgtctctgccctgcycctgaaccaatatttatagacacacccataaatattgttcaagaagaatttgtgttgaaagcccatgcctgcagaaaagactgagttgtctcatctgaacaaacccccaacgtaagactaaggtattattcccattctcagcactgatcttgcaggcccccatcctaagccttccaacaaactttcctcctgcctgcaatgctctgatatgcccattctacacagttttaagacccctcttaattcctccctgttccaggaagtcttcacaggaagacattaccacctcctgtaattcctatagcacttagaattcacttgttctgccaacatttcatagacacctgtctatctctccgtgaaatggcagactccatgtggtgagaagccctgtgttttttaaattgtttttggaaacttcatattacattaatacttaacagagtgctttaaaatacagcacaaagtcttcaaacaattatttgtgaagttgctacctgtttctttcaaaagagatctcttttgtccatggttgctttagtgactgttagtgtttcaagcatggatttgggaatcaaatattctctctcacccttttcttgcaacttcaggcaagtttctcaacttcctggagaccattttctcattcattaagtagagatacaaaatatttcacagaactctagtaaggattaaaactagtcattcttcacgtgtcagcttaaacattactttgttcaggatccctttcttgacacctctcctcacctccaagtttaaatgagaaatgtctctctgtgcttccaaacactctaaaccagtgccatccaacagaacgttcagcaagaatattgttccataatctgtgctatttataggtagccacgagccacatgtgcacttgaaatrtggttaatgtgaccgagggactgatgtgtaagtattatttaattttaattgcttttaaatagtcccatgtggctggtgatgcccggactggaccgcacaactctaaacaattcccattatagcgcttggttcacggttgattctctcctacaagattgaggtctgtgatgaaattcacctggactatgatgctccccattatatccatagcacctgggtcaggggctgttgcacagtaagctctcagcacaccagttatcatcatcttcaatgtcatgttgcccaactttgtatcccacggtttagcccagcacacactgtagatggttcatcattgtttgctaattgagttaattgatttctagacttacaaacaaaccaataatctgttcctggacaatattcaaccaaagggggttgcataaatgtctttctacattacacattgtatacaggtatcaaaatatcacactgtaccgcataaatgtgtataattactgtgtgttcattaaaaacaattttaaaatgtcttttaaataatttctstgtgtgcggcatagtggttagaagcctctgcctggattccaacgctagctcctccactttccagctacatgacctctagtacataattttttgtgccttagtttattagtctgtaaagtggggacatgaatggtcctgccttattgagttgttttaaagattatgtgtattgaggcttatgaccaccattttacaggcaatagagagaacaaagggmtgcaatgaattaccctattaacattcaagctgcaaaatccagattgtagggaatgatagtcaggaaactgagacagccacgctgtgggctttaggtagcaaatctaagggccaagacacaactctgagtttggtcatctggaagcaagggaggagaaaaaaatatttggcatcattagcctttacagtagagggaagcctctcagctgaggaagaagtgctgagtgaggagtggttgctgtgtagcaattaataatgtgggtcctaagattgttggtaaaactcaattgcaaagctgccttcaactttgtgtggacttaagkgtgggtagcattttagcaaagaggaccccgaagctttaaattctgcctgtaggatgctggcatgtcaggtgcaggagatgtgagttaatggtctcaactgttccaagagtagcagctgcaacaaaagctcagccctttcctcatacagaaatgagagtgtgaaagtagtgggtgggataagaagagaatgaaaccactggaaaaaaaaaatgcctttttctgctgctctcaagagttccctggagaacccaaaaaggacaatctttggtttcattgcagacctttctgccttttgttccttgaagtcccagacatacttttttctgtttcatgaacatgccaaactattttatgctcaaggtatttaaacttgctgttccctttgctgggaaggctctcaatctgggtcttccatggccatctttttccctttaagtaaaccttcgttcctacgttgtcttcttcaataggacattcctgatcattgcattgaaagatttcctgtaatagcctaaccttccctctaacacacacacacacacacacacacacacacacacacacacacacasagacatcagttttattcaatgtattgatacacatgagtgaaaggcttagaatagcacattataagtcttcggtattrttaggtatcattttttccataataccattttgtatctaaatgtatcttgtatatttatatactgattttcaatggttagtctacccttctttcttattagctccccaagagcagggaccttggctgttttgtacatttccatatctctagcaccgagaataaagcctggtacttgctgggtgctcaataaccattgttgaaagggtacattaactacagaaaaaagtatgacaccgggaaaaaaaggctaaaagataatcactgataatgttgggtagtgagcttcagaggtttgttttcttctctctagcttttcacatattccaaatttttacaaatagcatgtgttctttttaatcctaaaagagtttaatttttgcaaaaagacttacgttggcatgccatacaaaaatgtcagttgataaatttctgcaggcatgttgcagattacaacctttggatctgtatacaaccacttcttaaatcagaagtctgacgttcttcaggaagaactctcagcattatgtctcttggtataataaatacaaatgcaggccctactgaaagccccctggggggggtctgacaagtcacattccatcagcggccaygtaccatgtgaccagccacccgcctctttatctctagctccttaagtcaggagtttcatttggctccagaccttggcactacgaaggtcagccaaggtcggggctcaagtaagaatgactcaccctgctctgtgctctccactgggcacaggctggagcatgatgaatgctgtgattttccaggctcaactcccaggaggtgaggttcattccctgaaacactggaccatgaaagaaaamccagagcatccaccaaagtgttgtttagcatttagaaaacaaaaaagaagcctctactgtctggtcctatccagtgtagttctgaatcaaagttgaccacccagtataaacaccactttttaggcttgtgcaaagggggttaatcatgatgctttttaaaaaataatgattgtgcaagattgcacacaygcacccaagtattaacaataatacaataagcaattacaatatcagggccaggttttataagatttttgtatgcctgatttactttggagtctcttgcctttaaaaacaaacaaacaaacaaacaaacagaatattatagatacagtaaaactactcccaattycactcctttccttccttcccagtggcactcagtaacataaagtaactttatcattcctttacatgtttttatatatccatatattcataaactttgttaawttttttgcccattttaaacctttatataagtgttaccttatcttatgtatgattttgcaactttaattgttgttcagcattayatttatgagatttatctttgtggatatatgagatttatctttgtggatatatatgtggatacatttgctagttttacatgtcagcgtggctagatcagttaatcagttaaacactaggtgtttctgtgaaggtattttgtaggtgtgattaaagcctgtaatcaattggatttaagtaaagaagattagcctagataatctgaatggacttcattcaawtggttgaaaggcattagaaaggcaattgaaaggcatagccaaggattccctggagaagaagagatcccacctgtgaaccaagcttcagcttaggactgatggttccagcctgcccttcctgacagtctcccctatggatttcagacatgcctagccagcctccacaatcacacacaagccagttccttggaataaacctcttaatatatatctctcactagttctctttctctggttgggctctgactgatgcaatatacttgtcattttattcattcattcattcctttagagacagaatcttgctttatcagggtggagggcagtggcataatcatagctcattacagccttgacctcctgggctcaagcgattctcctgcctcagcctcccaaatagctgggactacaggctcccactaccatgcctggcaaaattttttaatgatttttagagatggggtctcaccatgttgcctgggctgtgatttactttttttgttttgctatggatcaggggtcagcaaacttttcttattaaaggccaggcattaaatattttaggctctgtgtgtcatatggtttcttgcaactattgaacaatgctgttgtaacacgaaagcagttatacagacaatacatcagtgaatacaagtgtggctgggtttcaataaaagtttatttatacatataggtaatgggctggatttgacccatgggctatagtttgctaacccttgctgtgtagcatgcattgtatgaatataccacaatttgtctattctcctgttcatggacattttctacattgttcctccattaccacaaaatgctgtacctagtattcttgtattcattctttgtgcacatgtgcaagaattattctctatctagaagtagaattgcagggtcatggattatgtgaatcttcaacctaactagatagtgccaaattgcatgctaaagaaattgtttcaatttatactgctatcaataacagtgcttgagagtttcggtttccacatcttctgtaccattggaattgtcagacttatatatctggtggatacaaaattgtatctcatcatagttttaacttacattttcctaatgaataattatgagaagcatctttttatgtatttttctccatatatatcctctttgataaagtgtctgttcaaatcttttggccatttaaaaattggattctcttattgagctttgtgggctctttatatattacggatacaagtcatttgttggacacaagtcatttatgtaggaaaatatttgcaaatattttccaccagtctgtagcttgtcttttcattttctgaagtgtcttttgcagagcagaaattttaaatttttataaagctaaatttatcagtgtgtgcttttataaatcatatttctagtgacatatctaagaaaactttgcttaagccaaagatttaagtatttgcttaaatctttgcacattttttttctatggtatcttctagaatttttatggttgaaacttcttgcatttaggcctatgatagyctacgatgcatttttagttaactgttaactattttgtattatacaatacaggatataagttgaagttctctttttttagcatatgaatgtccagttgttccaataccatttattgaaagacttatttttctacctcattcgtatctttgtcaaaaatsaagtaaccacctatgtgtgggtcaatttctgggctctctgttctgttttattaatctatatgttatatttttctcagtatcacactgtcttgatttctgtggctttatagtaattcttgaaatcaggcaccgtgagttctcaaatttgttcctctgttttcttttttgttgttgttgtcgttgttgttttcaaacagagtctcattctgtcacccaggctgcagtgcagtggcacggtcttgactgactgcaacctctgcctcctaggttcaagtgatcctcccacctcagcctcccgagtagatgggattataggcgccaccacatccagctgatttttrtatttttactacctcacaaatatcacctatagttgagagatgagaaggcaaagaaagaagacaaaagagtgctagacaggaaggaactatcccaaaatctggattacttggaggaatggtagggaagttggagggtctgaaggatggaagtggctttgcaggctggggtgaagggtcggcagggattggtggtgatgagtgaaaccactcagcctagcagatgaatgaccagatggcgacaggagggggcaggatgaagccccaattgggcgatttaggggatggatgacagcccaaggagccaagtaaggagcctgagatgatgataataaaaatcaatcaaattatccatcaattatccatcaaaaagcaatcaaattatccatgctaattagttagccagatgcttccatgcattatctccaatcttcagtccaccctcccagagagatatcattgttctggcattacagatgcaaaagcagagggtccgagaatcccagtgtggcaaagcctgtctgcctctaaagtacagctgccttggatgataccagcctgcctcccaactcatgccaagtttattcactcactcagccagmcagtcagctagcacctactatctaagctatatgctgaaamcaataacaatatttgtcactaaatgtaacagagaaccctaactgcattcttgtaaaatccatttcctttctcaaaattttgtttataggactgttagagccattccaataatgtactttttttcatttttctttttttgtttttgacagagtctcactctgttggccaggctggagtacaatggtgtgatcttggctcactgcaacctctgccttctgggctcaagtgattcacgtgccttagcctcccaagtagtagctgggattacaggcatgtgccaccaagcatggctaatttttgtatttttagtagagacagggtttcaccatgttggccaggctggtcttgaactcccagcctcaagagaccagcccacctcggcctcccaaagtgctgggactacaggtgtgagccactgcatctggcccatcaatgcacttttgaaggtgagcctctcttacttgggttgatggaggtgcagccttcccaacttagcagttcagaaatgaggaagctctctttctgatggactgaatctcccacccaaactagtcaagaacaagagtaaatatctgaccaatataaggtatgagaagtttcaaagcagtgcctagtgctcttagctgctaattaggttcataaccacctgtcaccagttgggggcatgcgaggaaagaatcttgcccctacagcccatgatgcattgcaggatctggacagcgtgaacatttaacccaggtctggtccacatggacacattcaaataacctttcaagttatgaaaagcattttattaatcaggtgtgtgatcttttggagtttagattctaaagattatttttcattctaacgcctttttgaggaccaaatgtgaagaaaagaggctcaaatacaggtgtcaggatgagattttcttctctcatattgattccttctttcctagcctggtccatttattcacttctacaaagaaataagttaaaattacacttctattggtataagccatgaaaattatgctctgagacgtggctaccatttgtagatgtggtccctggaccagcagcctcagcatcacctagaaatttactagaaatgcggagtctcaggccccagcccagacctactgaatcaaagtctgcattttaatgaaatccacaggtgatttgtgtgcacactaatgttgacaaagcaccagtgtagaaatacataatagaagcctctacatgacgcttagagactttggacctctgggatggggccaggttcatggagaggaataaacaaaggtgatgaggagggaaaaagaagaaagatgaagatcagagagaagagggtgtcctaatacccactctagatacacactgggcaagctgataggatgatacgttgggaaaaataaatgcttgattccattgcctggattccacatacaattgccatttgtttctgataatggactgactcccctttcatccttacaggtattgtcaacatgactaagggattccatgtggctctaaaagttgggcaggggaaactttctttataaagctaaactgcttctgcaaatgggacacataaagagcatagtttggaataaatttttcaccagatgctgggtgcagtgaatcatgcttgtaatctcagcactttgggaggctgagtcaggagaaattgcttgaagccaggagttcgggaccccaactctataaaaagcaaacaatattaactaagcatggtggcacgcacctgtagtcccagctactcaggaggctgagctggtaggatcgctggattccaggaggttgaggctgcagtgagccataatcactccactgcacttcagcctggattacagagtgagaccctatctcaaaagttaaaaataaataaataaataaataaatagttttccaccagggactctgtttgcccaaaaatgtaagttggggattttcattcctagagttactttccctctgaactccagactcactccaccaaccgtcttctcagcatctccccttgatgtcacacagatagatcaaacacagcttgagcaatctgctccccatcgtgtctcttgtcactttgcatctctataaatggcatcaccttccattaattaagtaaccatcctaattaagacagaattctgggagtcactcttcattccttgattctacactttcatcattcccacacatctattccacaacaagtcctatcaattgcatctccaaaatatctgtttaagccattctcttctctatattcccactgtttcatctcagtcttggccatcatgatctcttgcctggactcctgtaacagccccctaattgaactattttcttccatttttgccctacttccaatccattctcctctgagaagcaattagacacaacttctgaaataacaacttctcctcctcctcctcctcctccttcttctccttctccttctcctccttcttctcctcttcctcctccttctcttctttcttcttttgagcagagtcttgcctgtctcccaggctggagtgcagtggtgtgatcacagctcactgcagccttgatctcccaagctcccagatcttcccacctcatcctgtcgagtagctgggaccacaggtgcatgccaccacactcgggtaatttttgtattttttgtagaggtggggtttcagcatgttgcccaggctagtctcgaattcctgagctcaagtgatctgcccaccttggcctcccaaagtgctgggattacaggtatgagcatcgcacccagtgaatgataaagttcttaaaacattaagccctattcctccccgtgtaaaccctccccattgcatttagggaaacattcaaatctttaccatgatttctcagcaatctcccctctacgacccccttttcctattaccctgctcagtccctgcaatgggctaaatcttatccacactggtctgtttcttgaattgccaaacagggttttacatatgctgttaccacttcctggaatcttttcactcattctttccagggtttacttccttcttatgttttaattagaatgtcacctcctaagaaaggctccatttcaaccatccttactaaaataagctttctctgtaattctcttacttagccccttgtttccatcacaatgtttattacagatttgtttccatcacaacatttattacagattaaaacaatctttgtttgtttttctatttgtttctggagttgctgtccttgcagcaggctgagctccataaaggcatggagttatcagtcttgcatgctatagtttgccctgaactctgatagtgcctggtgaaagcagtatttcaatatatgtattgtgagtaaatgaaagtcaaaattatacacacaggttcactgtgcatgttccaacattaaattgcaatttcttaaaatcttagaattcttggtagatgcatttctatgtggagaatttctgattccaccttctattaaaccctaagaaggataatttctaattatgagaattctatgggatcgctgatttccttgtgagaaagtatcacctattgatacatattttttcctgtgtattagactaagtgttggctcaaatgaattgcactggggaatttctgaactattaaaaagttaaaccaaagaatcacatggctccttctccatcatttgtataattgcacttttgaagatttaatcttcataggtgttttagctcttgatttaacaaagaataagcatttgctagaaaaccaaattatctacaacctgctttctggaatggaaaattaaatgattgcagctacaatatcatagatttgctttgtttctaggatacaatctatccatgcaaattagtacaaatctgtagctagaaagatttgagactggactcaacaaaacagcctgcagcaaataagcattttcataaaatttgaaattgggagtcactgctctggtacagtatattatcaggcatctactcttcatgcccttgctaagcaacaggtggtctcacccgttctttaatttattctgctgtgatgcttttcttgttcctgtttcatcttgctcagtctccttctctggggccttttaccccagctacaggtttggtgtcagtgtaccccagagtcctgctctcaactcccttctcagtttatattgtctccttaaaccatctagtttatgaaaccacactttcatagcttcaatcctcacctggagacagatggaacctacatttccttcttctgcctggaagagctctcctcagaaccacagatctgtattcccaacagcctatttgataaatcctcctgaatgtgctgcaagtgatttggattcagtatttacaaaatcaaacacactaataacccctgaccttcaaaaaaaatctctgctcttcctcctggggagggtaccatcactcacccagatattcaagccagaaagaagggatcatctaggacttctccatcttaattactcccatattctatcgtactccaaatgctttccattttagttgctaaatatttcttggacatgtctcctccatgctacatccttttcttcggttcagactctcataggatacaaaaagtaaatgtttttatttttaggtgagtactgttctaagcaccttatgtaccttttcatttaatcgtatgcagccaatctcatcaattattattataatccccattttcagatgaggacattgaggcacagagaagttgggtaacttgcccaagccagtaacaaacacagctgggatttgaatgcaggagtccacatacataaccactaggatatgctgcctccagtaatctctagcctggaatacaatagtctcctcattcttactgctgcctcttgtttctcattctaaaatctttcatatagccactcaaaagcttcctcagtaatgaagattggattaaacttgttcaaaaccattcaatgattcctcatctcctaaaaggcaaagtccaaactaattggcataacctgcattaccattcagggttgtcccagctgagctctcccacccccatgtccttgactttagtcatattccaaatgtgggaattgattttcctctgtgtcatgtactcctcagctgggacccaaatcccttatcccagtaaactccaacctagtcttcaagattcaaatatgacctcttcctcatttctttccctaaaaaataaggattccttctttggtttcccatattaactgtattacttagctattgtctcattgtaatataattatttgttattattcatgtctctaacctgggctgtgagattcttgagggtggagagagtgctgtagacaattttacattctatgccttctcagtgtgctacatagttcattgaactattcactgagcatttattgtttgagggataagaaactaggacttgagagtatgagaatgataccttaaacaatagaacagaatcttcccagtgaattttatatgcataatttcttgaaatttctagccatcaattccaatcatctatctaatatagacaacccctgacttatgatggatctacttacaattttttgattttaggctggtgtgaaagcaatacccattaaataatacactgctcaacttatgaggttatgtccagagaaatacattgcaaattgaaaatgtcataagtcatgtgtgttttcacttacagtattttcaatttatgatatgtttattgagacataaacctgtcataagtcaaggagcatctgtccatgattctcttctgcaaaatccactcatttaacaggcatttcttgagtgccttttatgaataagtatcatgctaagatgtggtcaacacaaagaaggctagtgtctatttctgatatgagcaagtgtgttcaggggtttagtgtaagtgcaggggactcaaataagaacacgcattgtgacagaaaccatggaacaggaagactcaaggattatgagagcacagagaaaaacaccaaacccagtgtggtagggcgacagcaaatgtcttggaggtggtgatagtgatagtgccttccaagtgaagaagagacaggcacctacatttccagaaaacaaaaagattattgacttttctgagctatgacgtagcttgattttgccaaataggtaaacaagagacagaagatgaagggcattttttgccatgctaagaacctttggctttatcctaaaagatgaggataaactccccagttgtgaaggattttagacaaggcagtaacatgtcttttaaaaaatcactctgggagtgagaagcagggagacaagagagctgttcagtcatctatctaggtgagagataatggaattctagctagagatctctacagtggagaatgaacattaggggatgtgagaaaagttagtggggaagaattaaacagcaaagtgactaattgaacataaagataaagataaaaaagcgggaagggttaagtttggttcccagactggtagaatgacagagccattcatatagatatggaatatgagagacaaaggccagaggggtaagagaatgacttcgtatttggaaactattgagattgtagcactggtatgctagtggagttatcccatagaatctattcaaaattcagagaggaaaaaaaagaactctgagttggagataaagtacaggaaatcaacacatgaatgttaagtgaaagaggaggaggaaaggactaaggacaggtccctgaggaaaatccatgcaaggcataagatgacatgctgatgaagtacccaggtgtccatcttcaaagtgaaagaatcatgaaaccataatgctcctagatacacagatatcggtgtagccttcaggggtatgctaaggccattggaagcaggattgcctatgtgtgagccatatgctcatcatcagaccaatggcttctcagtagccagagtaggctctagctttaatgaatgaagaacataattttgtttctaatataaagtcatggctgggtgcagtggctcacaccagtaatcccagcactttgggaggctgaggtgggtggatcacctgaggtcagaagttcgagaccagcctggccaacatggtgaaacccccgtctctactaaaaatacaaaaactagccaggtgtgggggcgggcacctgtaatcccagctgcttaggaggctgaggcagaagaattgcttgaactcaggaggtggctgttgtagcgagctgagatcatgccattgcactctagcctgggtgaaagagtgagactccatctcaaaataagtaaataaataaaaataaaaacaaagttagagagattaaatgtagttgagggatggcatgaacatagatatgcatagcaatcattatccctcgcagcaaactattcttaaatattttccaaaatgtactagtatttatatatttgattttatctaacctcaggtatgtatgttttcagattttcattttggggggaacactgcta

SEQ ID NO: 96333 - DNA, 32140 bp, Homo sapiens
atgtagatgtgagagagataagctctcagattttctttctgaatgtgttatgtagagagaaaacaaacctagagctgcctgtggccttgtctctcaatcatcactaattacacacatatattccaccttctatcccaaggagttcattagtagtaagctgaatgaggctaacagacatcagactagacagatggacagtactgatgatgagactggattttgaggctagtttctctcagggatttctcatcttttttttatgttaagacttcttaattaagacagccaatgcatgcttttttctgccttaactagtctgtattgagttttataaattgtaactagacccctgatgaatagtattctcttcacccctttcctttttcttaaaagaataacaagtttatcttcttccttaaatcctattaactattattaatcttggcaatttattcaaatccagagggcgtattcttacaccatactaatcctagtgtgattagtaaaagcgctgaatgcctgagttttaatctcagctttgccactacatagcagtgtgaccttgaggaaagctatgtaatctctccatgcctgagttttcttacctgtataatagggacagtgcacctaccctaaaaaattgtgacgattagaaaactggtggaaaaaaactggtgcgtaggtgtatagcaagacaactactcaagaaacctcagttattcctattatctccttttaaaacaacacataacatttggggtcatttaaagaaggattccctgattccccaaggaaagtaattatccctgctgatatttagaccagaggcaggaagtggaatcagttacaactgaactgggaaatatctgggatcctgaagcctgacccagaactcttagccaggctagctgcacagattctcccacattatttcagaaaccttgtaatagcctaatgccatgactgaattttttttttgtaccccatttaatgtatcattgaggagtttcattccatctcttttacttactactctgtttttgggcaaaacatggaacttgtaacgatcactttaaaatgctattttacaaaagtggcaaagggtagaagacaaagtggcagaaacttgacaggtgaaaagcacatggaagttaactagactattttattttcttgcatgtttgaaaatttctattaaaaaaacaaaatattctacatgttctaatattaaacagaatggatatttgtgggttaggataaaatttccagtggcaacatcaatgattttcaaacttagatgcaaaaaaagataacatgcagctatttcatgtgattccagttataacaaagcagcgatacttaaaatgcatatgaagagtgaataaaactattctataaaatgtgaaaaaggcagagaatcctggtatagtattttattatttggtttttaggtatttgatgatttttttctatatccttactaaatggataagtatctttttggatcttctgattggaaaaattggaaattgccttatattcacaggggcctaatacttagatttacatggtagttgccaacattaaataaaagacgacaaacaaaaaacccaaggttatttcataaatcagattaagtcttctcccaaaaagcaagctggccaaactgtgcttctgttatctcacaataacaattaactgaaagccaaataatcgcttccctcttattctggtatctggggtctccagtttgcaacagccctctagcactccattttgtctccctgaaactaacattaaatccaagcatcaaatgccatcatgctgttctgttttacttacgcctatgctgcttcactcgttacctgcctgcctctgtacgtgtcagactgttatagctgcctgtttgtaaattcttacccatttcatccaatttctccatgtctcggattatctgttttggatccttcatctttaaaactgcagctcgaaccatcatgcgctgttttttgttcttagaaaaataaaagggcagatgtcaagaagtcaggcactcaggagttttacttcaacttgctttaagaatctaaacagaataactccttggcttctgatcacttgtttcaaccaccagaaacagctatgtaattttttgccttaaaaatgtttacacttgtcaaaaagataaagaaatgctatttttaagatgtgctttcttagtaaagtatttctttgaactctgagatctttagcagttacttaaacacacatacactttaaatttcttttttttaaccccttatgttcttgaagaccttgggtgattgttcctgccccctgttgtaaaacctctgctagttgaagtccaaagcaaaggttgaagctaaattctaaaattatataaagaatatttaaaaattttgcaggagttaatgctaaacatgaaaacacaatcgaacattatttaaaatctgtgttgcttcaatgtattatactataatactataaagcacaatactataaggcaaatcctttctaattcttttgaagtactttgccacaaattcaacagctaagaggagaatgctaattgggaaaatggatatataaatctaatatatctataaatattataaacctacatatatatatttaagctaatgtaatatatgtaatagacagctaatcaggaaaatggataaagctatctagcatcatgtttatttccatcctcatcagtagactttaaaacagttatgttttaatgagtaaaaaaaagaattattttcaaaagtattttttaactcactgggaaaagtaatcaaacaatggcattataacctgtagtgagcttctctgcaaagttacttcagttcctaaataaagtttggcttagtatatcttacagtttttataaaaagcataaagtaccttttctagaaaatattagaaatgttattctgaaacccactaatcccaaatcacaagatgtaccaaacaatacttaaagttttataagatgcctctaaaatcataccttctttaattctctcttccgggcttcctttcctttaaaaggagagagggagatataataaaatctttgaatcttgaacattagcatttcctccaatttaatacaggtaattctttattgtggaaagttacagtatgcactgtaaaagagcagcatctttggattctctccactacatgccaagagcatccctctaattatgacaaccaaaaatgtcaagacatttttgtttaatgtttcataaaaaacaactatgaatctgaaggaaaaacataacataaaacgcgaaacaagggctcgcaaaactaatttgctcaaaatttccaatataaaaagaaagatttcagccaattctactttgcaagtcaatcaaatttgaaaaataaaatacgggtactaatttctttgcatatttaaagtcttaatgtgcccatacaaaccctgaatatataatttattcctcctatcactgctggtcttgtaattaagccacagagaaagaaattccctaatatttgcaatttttaacactctcctacttcatcattccacactaatggacacttacgggcttggtctgtggggttcataaattttccactcttggtggatgatgtagatctccgtcccatgttgacaatttgtatggtttacttgttcattaaaaaaagaaaaacctgtgaaggtgaagacaaagaaatagcttatatctcctaaatgtatttcttcctttttctagtccctaccaatctctgaaaaaaaattcctttaattagaaattctgtgagactgttctttccttagttttgactttaatgtccaagaaagatggcatcacctttcttgaccatgaaaatttagatctctatcattcttcagaaatgtgatgagtgtgaagaccactttgaatatcctcaagtcatcagtttagcttttttcttatggatcacagcactgactttgtcaactgataaaaacaactagaaaatgctttaacgatatggcacaaaccatgaacatcagaattcattagtccttcttctataacctccctttattaacatgtaattgtaaaagaagaataagaagggaatgggggtaatggatctaggctcaaaacacatacctcacctttgcctctctccatggtttttcttggcatgtatgctgtacattctcaatacttctaagacactaaaaactcattaatttaagcatatttaattcagattcagttctagttcagatataatgcttgactctcaagagttcaaaacacaactaaaaatgcaaatatttgaaattagtgctatactgagagctccccaaaacttaaatattaagacacatatttttcttactaagacctgactcccaatatatatttcttaaggtaattaaagggaatacttatttttgtttgaggaaaaaatattttgtaagctaaaacttttattaacacagtaccctattacatgacttcttcctcttattccaaaataatggggcttaattttttgaagcgcagtctttccagtaataaaggcggacaaatttgcttccttttgcaagtagacactttttaaaggtaagaaagggaagattttgtcagcccagtttattacagttaatgtctctttcaccaagtgtccaactgccccgaaagccagatgtttcagaaagccagatgtttcacagctgttctggtggcaattacttcaagacagcggtatcaaaggctctgatttttagcttcctcatctaaaaaatggggacatcaattactttataacaaagctctgatgatacaatgagattacaaataaaatatcctgtgatgtttgactcactacttaactaaaatctttataatggatccatattcctggcctagctaccatacaccctgtcaagtggtttccttctaagaaaaactggggatgggggggttaggggggtgggagagcagcagggagtaggaggtagggaaggaggaaaacaagcaaaatcagtacatatacaagctctcccatctttgattgcctgcgttttttgtgctttcctttctcaagtttcctcaggctcatgttctgaatctcctcccccacaaatgaaacacaacggatacgaattacagagaattttacggaagacactggagcttaagtctgcagattagttttttgtctacaagcggaggcgactggaaaatcaagccaaataagcgttggataactctaaacagccaaagaagcttcaatgggatagggtccaggttcaccaaaggaggcaacaccagcaactgacgaaaccatagcgacggctgaccgaccatgactcgaggtacaagacgtcaaacctaaggctactaatcaacgtgcgtaagaagcggccccaaccgacccgggcgatgccaaccgcgcaaccactggtcgccgcgccaccccaggcccaggaatagcccagtccgcaacagggagacctcaaccagggagaggaggagcggggcaaaggggctgggtgtcccccaagccgctgcgcgggacgtggaagggacgaaagaggtgaggaagagtagtaaatcaattcaatacactcacacttctgctgtgctcccaggactacgagaagcgggtagggggcgattcccggcctctttcacttcgtaaaggccttcaactgggtctctcggtcaacccctcagctaccgccatcttgaaacctcgcgcccctccgcactcctcacgtcatttcccattcctctgtcccgccttctcttagcgccgcttggccctggaaccatagagaatacccaagaattccaggaccagagtctcttccggttccatacaatactcaattggttggttgtcggctaagagcccgcctcattgcgctcatctagtacaataggaattagaagaagatagctgctaactgagtggctgacggtcctgtctctcgagttggaggcatcttgacttagttgctgggagcctggtacgttgagccgtccgagaacggtacattctgcagataaagaagcgttctgcgttttctgtcttttggaattaccttagtttttgcatttttctgtttcttatgacccaagcaggtgcgatcctttaggggtgtctccgtgtgtaaacgaatacccagataacatttgccactgagtttaatccgctttgtaagcatcaggttatcccatgtgagcgcctagtacgtgtggaaatttaatagacasgcagaacagaacgtttgtagaccacctgaacaaataaattagcacccgtattagagtcgcagattgcttatatgggcggtgatttattatttgttagtagtgttttgaagaagaaatacrgggatacatatgcagtcggttttaagttatatgagtggcaaggttgatatatattggctatattcccgactggtcttttcaccagccaaaagtcctctatgatgtcactctacgtacgggattcttcacttaactctagccttcgccctttccctaccttctatcccctctttccgtgagtcagcccccacttatttcccttaaaggtaagtttaaacatttaaaaaactatcttagaggatacgcttggttatttctaatcttaacctgactatcccatgtaggaaggctattcttaccaccagttataaatatttcaaaatattgatggagatacatactaatttttagcagaatctttaaactgcccttgaaggtataagatcggtcctatacctaaacttacctttgtgttaggaaattcttgatttgattttagactgaatttgagtgtcagaaagcaatgacgagatattgtaggttaaagctgataaaccaggtagtacataaaaaagaaaataatcttgaactgcgaaggtgagctaagttgtaatgttttgcaactagttttttttctttcctaacacattagtgatcatagttttgcaactcgttttgaaaaacaatgcaagaagagaaagagaaaacagtgtatgttggaaatattaaagtctttcatgtagctaaaattttatatgtagctactatttttaagatatgctgagcagtttttatttcaatacatttcttgtacttggatgggagaatcaactataacaaacacagtctggcatcaacagcatattaataattttgtcagtatagactaaaagagtcctcatgggaattattggttggcaaaggatttagaaaacaaacacatctgcagagattcagcggaaccattaataggcttccatagcctttggcgttttctaaaatcaggtaattagtgaaatggcccacctaatgcgtcatgtagcaaaggcagctgcctccttttttgctagtgttgaaaatgaaattatattcttttttctgaaagcttataataaattatgactttcttttaaatgacaaatgctttgagtagtgaccttctattctgcatcctaaatgcaatatgtgtagctgtgttttgctttcttgtcttctaaatgtttcagtgtttgaacattcacttgagcgatatttaattatcacagttggtcagggttgattgcagtgactgaaacaggaccttgatgtttttagttttgatttttaccattttcaaatccatccggtttacattgtgtaatcagtagacgtttacagatcagcttcctgtcctaattgaagcacattgttacaaaccatttttcagtctcttctagtttacagaaaaccagatttactctgatggtcaaaaatatggtagtatttctgtctcattcgaaggcctagagtttgtgtctaggcagaagttactgagtatgtccccttataactaaatgatgtttgaagctggtggtagaaatgaaagtctctgcattcaatgtgaaatttaagaattttactgaaattagaaaagagaaaagtaacccctatacttgctactctacgatagcatttaccccaatgttgatctggtagagcagggtgtgaaaacatccagggagaaaatttttttacctcacagggtctagcatcagctgatccaggcattgttgactcaaaactcatctagtcatctagtcttggcatctccagtttccctctccaaattgtttatcttatttaagtccatattggaagcctatagaaaatgaacctaatcaaagaagcaaacactgttactgaaaaggaagcagaaaaacacttcagtggcaaataaaacggctgttcatttcatttggtgtttcactgtattgatgacctcagtaatggcatgattatatttttctgaggctgatttgaactccaccagatgcttctcataacttttgatggctgcttgaagctgtgttttttccactgctcccaggatggcacggayaatcatatctatgccaaggccaagaacagcaactccaatactaccaaggagagaagcaccaatttgagctaacacagtgaccaacttgttaattatgccagttgtgacatttgagcccacaagtttaacagcgactgcactggctgcagatgtagcttctcccaggatgaccgaaataaccttttgcactattgcaattttgtctgtttccttttccttaatatcctgaagttttctatagagggttggctctagcttatcttttagtgcttcatcaaccttctgcaattccttttggattytcataatggcttggatgatgaggtcacagttttctttgatggtcccatctcttttcatctcaatggaggccagcctgcrccccaagtgcatatttagaacctcagtcagcttattggtgacatcgaagctgtcagataagcaatcaagaagctgctggtgaagacgatttacttcttcccgcctttttgggttctctgggtaaaggaagtcactttgggccatatttcyaatatgatcgctgaaaaataaaatggtaaatttttactgaaagtcttaaaaaatgtctgctaactgtgtagaagggactaggaaatctttttcttcatgcatagcaaagaagcaagatgctgtctaaggataattcctcagaacactcaacaagtttttttaaaagagggagtatcgctgtgtcacccaggctggagtgcagtggtgcgatctcagctcactgcaacctctgcctcccaggctctagcaattctcctgcctcagcctcccgagtagctgggattacaggcatacactgccatgcccagctagatttttgtattttagtagagacagggtttcatcatgttgcccaggctggtctccaactcctgacctcaggtaatccacctgccttggcctcccaaagtgctaggattacaggcgtgagccactgtgcccgccctcagcaggttctttaaaacagttatttttatgaaatttggagtcagtgtatggaaagtgtaggcaacagaatacaaccctttgatggataaattaagttattagattttgtggtggtgagaaatattcatcgtttgtcaagcatctgtttattaataagcgtgattatttctaggtaatatttaataacttttatttgaaacagaccccaatttgaaatgcttagctcttgattactagtgctccttagtttcccgaacccctagtcaccacattgaccacacctaccagactgatttctctagcatttggagttaaactctagtcagggccagataaatattaacatctctaaatttacagggctgttttttgtatttcaatacttggttattttaacttaaaatattcaagtcactttatatatctctacaggcaagttatttgttttctaaacctaaaggatatccaaaggcaacatgtatatcatgctagaatctttaacaaattttttcttgtgataagagtatatattcaagactctttggattaaaatttcatgtggggagaaggtaggcactatacagggcacagtgttaatcagataatcatgtgattattctccatttgcaaagcttataaattaaattatttagaatagtctaaatagtatcgcacttgggcattatttagataaactagagtgaacgtcagaaaaaaaatgccattttacaaaagtattaaagaataaggggccgggcatggtggctcaggcctgtaatcccagcactttgggaggcccaggcaggtgaataacttgaggccaggagttcaagaccagcctggccaacacagcgaaaccccatctctactaaaaatacaaaaattagttgggtgtggtggtgcatgcctgtaatcccagctactctggagactgaggcaggagaatcacttgaacacggaggtggaggttgcagtgagccaagatggtgccactgcactccagcctgggcaacagagcgagactttgtctcaaaaaaaaaaaaagtactgagagtacatcatagaatgaataaaataaacttgacaagagacttcagtgtttgtccttttggcctacagtacctaacagtcrtgctcttytgtgtttatttgggtgaaaaatctaaatttgagccagtaagagcacgatgctactcaatatgcatactttgagtagccttcctatgtggctggtactttttttttttaaattacactcttgagagaaaagagagaaaaaatggagttctttatccatatccatgtggaatctggcacagcctctttttgagtaaataatatcgtaattaatttggaccgtatgtcttctagcactacggttcttattctgcttaaggggaacctcagaagtatggaatgtaggaatgaagatttttttctttcaagaaagtaaacctgaaaataacctatcctccaaatcgtatggatataagttggcaacggaaaagagaaaatttttctgaaatggtttaggaacataaataaccatgtatgttgttagatttagaaaaatgcactggaacctcctggtaaaataaactaccatggtcagaaattaatttttatccttgattcaaatccagcacacatacacatatatacaggcatgcacacatgtaacagacacacatttccacaaaacaatacttagaaaatttcctaatccaattccctttaaagaaattgcttgttgatgatccagtaaatattctctaaacttacaatgggttggaaactgtaatttgctaagcacagatttggactttgaattttcttttttcttctagtaattttccattaaacgtttgtcttttttgactcccggttttcagatcttattatgaagtgaaaactctagtttctgactgacaggagaaaattagctatattccttttcagacagttaggtgagaggagttttcttatcctgaaaaagttcaaaatatctctagcagctatcatatgccattatatgaaggcatagtttccagaaaaggtgggtggttctgtctacctcaagataaacaaatggagaaatgaaccttcctcctggatgggaggcagaatgcttccaagtggtcggctccttttcaattaactcattgttttagcacaacttcacgaattaatcgtaaaatgtatctgaaagactgaacaggtgagccttattttttttcagaaaataaaatagaactcttctccccccagtattaaaacaccataaaaacaaaatagtaaacagtatggtacaggtacaagagtcagtgaattaatggaacaaattagtccccaaagcagacccttctatctgtttaataataataaattgtagaatctcaaatcaataataatcgaaattattactccataaatggtcttgagtcatgggctagactttggagttaaaaattaataacaaaattgttagtgtaatatatgtagaaaattaaataatagctagaagaaaatggataattttcaaatatcggtatggagtgggactttataagcctaaaaccaataaaaaaaaagcacatgcaaaaatttgactarcaaagatggccaatgtaaaaagaactgaaaacaagctggagagaatgcaaaaaaagtattgttattattttcaaaaagcagtgacaatctaatatataaatgagcaaaccaccctgaacagagtacaaaaaatagtatctaataaaatggtgggaaaagttcagtcttactagaaatcaaagtgtaagacattgtacgttttcaactactaaagtaatgtttttcctccttttaagtagtcttgctcttgcacttgcgcttagactctttttcgtgggatctagacatcagttcatgacttcgttccaataacgagtttggctaaagaaatgttatgatgtgctaagaattatgtttcccttataatgaaaaaggacttttattctgagtcagacttaccttcctagcttttttccttgggtggggagtggggagggttttcttgtgctaacatatcttcagcaggcctgccaccatacctgcttaggtatgtctgagctccagttctgaatacagctcaaggttatttctacaccccaaatgagataagaagcactggggaattaggaagaggagaggtggggattgaaagtgaaaccattgaattgtgttttggacaggtgaagtttgaagagcttagcgaagaaggcaattattgattcattaacaattcatctaataggttagtacttaccacgtgtaaggtcatatgccagcaccactctgcaaagcatacaaagatgaaaaagacatggtccttgcttttttggaatttctaatctagttaggaagttaagacagatttataactgtaatatcaagttgaaagtaatatgtcgtacaaaattaaaggtacacttggtatttgacttgtgcaaatttgttttaaacaacccacactttaatatataatatattggcactgtggccatgtggagacatttagtcatctagtaaggttaacaatttgtaacctttcaagtattcttagatatgtgcttgacagttgaggagaggctgggcaccacatggagaaccatagttggcagtgtgcagtattttcgctattgcccttaacaatttagttctgactcccaaagtgattactccactcagcaaaacaaaagccctgcaattatttggagtcacccttcttaaagatcgtagttgttactcaggcaagcttcaagtgatattttacaaacaacccataatattgtgcccgagaggagttctgagccatatactttctccatcttattccattttcattgatgacctgtcactttcaaagattgtagcaccaacagcaagtggtatatttaatccagctctaattaactacacctattgtatggtaagtttgaacttttacataatttgaattgtcacatgatggtgcttcctgttggtgaaaagttccacttggggaattaccatccacttttgtacagagtttgtgctattatttgaatattttcttgtagttatccatgaaatgggttctgtagtgccctggagcagcccattgggaattgctagacagcaggtggagctcttggtctctgggtctcccatttttcacctgggcctttgctggactggagcagctgtgctttctcttgctctacacatttgggctctgggtaggtaaaattttatttgatgagagagttctgttgctaaaacaaagtttggaaatttttgacttgttattttattaaaaaatgacaaaaaacatctgaaagtgctgatgtcattggtcagcacaccttaagaaatgaaaatggagacaaaggttagcttgagatggatgcttactgcacctaaccttgttaatttttttgaattgagaagtcaacatttaagattaaagggcatctaagatatggtagaaatatgctgataattgtgtctaaaagttaagttttatttaatgacatcatacagttgttttagtttttcagaaaaggaactaccttacaaaatgaaaatgtactgatcatcatatgttcaaatacaactcttcagggtactttcgtgaataacagtagtgcgttgactgtcaagtgctgttgaacttagaaattaatatcaaggtgattagagaaagcttcatggagaatgcaatatatgatttatactttgatagatggtacattatggagaaattaaaagtgaacggtttggtaaaacgatttttaaatatatacttattaccagtaacatatacacttttttaaatagaggaggaaaaacacccataaacctaccatttcacttttgatttttgttattctttttcaaaatttgtttatatgcataagtatcttcacaaagttatcataatagtataaataaaattcatcttttattcacttaacactttcccctatttatagctttaaaaatatttggccgggcgtggtggctcacgcctgtaatccgagcactttgggaggccgaggcgggcggatcacgaggtcaggagatcgaaaccatcctggctaacacggtgaaaccccgtctctactaaaaatacaaaaaattagccgggcgcggtggcgggcgcctgtagtcccagctacttgggaggctgaggcaggagaatggcatgagcctgggaggcagagcttgcagtgagccgagatcgtgccactgcacgccggcctgggygacagagggagactccgtctcaaaaaaaaaaaaaattttattggttacgtatactattccctgtctttaccctggttcaataaatctaaaattgtttcactatcactaatattctaatgagcattttgatacccacagattttttttcctccattatctggattatttcctcagcataagtacctagaagaattacataattagtggcataagtaatgggaattaaatttttattacttttgatatgtatcgtaaattgcattccaaaagcttttactgtgctaccccaaataaatttttatagcaggatactgggtatcctgctataaaatttttacaatttttattttagattcaggaggtacatacacaggtttgttccctgactatactgtgtgttgctgaggtttactgtgaatgatcccgtcacccagatactgagcatagtgctggtatatttcccagtcaaagatggtcctgtttaaatattgttgatttgggaagagtaaggttaaatttcaaaaagagaagttcttgcctatttggaaatacatactgaaaacatttaagatgaaatgaaatggtctcagagatttgttcacaaataatctggaaagaatagtggggtagggttatagaggaaaaaagattggccttgttttgataatttttaaagctgagttatgggtacatgggagtttattatattattgtctctacttctgtgtatgtttgaacttttcttataacaaataaaaaagaaagaaaaagaaaaacgtgaccctgtctaaacctctgatgtttagtcrttagtgctctctgaggttttacatttcttcttgctgtcacttttcttcactgtccaaacagggttttgccatcatgcacagtttccttatctgggagtgtggaaatagggtataggtaaaatcaggagcttttcagaagaaaataacagcttctaactagttctgagtctcctttaattcaaataaaaatctgtggcctttaattaaaacaaaaattgatcatgatgtgatgatatactttctgatataaattcatttaaaaaatgtttctgaccagaaagaagaatattaaagtcattcatcagcatttatcaagtgctcactggtgaagcctctactgtgtcccttgaggcatttgaaaacgacaatgttccttgccctcaagacgataacagcctgtttggagacacacagcaaatgctcagagatatttagatayaacataatttatgaaggagtataagtactatacattaaycagtattagattccacattcattctttcatagataggtactgagtgcctatattaatattaatgacatagaaggaaatgttactatccatgtaaacttcacacattcacacaggtatcatttcatccttaatccttcttagaattgatgtctttactgcttctcttccactctgacttaatcagtcctagaaattgttaattttcttccttctctgctgtcttcagagaaggcaccaggaaaggttccttccaaatcacaaggaacatgtcatgggatcctcttataacaaagctgtttttttactttattttatttatggttaggattcaagactgacgggctaattcaaattcctcctactactgagaaacagagtattatatcaatactaatagaaatatccacgttgcttaccttgctgtgtttctgagttccgtggtcctagcagttgtttaggagtattgttaaagtgctttttcatctggtttcatctggatatttctgatggaatgtgatgacttacagactttgctagtctctgctgggtccctctgcctgtctggtttataggctatttctacatggcttggccctcagaattccttcatttcctattaataaaaacttagtatacagtattaagttatataaactggaagactaatagtgtgtaaaacttatttttaaatttctgttctttaatggactttttattgttgagaagcgctatataactgagctaattcaatttagtagagaagatggctctttgattgcagctctcagattttggggttttatcttgtcaactattccagatactaagtttcttttagcttctgttgcatttgcacctctaactgttgctgattatttaaattctcaagatatataaatgcagttacttgcatccaatttttttttctcttctttccagctaggagttctcctctttgtcattctttctcttcctgtgtttgtaaattgtcttgacaatataaaaaccttaaagtccaacttcactcttttccctgaaagctcagatcagtcttccctgctgcttcttcccagcttcagtcttcagacccgttaattcctccacagcaaagacacctgagtggcagggaaatcactcagccccagtgtaacttagtgaaagacagcaggctttacactcagacagtcctggttttgtgtactccaagtaccacttactagtcatgtaatcctaagaaagtcacttagcctgagttttcccattggtgtaatatgagtattagttaataatttatggattaaatgggatagtgtttataaagtaattggcatagtggctgatatgtggcaaaatcttatgaaacggtagctattcatatattaacaacagtatctcctggtggaggggagaggagaatgggtgggtacaggatacagaatcaaaatgccagacaggcagacaggaaactttaaaatctaaagatgctgccctgtgattctaaagaagggctaagtggggtcacttttctacttttgtcccagtggatcatcttgcccttgatgtatccagggccccaccacgtacggatgtgtggccagtgtatctgaactaggtatggatgttaagtaggattttaatagatgtttggggaggatggtggtatagaggaaataatacagatagagggaacactgagagcaaaggagctgaaccaaaaattgtagaacattttcagggaacaaaaaccaacctgctggtgatacagggtgtaagtgggagcagttaagggaaggtaagtcatggaaaattgaaaatagtttgtagatagccttagatgtcatgctaggaaattgtatttcattctgtagataataatgaaccattaaaaaatccttttaattatggtgtaatatttggagatttggatttcaggaagggtacattatgtaaacttgattagtaggtatggacaataaagcataagttaccaaccccattgcctacagtatgtggacaaaatatgtctgtcttttaccctgtcttaaaacagttgcattttgtttccgaagaggctattgttgaagagtaccatttaacccacttgttcctaaggtgtttgtttctctcctatttctacccttcttaacatttattgcctactcatccactcctttctctcctaccacatagcagcctaagtggagttgccaaaattaaggataaacagtaacaatgcaaaataattatcagagaaaaactagaagcaatattgacttcatactgagccccctaatcaacttgaacttcttttttctgcaatcagtttctcaggttgaaaacttgaacttcttaaatctttcttgactactaaagccagtattaacgtcaagtcaatagtcagaactgaaccttaggaaggaggcacattttcttagtgtagatcttggagtcagggtggttttagggaatcaggaaggctgatttgacaagtttcactgctggattgacagtggtgggaaatgagagtgaaagcaataatatctccaaacttatctgcatgtagctctcacttgatcgtcttttatttagaatgctttattttcccttttatcctaaagctcatccccttcttttcctaaaatctctgctcaaaaaccatatattacatgaccctgaataaactgcccgattcaattacgattgtttcaacaatttgccagcacttatgaatgctgcacttaaaaaaaaatcaagcaaacctaaaaataatcacctttttgacccaatagcctcctttatctttcttcttcacagttagacttcccagtttggtagtgtacatgcattgcctctacttcattttctccattaattttccagtatttataatctagcttctgtacatattcctgcctcttgcaaaattgcttttctagcattgtcaatgacattgtaatgactaaacataagaaataatttacagtgtttatcatacttgcagcatttgaaattgctgatcaggtctttatattttctcttttttttttttttttgagacagagtctcactctgtcacccaggctggagtgcagtggtgccatcttggctcactgcatcctccgcctcccaggttcaagcaattctcctccctcagcctcccgagtagctgggattacaggcgtgtgccacacccagctaatttttgtattttttagtagagacggggttttgccatgttgggcaggctggtctccaactcctggccttaagtgatctgcctacctcagtctcccaaagtgttgggattacactaaaataaaatacttaaatataaatctaagaatatatgagccaccatgccyggccaatttatcgttttttctttaatggatatgcttttggtgtcatacatatcaaaggactaatcagctaaccaaaagttacaagattttcttctgtattttcttctgttttatggttttatatttttcatgtcccattttgagttaatttatgtatgtgtatggtatgacataaaatcaaggtttatgtttttgcatatgggtatcaggcttttccagcaccattcattgaaaaaccctaaactttctttttttgttgttgttctttctttgttttttgtttttatttatttcttccaaaacaaaagggaggatacatgtgcagaatgtgcaggtttgttacacaggtatacatgtgccatggtggtttgctgcacctattgacccatcctttaagttccctcccctcgccccccactcctcaactggccctggtgtgtgttgttcccttctctgtgttcatgtgttcttattgttcaactcccacttatgagtgagaacacgtggtgtttggttttctgttcctgtgttagtttgctgaggatgatggcttctggcttcatccatgtccctgcaaaggacatgatctcattcctttttatggctgcatggtattccatggtgtatatgtaacacattttctttatgcagtctatcattgatgggcatttgggttggttccatgtctttgctgttgtaaatagtgctgcaataaacatacatgtgcatgtgtcttcatagtagcatgatttataatcctttgggtatatacccaataatgggattgatgggtcaaatagtatttctggttctatatccttgaggaattgccatactatcttccacaatgattgaactaatttacattcccmctaacagggtaaaagcattcctatttctccacacccttgcaagcatctgttgtttcctgactttttaataatctccattctgactggcatgagatggtatctcactgtggttttgatttgcatttctctgatgatctgtgttgttgagctttcttttttatacatttgttggtcgtgtaaagatcttcttttgagaactgtctgttcatatcctttgcccattttttgatagggttgtaaatttgtttaagttccttgtaaattctagatattagacctttatcatgtaggtagattgcaaaaaatttctttcattctgtaagttgcctgttcactctgatgataatttctgttgctgcgcagaagctctttagtttaattagattccatttgtcaattttggcttttgttgcaattgcttttggcatttttgtcatgaagtctttgcccatgcctatgtcctgaatggtattgcctaggttttcttctagggtgaaaacacctaaactttctatgttaaattgcctttgcatctttgttaaaaatcagttgaccggccaggcacagtggcttatgcctgtaatcccagcactttgggaggctgaggcaggcagatcatgaggtcaggagatggagaccatcctggccaacttggtgaaacctcttctctactaaaatacaaaaaatttagctggacatggtggtgtgtgcctgtactcccagctacttgggaggctgaggcaggggaatggcttgaatctggttgggggcggaggttgcagtgagctgagattgcgtcactgcacgccagcctggtgacagagcaagactctgtctcaaaacaacaacaacaaaaacaatcaattgaccacatttgtgggtctttttctagacttcctgttctgttaggttggtctacatatcaccaatactacactgtctcaattactgtggtatatcttaatattagattgtgtgagtcctctaactctgttcctttagaaaaatctttgtttattcttgttcctttacatttacatatatattctagaattcactgttctgtatctataaagaatcttggtggcatttttattgtgattgcattaattctgtggagtaatttgggaaaaattgacatcttaactacataagtcttccaatccatggacagagtttgagttgacatctttgctatatagagtctttcagttcatggacagagtttatctctccatttatttacattttctttgattttttttacttcagaattttatttttttaaaatcttagtgcacagattatgcacatatattcttagatttatatttaagtattttattgagagagtattataaatgatacttatacaaatgattggttccctattgttcattcctagtgaatagaaaacaatcgatatttgaatgctgaccttgcatctgctaaaattactaatagctctaagaacttttgtgtagattccttgggattttgtatgtagacatcatgttgtctagagaggtagttttatctcttccttctcaatttgaatattttctttttcttgtcccacatcactttctaggatttccagtatgatattaaatagaactagtgaacgtgaacatacctgactaattcccaatcctggggggtagcaactagtcttttattatgttagctgtggttctttgtaagagccctctatgattaaggaagttttcttatattcctagtttgctaagaatttttattattaatggatattgaatatttaaaaatgccttttctgcatctactgatatgatcatatggtttttcttgtttagtttgattttttaatgttgaactaaccttacatttttgggatacaccttaaattgttcttaaggaatattggtctagagttttcttatttttctgcaatggtagccttataaaatgagttgagaggtattctcccttctgttttctggaggatattgtatagaattgttattcttttttaaatgtttgtttgaattcacaagtgaaaccatctgtgccttgattttctcttctagaaggtgtttaactacaggcgcaatttctttaagaaatataggtttatttaagttttttgtttctacttggaagagtttccatagcttatgtcttttaagggaataggcctattatatttagactgttgaatttatgcactcagagttgtttatagtgttctctcgttatcctttttatatctgtagggtcatagtgacatctcattatttacattggtaatttgtgttctctctccttttttctctggtcaatctggcttaaagtttattggtttttctttaaacactttgtagttttgttggattttatctattttttctgttttcaatttcactgatttctactctttattattttttccttttgcttactttgaatgtttgctctttcttttctaacttcttaagatagaagttaaaattattcattttatatcttcctttctaatataaacacttaatctacagatttctctctaaacactgctttggtttcatcccacagattttgatatattttcattttcattcagttcaaaataatttctatatttttgtgacttcttttttgagccacagattatttaagggtgtgttgtttaatttacaatattttgtaatttttcatgtatcttctttgttgacttctattttaattctattaagagaagatttattgtcttttacatatatgaaaaaaactgctggaatttttaattggaattgtgttgtatttataaattagtttgaggagtactgacatcttagcaatattgagtgttttggcccattaacaatatatatctttctatttatttaggtcttccctaatttttctcagcagtattttacagttgtaagtgtagagatatttgatctctcgtcagatttatctataaatatttcatatttttaatgatattgtaaaggtcattgttttaattttaatttctgatttttattttgttgctagtatatagaaatacaattgattttgtacatttgatcttgtatttttcaaccttgtgaaacttagttattacttctagaaatgcatatttaatgtaattattgatatgcttaaattaagtgtaacatttaatcttagttttytgtttttctgttctgtttttcaaatttctctgttttccttttcaagccatcttttgagtaatataagtagttacttaaataattttgaaatttcattttaatttgcctattgacgaaaatctgaattagtatcctagggctgctgtcacaaattacctcacacttagtgattttaaacaacagaaatgtaccctctcagagttctcaaggctggaaggctgaagtcaagcaggacctctctccctctgggggctctgagggagagtctattctttgcctcttccagctctggtggccatgaccatcccttaagttggggccacatcacctccatttctgcttccatggccccattgtttcctgctctgtttttaatggttactctagagattataatatacttccacatttcacacaatctacttagaattaatattttatcacttcaagtaaaatcaagaagtctttcagctacgtaagtctccttaccctctctcctttatgatgtaattgtcatatacattaagtctacatgcattgaaaatcccaacagtgctattttttggttataatttttgcttctttctgtggtctgccacctgctgtttgattcccgggggtcccctttcctggtgttctggctagaaaacaatttcagctcttcccattgcaactggttctcacctgggggcaaagcagtgagagaaagaagcctgcaaggtcactaccaccatccctgcaccacagttgcttctgcctagggtagagtgggaagagtgaaaaggggtccaccccataaggacagcgttttcactgccagttgacaggggcaggggcaaaggactggctgacctctgctgtacttgtgaggtgtgtgtgggggtggggtggggagtaggggatgggggtgggtggcactgctgttacttgttaacgctcgaagtcaaaagtgtttggagctgcctctggtcacgactagttgggggcagacagagggtggggtgggggggctaccattttgttgttggcaactagatcaaaagggatctgcccggcagagcccctgcacctgatttgctgtgtagagtgggtttattttggagctttccctgtttgggcttgttcacagttctaattccaggctgccctagagcccaagatgggatatataggaagcaggagaagacaaacgacaacaacaacaacaacaacaacaacaaacacagaaaaacacaccctcaaacaaaaagtcagagcttcattgctttattgtcctttaaatgctgtactccctacttccttggccttctgtcatccacctttcagaattatctgrtagtgattttatatattcagtccaggatttttagttgtaatcagtaggaaagatcagatggagtgtgcttagtctaccttaactggaaccagagcccctctatgtaatttgtaatgctttatccagtatttttcactacattgaatagttaagggtagtatccttgagtgtagtgtaattcagtatatcaatctatccatatattcgggatccagcacccagtatttgatatgtggtataaatttggcgatacaaccctattctaccctgttttaattatttttgttattatttttattgaagcatagtaccatttttgtttcaaygtatgtatagctttcctgcccttggcagggggagttatcttcatatttagactatactttcagtttctttatggttgccaaatcracttttatttttcatttggattactgctttgctttgcagtgttggaacttatttgttggagaaatgtcttcagagtcagaaaaggataaagagagactgattcaagctgccaaaatgttcttctttcatgtacaagatcttgcttctgtcataaacacactgactgaattgtttagccgcagtatgaatactcaaatccttttgatggctgtgaaaaacaatagttacattaaggatttttttgagcaaatgctcaraatttttaaggagatgcaatctgtagtggatgcaagacatgacaaaattcaaaaggagtctttatgttccaaggttgcaatggccatgtgctctgtggttcagaagagtaccaawgtagaggagttgcatcagtcagctaaagaagtattcaaaagtgcccatacgccagtcatcatctctgtgctaaacagcagtaacatccttgggagtctggaatcttctctttcacacttgatgaaattccccatcatgaatcttcaattaagtgacttctatacagaagacaccaaagagcaatcagatgtcaccacatctgagagaaccagaagtcctccaggttcttccaaaaccactgatagacaccttgaaaaaactgcaggatgtactaaaaactgaggattccaaaaatcccacaaagtcagcagcagatytgttggaacaaattgtcaaggctatgggaccaatcttagagatcctccaaaaagcsataaagactatggaaatgaatatttctgtgtttaagaaagccagtgacaagtagggatgcaacagaaatgttcatttctgtcagaaaactacttaaaatcttatggtttttcatagtagtttctaagatcttttggtgccaaacatgtgctatgttagaacataagtacacaaaagtcatctggcaaaacatttacctgtagttttgctttattaaaataaaaagaaataattaagaaagcctgtttgaaatgtcagtcactaagaagaatatattgttgaaaaaaacaaagtggtattacatttgaggatgtttctaaatattgtgtttcatcttaaagcataattaaaacaaccctaaagtagttcccactcttaactattctatttccagtgagaaatccaggtaaactgtaaatattatcattagatagaaaatctaggcctgggaaacaaaataaactccatttttgtcactcatataccaatttctatatacttcagtaccttgacgatcagaagccatcactaaatattttaaatatgattcataagtaagtgagaacagtgaatgagcaataatagacttttcttgcttatgtgagtaagaccagaacagatagttcattctcacttgtctcctgaggtcttatgattagaaaatactagaggtggaaaaatggaagtactctagcctttcacaaagaaaagactttcacaaggaaaacacttgcagaagtaggatatctgagatgtgctttatttaaagaaatgagatagggcagtctctttgtctaccataagtctttggttctcatgcattgtaaatgagtatgtactcctaagattggtgttgaagttaactatttcacatgatacctgatagaactctgttgagaataggaaaagcaataataactccaagccaaagccatcattgtaattcccattgtcatttaaaataaggagtcccttctccatcctcatataatttcaaaatgtttggtagggagggtcaagtggattttgaccattaccagagcttggaggttctggaaaaaacgatgagtttcaatacattaactctcattttctctccacagcaaagctgaaaccttgcttatttgtaataggtttctattaagaactctattattttgaagaggatgttaaattgattcatttgctaccatacacatacacacacacacacacacacacacacacagagggtgagagagaggagaagggagacaggactctcactttgctactttttctggacctatatgtgtctagggtttcaatctccttttagttttaggattatgtttcagaatgttggatgcaacagctagggggattcatatggaaatgaatgagacaaggaccaagaaaagtcttggtgcatagtctttctgtgaggtgactggaagaatagctggtggcagttcacaggaagtccttgccagatgccaatgggaatgacaaccagggtgttagagatgggaagtgcccacttcaataaagatgagtggtcttccagtgctggtggctgttgttaggctggtgatcacttacagtgtttcacattttcccaccactgggtaccaccagtctgaccactctaatgacatcatgtctgctgctgcctcctggcttctggaaatactgaggaaaagctgtatttttttctcaaacctattactcacatttaatgtttctctcaaatactttggttttgggttcctctcattttctctaatatccttcagtttttgaagaacaaagtggggtgtgtttctatactatgcctggtctcattcctcctctaggctgtgagcatgggatggcctagctgtttgaatgaatcatcagtagggaggaaaaagtgaactgccacacaacacaacacatgatcatttactattaaaaaaaatgaaatactattatacttgtaattttttttattagttgccagtgtttgctgcatcttggtatttctgaaagcacctaataaatgcttgttgaattttaccaaatcaagagctagttcattcagtgtaaatcaatttgattcatattattagacaactcagtacaagaatcctgattcttctagcaaaacaaactttactgaaattttctttcattggattttttttaaagtaagagtaaatagagaacttcaggataatctaataggcgtattaaagagaacaccttgttataaaaataaagtattacatgggttgagtgtttttactttttaaatttttcctgtttcaatcagcttcttcagattaaacagtatatttctgtacacatcaaaaggagacatacatgtatttgtttaataaaattactataggacataagtactccttacagcacagtctctgttaacagttgcatgaatttacacatatttgagcatccgccttatctttggaagatatcccaggctaacaaatttatcccagcagaaattacagtgaaatttctaaaactagtctcttagagtttcataaacatgtaacttaatcaatttaaatcaatactctacagattccttgctcaacaactttggactatagggagagactgaggggatgtgagctatgtacatttatccttaaccaaactcatgaatctacataattttaagagaatagtttctgtctccagagatttgatctgtaaaacagcagcaggagttagaactaagttatcttttttagaaacttggctattcccttaaggatcataattgtgtaagtcacagtgttctcaaatgttggtgtatagcagaatcatctagaggacttattaaaacagactgttcaatttctgtagtctgtagtctgggatcaggccctaaaattcacatttctaatgagttcttaaaggatgctattgctgcttgtgcctagagagtcaacgctttaggagaattgtcttactcagaaaattatgacttctcatggaaatcaaatgcttttggctgactttttagcttcactgagtggcttccaatttcctctccagcccacattacccctcactctctgccagacctatctgctccctgaccttatgctgtacatacatcgatcattccgtattcgcttctattttctgctttcctctaagtaaaacatcatctctgatagaaagctttatctaaccataggccagaggaatcacatttttctctcagctccaagcatttaatatttggccttgttttgggcactacgcacttggcacatactctttcttgtttttttctccttctgctcaccccttctcccagcctagagccctaacggctggttcaaatgcagcctcttacttaaagccttccgggtgtctcttcttgcctcagttggaagaaatctttcttttgaattgttatgaacagaaaacttgatttttgccttttttttttttggcatttcacttgtggcttgctttatgttcttaatttctcctaagagattgtaaactcatgagagatctggcctagtgttcttaacttttaatccccaaagtgctttgtacacagtatggctcaatacatgcatttatatggcacaggaaaaatgtacttaagatgttgggtggcttttaccaacatagcatgtcattactgactcatcgatgctcactggaaaagcttgctcccagagccatgtccccaggactctctactaggtagccaccaaactgccaaagaccctatcctatgcaagtcacataaattgtctgtttgtagaaattctttctttttttctttttttgagatcgagtctcactctgttgcccaggctggagtgcagtggtgtgaacttggctcactgcactacctccgcctcctgggtttaggcaattttcctgcctcagcctcccaagtagctgggattacaggtgcgtgccaccatgcctggctaatttttgtatttgtagtagagacggggtttcaccatgctggccaggctggtcttgaactcctgacctcgtgatccgtcctcctcggcctcccaaagtgctgggattacaggggtgagccaccatgcctggcagaaattctttcctttattgactgtagaggctactgcaactaggtgacagaggtgatttggccctgttagtttcaaatcccaatttaaagaatgatagtacagagatgcctgaactccctgccaggtaattttatgtagcttattccccattccatttctttgatcatgacacaggccattcaggaagtcctatggagagtaaatagatggaccgattttcagttttgctgtttcttatccaaatcttaaaagggataaggagcatggactttcaaaatccaaaattatagagctagccctcatctttactccatttagcctgataccagggtcttcagtgatcgtgatcgggttaaataatcccttatgtcgctacctaaattactacctgagggaagcgttagaggacatttccagctatacaattcaacaatttatacttctttgcatgtactagtttacatgtaatgagacctcgctatattgctgatatttgtttgtaatcagtgtttttttctctcatactctctgttaaccttcacacataccctcatgttttcctaatatttaaatttgctatgaagacttaaatttgccatcaagttctctatgaattaacatatgagtttaaattttaacttttgtaatgtcttaggaacatgcatgaacacccattactgctggtgaatgaaatttcactaacatctttcattaactttcccttttatttctcaagtttccatgtgtcttctcatctgaggccatactagcttaatcttgaatgctcataaaaaatctctgaagaaaattcacaccttggttaatctctggggttcaaagcttttctgtttggtgaagaatttgtcctttgctttctaatttaatcttctttgatttgttcctatttagaataactaaattaaaaaaaaataaggaagagtgcttgtattcgttggaacttcaactgcttgatgcttgacatagaaaatctaattcaaattatgcaagcaaaaacataaattattgatttatgtaatgaaaaatcttgtagtattcagctttaggcaaagttggatccagaggcttatacattctcatcaggtctcagtttcttttcacttatcagctcttcctttgttgtgttagatcctttctcaaggagatggggtctcctctcctggtggcgggatctttgctggcagctataagctcctaccctgctttcattaatatccattcagaaaagaagctcccattctatttccaattgcaattccacaaaagtaccctgattgtatctcacaggctctgattggatcattttctattccagcatgaatctttgtgtccatgaagaagaaatatactgattggctaaggcctgagttacaggccaatcacagtcagtgggctgagccagctctgcatcagttgctagctgggcagagtgatttccccaagagtacttagggtgcccagattgaaataaggcaaaggggtacaaggaaaggcataagagaattagcaaagaggaggccatgcactggtttcagcagaagtatgatgggatcatccttcctggaaaataaatgtccatttctagccaaaaggccaataaaaaagattttatttaaatattttttttaaataaaaggagccacaagatttctttatactctgcttttggaaaagatgatgacactggtcaaaaaggagagagatgcaatagctataggatcagggatgcatttcttgctggaagctgtaaaaaacaaaacaaaggaaatattttaggtagcagagttttttttaaaactacctcatctatccattgatccacttacttaacttagaaaattcctaataaaaacatttgaagttagctacttaaaacacattattttagatttttctaacataacttgcttattttgcagatgatgaaacagacaccaagaggttaaaagatgtactcccaggtaacccagccagctggtggtagagatctaattttccatctttatcatcaccagcagcataatcactgttagcattatccccatctcaattatcatcatcttcatcaccattatgaaagttaacacagactgaatgctgattttgtgctaggatctatttcgagcccttgcta

SEQ ID NO: 96334 - DNA, 31243 bp, Homo sapiens
ttgcattttatctactatacctaatttatgttctactgtagtaacagaaagtgaatgattaacttgaagataaaaaaacatctgatatgaattcaacttgacgatgctaggttttccttgatgaaatcaggtttctctctgcctaacagcacctgtcaaaggtataaaggagatctaattctgcctacaatatcctgcttttgtgagctaaagctttctgtgtcctctcagaaaaaggaaaagtcaaaatcctgtggaagtgaaagacattgttatataaacccaaattgagcaaaaaagaaaatgttagccaatttttttcttctcttttcttttgagatggaatctcactctgtcacccaggccagattgcagtggcgtgatctcggctcactgcaacctccgccttcagagttcaagcaattctcatgtgtcagcctcccaagtagctgggactacaagcatgtgccatgccaccacatgtgccacaatgtttggaaacagagtcaagcaaagattttcatgcaaggatgtagtcttgagaagtgaaaaaatggaaattacctaaaaattcaatatgagggaaatagttaaatcaataacaatgaaatatacatgcttccatttaaatatcttgctattgttcctggtgcagtggctcacgcctgtaattccagcactttgggaggccgaggccggcagataacttgaggtcaggagttcgagaccagcctggccaacatagtaaaactccatctctactaaaaacacaaaaattagccaggcatggtggcacacacctgtagtcccagctacgtggcaggctgaggcacaagaatcacttgaacctgggaggcagaggttgcagtgagctgctgtcaagccactgcactccagcctgggcaacaaagcaagattccatctcaataaataaataaatatcttgctattgaagacttacttggagaaatgcataccatattattgggaaaaatagaattctaaacctaacagcattccaattttacttttttttttttttttgagatggagtttcgctcttgttgcccaggctggagtgcaatggcaccatctcagctcactgcaacctctgcctcccgggttcagcgattctcctgcctcagcctccgagtaattgggattacacgcacgcaccacctcgcctggctaattttgtatttttagtagagatggggtttctatatgttggtcaggctgatctcgaactcccaacctcaggtggccgcccacctcggcctcccaaagtgctgggattacaggcatgagccaccgcgcctggcccaattttacttttaataaaaaatatttgccggggtgccgaggctcacgcctgtaatcccagcactttgggaggccaaggcaggcggagcacaaggtcaagagatcgagaccatcctggctaacacggtgaaacccccgtctctactaaaaatacaaaaacttagccgggtgtggtggtgggtgcctgtagtcccagctactagggaggctgaggcaggagaatggcttgaacccgggaggcggagcttgcagtgagccaagatcgcgccaccgcactccagcctgggtgacagagcaagacctccatctcaaaaaaaaatacatgcagggccgggtgcagtggctcacgcctgtaatcccagcactttgggaggctgaggcgggcagagcacaaggtcaagagttcgagactagcctgggcaaacatggtgaaaccttgtctctactaagaatacaaaaattagccaggcatggtggcatgtgcctgtaatcccagctactcaggaggctgaggcagaagaatcgcttgaacctgggaggcagaggttgcagtgagccaagatcgtgccactgtactccagcctgggctacagagcaagactccgtctcaaaaaaaaaaaaaaaaaaaatatggattatacatgcaaaaatggactggaaggaagtttgtaagatttttagccatttttctgaaaataatgttaattatgagtaattaaaattgtcttcgtcttttaaatattttttaatgaacatctaaattatctttggttaccatctggcatagtatgaagtaaaaaagaaaacacctgtatttttcgttaaaaaaaaaaaaaagcaaaaatatcatcattttaaaaaccatgcctcaaagttcatgccaaaaagacatagttcacaccaaaaaaccaaaaccaaaaacaaaaaacagtggccttctgactagaaagaaaactggaggctaggcgcggggcctccatgcctgtaatcctagcacttagggaggctgaggcgggcagatcactggaggtccgagttcaagaccagcctggccaacatgccaaaaccccatctctagtaaaaatatgacaatgtcgtggaaatagccattgattctggcataaaaaaataaagaggaaaaagtaattataaaaatgatttttatggccaggcccggtggctcacagcactttgggaggtcaagggggatggatcataaggccaggagttcaagaccagcctggccaacgtggtaaaaccccgtctctattaaaaatactgctcaggaggctgaggcagagaattgcttgaacctgggaggtggaggttgcagtgagccgagattgcgccactgtactccagcctgggcgacagagcgagactccatctcaaaaaaaaaaaaaaagaaaaagatttttaatattctttcactgaaggaaatccatttccaatacaacaaaataattgtgtatatatatttttaagtatatgatgtctttttctcaaaagacacgccaccactttcatcagaatctcagacagattcatgtcttccaaaagattacaagaccaatgtcctaatgttttagtttgtggtaagaaaaatatagtctatcaccttattccaggggtgtagtttttggccaatgcatatttatgcaacaggatgaaagttcaaatagcacacttatgcaacaggatgaaagttcaaatagcacacttatgcaacaggatgaaagttcaaatacataaaaatctattaaaaatccttcaaagtggactagggtcctacgaatctgctgagaagcctagtatctgacctatgcatgaattgataactgattctgattttcttacagatattcctgaaagaggatagagcttggtgttgagaataaactgggcagtaatggtgatgaggttacatcatggccttactaggaaatgtttttgcttttttttttttttttaactaaaaacatagattttttttttttagttcatactgtgccagatgttggaaacacagtcgtaaccaaagataatttagatgttcattaaaaaatatttaaaagacgaagacaattttaattactcataattaacattattttcagaaaaatggctaaaaatcttataaacttccttccagtccatttttgcatatgtaatacttttttttttttttgatactgagtcttgctctgtcgcccaggctggagtgcagcggcacgatcttggctcactgaaacctctgcctcccgggttcacgccattctcctgcctcagcctcctgagtagctgggattacaggcacacgccaccatgcctggctaatttttgtattcttagtagagacgaggtttcaccatgttttcccaggctagtctcgaactcttgaccttgtgctctgcccgcctcggcctcccaaagtgctgggattacaggcatgagccaccgtgcccggccctgcatgtatatattttattaaaagtaaaattgggccgggcacggtggcttacgcctgtaatcccagtactttgggaggccgaggcgggcggatcacctgaggtcgggagttggagaccagcctgaccaacatatagaaaccccatctctactaaaaatacaaaattagcctagcaaggtagtgcgtgcctgtaatcccaactactcgggaggctgaggcaggagaatcgcttgaacccaggaggcggaggttgcagtgagccaagatggcgccactgcactccagcctgggcaacaagagcgaaactccatctcaaaaaaaaaaaaaaagtaaaattggaatgctattaggtttagaattctacttttcccaataatatggtatgcatttctccaagtaagtcttcaatagcaagatatttatttatttattgagatggaatctcgctctgttgcccaggctggagtgcagtggcttgacgtcagctcattgcaacctctgcctcccaggttcaagcgattcttgcgcctcaacctcccaagtagctgggactacaggtgtacgccaccatgcctggtttgtatttttagtagaaatggagtttcaccatgttggccaggctggtctcaaactcctgacctcaggttatctgcccgcctcggcctctcaaagtgctggaattacaggcgtgagccactgcgccaggaccaatagcaagatatttaaacggaagcattatatttcattgttattgatttaactattttccttatattggatttttaggtaatttccattttttcactactcaagactacatccttgcatgaaaatctttgcttgactccgtttccttaaattcctgaaaaaggaattactgtcatagagcataaacattgtgaaggtttttggatctttttttccaaattgccttccagaaagtttgtaataatttacattcctgccttctcattcctgcatcaacactttaatttttcccaacatttcaaaattttgttagaaaagttaaatcttactgtttcatattttattaccaataaagttgattattttttcatatgtttcttgcctgtctgtagttcttcttttggaacgcttagtccataccattagtctaatttttctatcagtgtgttggattttttctttatttgtaagagctctttatgtataaggctgttggccgaatctagtggctcagcctgtaatcccaaaactttaggactcagaggcaaggcaggaggatcccttgaacccaggtgttcgagaccagcgtaggcaacagagtgagaccctatctcaaaaccaacaaacaatttatcttatgttgcaaatatttttcttcatatgcctttaaactttatatatttttttaattcaatgaggatttacactttcatacaggtagattgatttatgttctcctttgtggtttattccctcacttatgtgtttacaaaggccttccttcacccaagttaaggtaaatattcagcatatttccttgctgtggttaagagatgtgagaagatactatgagagactcactatgttcacaactttttccagttaaatgaagtcttcccacgtttcctaatcactcacattaagcatatagaatggattaattttaaatctgaatataaaactaattgcacagcatgtttcactgctcttcttactgcctacctggggcacagtctctttggcctgagtggtctcttcagtttttaacgagtggctccacaattccttaggaagagctgctctcttctgtctccctggtggtcgtaatttcgcccacacctgccccgtctttgctctgcagctccacactccctcagccccgccgagagctcctggctcccgtctccaggttaccccaggtcaccacagccacctctctgcaccagcggcccgctcacgtacccagctccaggagctccttcacgatggcttttccgatgcccgtggccccgccggtgacgatggccacttggccctgcagcaaaccaggcgccaggtagctcctgcccttagcccaggaggccatccctgcagcggggtgccagagcagctgagcgcaggcccttctgggtctcagggacattcgaggcgggcgggcggacagggcggtgctcgagcccacgtgaccaccagaaccccgcaccctccccggcccggccccgccccgcccgccggccgcggcaaagccgcatcctcccggagcagaaccgctccccgccggctgtccgcaacctccgccagcgtcggtccctgggcaggtgtgggtgagactgctcgttcgtttctttaaatttcgatgccattggggagggtggaagggaaatgcaaaaaaaaaaaaagaagaagaaagaaacaagcagggtgtgctctatttcaaaaattcaatcctcagggctgaagctctcacgattaattaaaattaaatctccagtgcagctggaaaaagaaaggctgctgctcggcgccctcgctgcgcccgcctgccggggtcggacgtcggcgatgctgtggctccaggtgctgtgtgccgctggctgggaaggggagaaagggcaggcttagctgagggggagaaatgcggctttcagatcctttcatccttcgggagggagcccgggaaagagagtgaaggggaagaggagatgcggttgcagttttccacagaaccaagagaataaacgatttgaaaaaataaactcaggcccacctccgtctcacctcccactccccacccaagaatcaaggggaaagatcatctttaccaggtttgagacctgatccatttcagctgagctgcatagcgagtccagaagaggatctttccttgaagggtgcacgcttcctgcaagatgcatctgtaggtgtttgagatcatgtcctgtagttcattccttgtgcaggagggtgagccckctgaggatggggaaaatttctcgtctgtgttatggtgcccagtaacagtgatttattattcagatctgctccttatttttcatcttgcttcccgctctgaacccaccasagtgagattacacctggactggcctactgagacttcaccctaagaacttggtcgaatgtgccagttgctgtggtcttaacaatccagatgggatgctatttctaaggctgttgtcagagtgttgcattttccccggacaggtattaaaataatataaaggcaaataaatgccatcatccttttgttggacctaccacctaggattcacaaagccaattggaaatgggtctggttgacagaggaatcagaccatcacttcctccaccaggtcccacccaccagcgaggctgcagttcttgttggacagctacacttccctgttgctccatcctcttgtccttctctgatctctttttagaatcacttctccctctatctttgttgctgacagattcaaatctacactcgttaaagaaaggaataaatctcctggttaccatttgctagatagtttatccaggaatcacttaactctactacttaagtcaattctgtagttaggaccaaatttttaaaattacaacgccatcacctcctttaaaacaaagtaaattcaaacaggaaagctcaaagtgttgttgcagaaacatataactcctcttggtttgatcccaatgacaaggtgtttttttttaaggaaaagaaatattgattcagttctgaggggtatcttattcaagagaagtccagactttctttcttgtgggtggggacactttaaattcttttaaatgataactttattgaagatataacttaacatgatttatgccctggtctggacctatagattcttagaggtgtgccagggtgggtcagtgggaagctggctgtgctgcagcttccgtgtggctgctgagcggactgagagtgggattctgatgtcttccagtgaaacagggactggggcctgcaaaccggttatgcctactgaggatgacaaggtgccattcctcagctgcaaggaagttgcaggatgaacagtcagaaggcgatttttcatgatccaggcagaacctgcaattaagagagctttggggtctcttcaagcgatctttygtttaaaattaggaggcatgatctctttgcctctgcctctgacctctgtcagggtttgaaagtccactaatccgctaagttccaggccaaaaggcctggaagcagagcaatagatctgctgcttggaagctctttgttttgaaattttagttctgcctctggttgaggcatctcttccgaaggcaaccacgccatgctgcactgaccactcctttggttgaatcaaatgctgctcttccctgtgctctgcgtcactgccctctttgtcctggggaaaaaggcattcctgtggccaaggtcctcccacacccccgaacctctccccacagctctgtcataccccattagcaatgactgccttcagcttcccacccctcccccaccccatctgcctggtaactttattttctcccctctgcaaagcagctgctagctcagactgacaggggcttgtgggattctcgacatttagactcccagaatctcagtgctgagagaatgtcagtgaagcatctggtcctgcccctaccttgaagcaaaactacctagcaattgtgccataacaaggcatataaaggagcttattgatgtctttttattaaacttctccttagtctcaggctttcacaaaaaataagctactcctgagttgctaccacttcacccagtcacttaaaaagatttatcgagcatctatttgttggcctacttctatggtaccacttcatagggcttgaagtctagtagaagagctatgcaataaataagtaaaagaaaaataaataatgacaaatgttggtaagccttacacaggaaacaagctgttgtgataaagaataatgagaggcagagcagggagtcaagtttttagttcgggtgtcaagaagggctcagaggaggaaacatttgaacaaggactcaaaaaaacaaaaacgggcacaggaagaggcggggtggagcagcagagcagcaagatagacagcagttaagaagacctcaagcatttggaagcatttggtgctcttgaggaagaaatacacagccagtgtgattggagcatagtacccctactatggtggtacagatggggtggcaggatggggaggtccttaggccacatggacttccacatgtataacagtaggaagttacaggaggattttaagcagaaaacagcctgattttcttttttatttttatttatttatttgacatggagtctggctctgtatcccaggctggagtgcagtggcagcgatctcggctcactgcagcctctgcctcccaggttcaaacaattctcctgcctcagccttccgagaagctgagacgacaggtgcgcgctgccacgcctgaccatctgattttctttatgttttaaaaagatgtttctggctgggtggctcatgcctggaatcccagcactttgggaggtgaaaccccatctctactaaaaatacaaaaattagccgggtgtggtggcacacgcctgtaatctcatctactcggtaggagaatcaggtgggggaggtgggggttgcaggaagctgagattgtgccactgcagtccagcctgggtgacagagtgagactctgtctcaaaaaattaaaaaaattaagtaaaagatgttgcttactgctgagtgaggaattgattggaaggcagcaagagtggaagctggaagataggagcattttttttagaaccacagttaagagacagtggcctcctagaccagaggggaagcagtggagatgggaaagttgggtggatgaatttaagaattatctgggccgggagcagtggctcacgcctgtaatcccagcactttgggaggccaaggcgggcggatcacctgaggttgggagttcgagaccagcctgaccaacatggagaaaccccttctctactaaaaaatacaaaattaactgggcatggttgtgcatgcctgtaatcccagcttctcagaaggctgaggcaggagaatcgcttaaacccaggaggcagaagttgtggtgagctgagatcacgccattgcactccagccaaggcaacaagagtgaaactccatctcaaaaaaaaaaaacaaaaacaaaaaaagaattatctggataatttttttcaagagtggcttaaaagcagttattctaagcacgagttccagagtatgagcatgttcttaaaaacctgttttccctcctacaatgaccaagagtacagagctaatggttgattgaagctaacactctgtaatatcacatttgtaagaatctttttttttttctgaggcagagtctcactctgttgccccggctggagtgcggtggtgtgatcttggctcactgcaacctctgcctcccgggttcaagcgattctcctacctcagcctccggagtagctgagattacaggtgtgtgccaccatgcctggctaatttttgtatttttagtagagggggtttcaccatgttggccaagttggtctcaaactcctgatctcaagtgatccacctgcctcggcctccctaagtgctggaattacaggcatgagccaccgtgaccagcctgttaataatctttagactggaagtggaagtggaagatgggcacagcttaactgccagagaaaagaacaaagtcctctctcttctctcaagtctattgattaaagccttggaaattgggtaaaattttcttttaacctctctcttgtgaaatctaaaaggaaggagaaatgtttagaacctgcttctcagatcaaatacttacagcataataaagtatacaaaaatggggaagagaatcaagcctttctttcttaacagttgtttatgtcatatttctggtaagacattttctcttctgtgtcctatgaagtcaacaagtacatactgactttgtactacatgtccagccctggggttttcccattggtggttaagaagaagagtaagacagttcctaaactctagaagtttgttatctacctagaaagatgaatgaaaactcatgatgccatctataatctatacaatgatatgaaatgctgcataattaagtattaagtgtatggttcagatggcaaatgctattaaattacaaatagaaggaggcaaaagaaagggaatagaaactaatatttatgaagtgtcagtcacatattaggcattttatactgggccattcattgaattctcaccacacacctgcaacacagggttagggtgggaggagaggacgtgggggctggggtagtcacagaaggggacgtgagcgaatgagtctgtcttgagccaggcttgaaagatgtggagaagcgtgacaaagatgaagaaaccaacataagcacatgtgttgagtagtcacgttgcaggaaagggaaggggaaaattgctactgaatcctagggtggggtgcaaatacggagagcctcaaacaccagacaggccttcagatatattttagtcagtaatggcaagacaaaataaaaatattgttttgttttgtttattaatcaccattaatatggtaaaaaatggtagaggaatgtcttccattttagaatgtcttccagtttagaggaagtagtatgaaggctgtattctggcatatggtggtagtagaaattcaaatgaacaaattaacaaaaagatttcataggaatgactagcaggacttagagactaattattattaggtatatggaaatatgtccttaatataggaaatgggttcatcaaagaacattctagaagtttatagatctttgcataaatgttggcgggtagtatggcacaatgaaaataacatgggctttgaaattagcaaacctgggtgtcagttccagycccaccactatactagctatgtaagcttgagcaaatttctcctctaaatgggaataataaaggtacctacttcactggtttgctgtgaatattgaacaatacrattattgtaaagtacttagagcagcacttggcacacaataaacatccaataagtttctgttgttactattattcagtccaagtgtcctcttctgcaaaataatacttgcttcataaaattgttgtacctaggctggtatggtggctcacacctgtaatcccagcactttgggaggccgaggcagatggatcacttgaggtcaggagttggagactagcctggccaacatggtgaaaccctgtctgtactaaaagtacaaaaattaattgcrcatggtggtgtatgcctgtggtcccagctactcaggaggcagaggcacgaaaatcgcttgaacctggaggctgaggttgcagtgagctgacattgcacaactgcactccagcctgggtgaccaagcgagactctgtctcaaaaaaaaaaaaaacaaacaggccgggtgcagtggctcacgcctgtaatcccagcactttgggagaccgaggcgggcagatcacaaggtcaggagatcgagaccatcctggctaacacggtgaaaccccgtctctactaaaaaagaaatacaaaaaattagccgggcgtggtggtgggcgcctgtagtcccagctactcaagaggctgaggcaggagaatggcgtgaacccgggaggcggagcttgcagtgggctgagatcacgccactacactccagcttgggcgacagagcgagactccgtctcaaaacaaacaaacaaacagacaaaaattgttgtacctagaacaactatgcaatatatagcacatagtgttgcttaataaatatttactgaagctgggcacagttgcacatgactgtagtcccagctactcaggaggctgaggtgagaggattgcttgagcctaggagttcaagtcaagcctgggcaacatagaaagaccccatctctaaaaataaatgaatacgtaaatattttttgaatgtgtaattcagtgagataatgcatgtactgtataatcaacacagaacctaccaaattacacaatcggtaaattccataaatgttgtggtgtttccttctttatccctttctcctttcctttcccccttctccttttttctcggtaacactgagaggttctctgctgtaaataaagatgagtttggtttgaacatgctttgctaaataattcaattagaaaatattcgccaggctattggagatacaatcttgagatctacatttgggcgttcttggcatagaagtggtcctacagctgtgtgcaggaaggctgtatattttaacaagaggaacagagtgtgctgttgagaatagaggacaatgaattaagaatcgggcctagaaaacactggcaattatgggttggagaaagcagataagggagcaaaagaaacagaaggaaggtttgagaggtaaaagagaatgagagtagaaagttaaaggaggtgagggaaggttcaagaaagatttgggaattagtggaatcaacagctttggtgtgacaaggagaataagaatggtgaagtggtcactgtgatcacatcagggactttcaagactgtttctcaccaaaatgagtggatctgtcatcaaatgaaggagaaatagggttttggacagcaaacaacagaaccaaaaaaccaaaaaccatcagctgttcactgcagctactaccacttgactacttctatttttaattttcattttattttattttactgattttatttttgagacagagtctcactctctcgcccagactggatgcagtggcacgatctcagctcactgcaacctccacctcccaggttcaagcgattctcctgcctcagcctcctgagtagctgggattacaggcgtgcacaaccacgccaagctacttgtatttttagtagagacagggtttcaccatgttggccaggctggtcttgaattcctgacctcaagtgatccgcccatcttgcccttccaaaatgctgggattacgggcatgagccaccacacctggccttgacttcttctaaatcttggtggggaaatcctggactttagagttatgcaagtatagaattaaacccaagttctctcactgctatatttaacgcgttgaacctaataggtcaagtgtggaaaataagacctacctgtcaagcttgttgagagatgcaagtaagagaacatctataaagagtttaccttacagcctgacacataaggctcaataaatgctaatttcctggcctatttctcatctttgcaagtgacttgcgcgtgtgcgtgcgtgcatgtgtgtgtgtctgtgtgtgtacagaggttgggagtggggagaaagggcagaagattgcaggatgaactggatatgagtggctataaactatttgatagaaaagcttggttggagaaaaatgagattatcagagagagtaaagtggcaaggtaaagttatttttttctagataaggaactctgagtttgaaggcaaaggggaaagagccagtagaaggaagttggagctattggagaaggaggaaatcaaagatgaggaagagatggggatcaagagtcaagttggggtggtcaaagaaaatacctgttttcagaccactcatgctggggaaggccagccactgttgtaaggacactcagatggcccatggagaggcccatgtggagagaaactgagtcagcattacatgagtgaaccatcttggaagcagatctagcctcattcaagccttcagatgactgcagccctgacatctttagagatcttgaaacaaaaccagctaagccactctcacacttctgactcagagaaactatttataggaatcccacagaaatgttgagaaaattctattcacagaayactaaaaggttcagaaaccataaaaacaaaaaaacacttttggacctccaaattctataggcaggaagcaggtagagaagactactcaccacccagctaaggcactcccagtttattgacgcayataattgtgtgagataataacttttttattgttttaaacctttacttcttgggtrayttgttacatcacaacagataattcatattcttgtactgtgacatctgatatattccagacttgcaggaaactaacagtaaaaaggatccccaaatttaggaaaacactgtttttacagtagccttgataacaagtagccaccagaactagttttaaacatgttcaatcaacaactgcctaagtgaatacatttttgaaagccatcatcagagtgccagaccctgattggccaaaagtcaactcacactagtgtgaaagtcagccaaacagggacagagccactcacctgattgactttcagaaacaaaggactgactggatgggttaatttccaaaaacatgtttgctgagtgttatggtatggtttgttttccccccaaatccatatgttgaratttcagcccccaaagtgatggcattaggtgaggctttatgtcatgacggtggagtcctcaggaatgggattagtgcccccataaaagagacccagaggctaggctcagtggctcacacctgtaatcccagcactttggaaggccaaggcgggcggatcatgagtttgagagcagcctggccaatatggcgaaacyccatctctactaaaaatacaaaaattagctgggcatggtggcgtgtgcctgtagtcccagctaattgggaggctgaggcaggagaattgcttgaacttgggaggcagaggttgcagtgagccaagattgcgccactgcactccagcctatgcgacagagtgagactccatctcaaaaaaaaaaaaaaaaaaaaaaaagagagagacccagagagctagtcagctccttcagccacgtgaaaacacagtgagaaggcaccatctatgaaccagaaagtgagtcctaccaaacccctaaacttgatcttggattttttgctcccagaactgtacaaaataaattcttgttgtttataagctacctagtctatggtattttcttatggcagcccaaatgcactaagacactgagggagattgttgttgatcaattgaacaggtttaaaactggttctattgtctacttaccatgactacaaaataacccatcttttcctaagtttgtgggaatgttttgtagtctcaaaggatagtgttctaattgtagggagatgaggaaatcaygtttcaaggtaaatcaaggacagtgtctctgtcctgtgactactgtaagtagacattggctgggcacctttctaaaatgagctgtgcctgaagcaaaaatagcccccctaaggtgaatagccaggagctcaccctttacatttcatatttcttgtctaaggttttaatgggatgttcaaaagtcatctctctttttgcctctgataggattgtccctctcctccatcagccaacaagatgaccatgtttatcttttatatycccaagagactccaaagcttctcttagctactattttctgtactagtctgtccctgggctcaggaagctcttcctgttatctaacattggcctctcccattgtgcccaaccaaatcaagagtgtcgaacactatacctttttatgtttttttttaattaaattaattctttttttgagtgattcgcccaccttgatctcccaaagtgctgggattacaggcatgagccaccgcacttggccactttttaatgtttataaggcccattaataagggtcatcatctccatgcatgtgttcactttgccctgccacatcttcctagagcaccaccccctcaacaaagagagaggaaaagggaacaagaagtatgagatttgcaacttgccttctcacgtgtactctttaacatttctgtctcccttctgaacatcttggtacatctttaaagaaggagtaaggagtacagaacataaaccttctcccagctctgaagctctggtcctttaatctcctcggggtctcaacccctagtttgaaaattcatgctgtatagaagggccaaagaaggcccttcacaagctgcctcagaaaacaacagagagaaacagatgatctaagtaggaaaacacggtggattagggtggcctcccaagctgtgatcattgcaccttcaagtaagtacaaagtggtttgttcagaggtcattcctaccatagaattaccatgatgcagctttctgagtgtcagtgtataagaggacttggaccagggaaaacatttttgtattaaacatagacacttagagagtagaattacaaatgtatgtatatacacatttgtatataaatatacatatgtataagtacatatatagatatacatatatatgtatatcctggaacttaacgtaataatgaatgtgtgtgtgtgtgtgtgtgtgtgtgtgtgtgtgtgtatacatataaaatcttcacctgggggtggattgcattcagcctccccattcagtttcctctgggtagaggtccactgtcctctgtgtagaagccactttggtagaagagccctggtcaagctcatcaatgcccaaggcctgctcagcattctaatggttggattaattgtcctctggagctatttaccttgggagggctctctcccctgcttcttcytgtgtacatccttgtacttttagacacctcagccaaatgaatctcctggtccagaaagctccatggataagaatttaaagataatggctttcattctgcccctagtacaccccctagacaaagtcaggcagtgaggacgtagtgaaacctgcccatttcatcctgtggatcctaccactaagattctcaattgtgtcgctgggtgcctgatttattccaggcattgggttaagtgcccaattataaagttaatttagatccaacacctgccaatccaatggaaagacaaagaaaatcaacagaggctagaggaaatactgggtgagagggcagcagaggagagctcccctgcctggagggggagaaaaagccattccattgagcttaaaatttacctaaattttagaaacattgaaatgagaaaaaaaatatgtattctggcattttaagagatatgctatacagtacttcctgtcacatggtaattaccaaagatatataaatttgcttcaaaatgaatggagcctagtggaattctagagcctagtggaatttttgcttctttcttctctccactgccccactcccatccactgggccagaacactagacattgggaacatttgaatacacatgagagaagaagctttattattggaaataaagggatggcaaatggtgtacatgtggcagtaaaataaggctcagagagcactgaaatacagtgagggatttgggagttgggaacaaaagtaacagccagtaacctggagttgctgaagagtgtacagcctsgaggagtgtggggcggcagggttgtgagtagaagcttgcgattctgaataatatgcacagttatttgaaaagtggggaattttttggtaaatcgcttggaaactttttatatccatagcgggtaccactatagttcataagttatttttcacagtataaatgccaataatattgcataacagcaggaccatttgcctctttcactaggattaaaactgggtatgttaaaagtgcatgagagtattctagctaataaatgaagaagtcagagaaatggaatatcattttgtaacccccatgatttaatgggtatagtcaatggccattaacrggctgttaacttcacaaaaagagtcaaccagacattaggggacttctaatggaagtacaaacaccacctctaaaattgtcctgccaaacaaaacaaaccatcaaccaaaaaaatttcaatgtgaaattgatcaagactttctatttagctatcaactcataacacagagttcagaggaacacactgtggggatgcaatcagcaaaacccaggctatgagaatctgcaagataaatgacccgctttctttaacaaataagttaccaggaaaaaaaaatgaaggacagatatacagacctgcactgtccagaacagaaagtggagagacactgttattttaagggggaaagtgaagcctctccaccgctcttgcagcacgtgataggacacatcccagtaactttttgagattgtgggctgacaagaagccaggagacagatttcctttacagaatagcaaggtagacacagttggtgaggttgtaccatttgagtggcttgcttaatgttgtatttatccatttgagtatagttttaatgtatgattcaatagccagaagtctggaatactggtcccagccacctatggttcttttttctttcttttttttttttttttttttttttgacagagtctcgctccgtcacccaggctggagtgcagtggtacaatctcagctcaccaggctcaagcaattttcctgcctcagcctcctaagtagctgggattacaggcacccaccactacaaccagctaatttttgtatttttagtagagatggggttttgccatgttggccaggctggtctcaaactcctgacctcaggtgatccacccgcctcggcctctcaaagtgctgggattatatgcgtgaaccactgtgcccagcctacctgtggttcttaactctcacctactggtaaggcttcctcacccaacttccttatactctgcatgctccaactagaggctgatttatacacaaaaatcggtaacacaagcagactatgctaactacttatgtatataaaataaagaaacaataattgttgactttcatatgaataaggaaaatgcaaattatgacaacaatgagatatagtattccttcacatgggttttgccaaatattatatgtttgtataaatgacaaaaatattactgtagcaaaagtttattcactgtctattataagagatttagattgcattcccaaaataaagtattgcaagaagtaaagggagaggaargcttctgctaagttgaggatcgtttcccacattcctgtccatctcaccccatttgcttcctgttgatggctttgctttcctatctttcaggtggaatgcatccttgggacatctttgcatagccccatctaggaagaagttctgtgatgtgtgaactgtgagtttactcaaacaagtccaactctttataagacataggtagacgtcaggtctggaatggaagagccaacagcagtagaaggccaggtccagcttccaagcccccaccagggctctctcaggaaggctgtggctgctgccctggcgctggatggggaatccacaatggggcacaggaaaaagaagaggaaagagtcacgcccagaatccatcatcatctaccgctcagacaatgagaaaacagatgaggagcccggagaatcagaaggtggagatcagcctaaagaggaggagggagatgatttcctagactatcctgtggatgatggtaagtctctctagcccacttgtttaaagccatgggaaggaaaccaaaagggcatcttccagaacagacaggcatatgctcactgtcctatttcttcttggtgatacatttcttcttgcaatattaccaccttttatttatttattttgagacagagtcttgttctgtcacccaggctggagtgcagtggcatgatgtcgcctcactgcaacttccaccttctgggttcaagtgactctcctgcctcagcctcctgagtagctgggactacaggcatgtgccaccatgccgggctagtttttgtatttttagtagagactgggtttcaccatgttgtccaggttggtctcgaactcctggcctcaagtgatccacctgcctcagcctcccaaagtgctgggattataggcatgagccactgacctggtgcaatattacagtcttcattcaacaaatggtcagtatttactgagcacctattacatttttttctagatgatacagaaatctccaccctttcagaattcctaatgaaatggaagaggctgatttatacgcaaaaaytggtaacacaagcagactatgctaactacttaatgtatgtaaaataaacaataattgttgactttcatatgaataaagaaaattatgagaaaatttgccagaagaaaatcatatggcaaattatgacaacaatgagatatagtattccttcacatgtaggcttgccraaaattgggtaaaatgtgattacatcaatatgagcaaatggatatacttcatgcaccttagtgaaagtggaagccgcttcaaccactttgtggaggaaacttgtcaacgtttattaaatatttagtaaaattcacagttcaaaacaygcatacctcatgacccagaaattctcaatatctactccatgaaacttatgcccatgttatccttgtataaggaggcatatataagaacatttgttgaagctaatgcaaccatgatgtgtttgtattaagaattattgtggaggctgggcacggtggctcacacctataatcccagcactttgtgaggccaaggcaggcagatcacgtggggtcaggactttgagaccaacaacaggagtttgagactggccaacatggtgaaaccccgtctctactaaaaatacaaaaattagcagggtgtgctggggcatgcctgaggtcccagctacttcaaaggccgaggcacaagaattgctttaacctgggaggtggagaatctgtgtttctagaatgcagaggttgcagcaagtcgaaatcctgccactgcactccagcctgggtgacagagcaagacaacatctcgaaaaaataataataattattattattgtgcagccgtagagagatgaggcagatctatttgtgtagatggatagatctctaagacatatgctcacagtgaacaagataagcaatttctctgctctcctgcagttgaccttcagggaaagacagatagtgaacaagtcaacaaataaaagatactttcaggtagtagtatgagttctaaagatgacaaaaccatgctgatgggaagatgagtactggtggagggtggaaggtggtgggggagagactgcatggttgtgaaaggcttctctgaggaggtgacatttgaattgatccaaatgacatgagggagccaccatgaaaagttctagggcagagtttttggaggaggtggaacagcaagggcaaagcctctgaggtgagagcagctttggcccatttatggaaaggagttatttcagtgtagggagtgtaggagataagagggaggatggtgagaggaggacaggaaggtaggcagaggctggatcatggtggcccttgcaggtctcggtaaagagtttgatatttgtttcaagtgcaagaggaagtcaatggaggacttttaagcaaagagacatcatcttgtttatatttgtaaaagatcactctggcttctctataaagaatgaattataagggttaagactggatgctgatgggagactattgtgtccctgcagcctcagtagcactaatggagaagttcgggtgatagcaggagaaagctggagaagagaagctggattcaggatgcaatctgaacttgctgattgatcagaggcagggagtgagggaaagagaggaatcaataatgactcctgggtgattgactggaatgacagggaggatagatggtggtggtgtttgctgtgatgaagactgtgaaaagacagggcttgggagactgcacattccttttctctgggtaaacagagtccctgccactatccagggccctgctctttaggtggcttcatcttatctctcagttgtggggcaaggagtccacagggcccaaggtccatgcctgcctaaaggctgtattttcccatccccacccagacttctagggtggccagcagatagctatttggttctgtgtgggtgcgttgtgtgtgtgtgtgtgtgtgtatgtgtggtgtgcggtgtgggtgtggtgtatgtgggggtgtgtgcgctgtttgtgtgtgtcgtatggtgtgtgtgtgtaatgtgtggtgtgtgtgtggataggcgtgggtggtatggtatgggggagtatatggtgtacgtatgtgtgcgtggtatgtatgtggtatgtgtagtgtggtatgtatgggtatgtggtgtgtgtgtagaatgtgtatatatgtggtgtgtgcatacggcatgtgggtgggtatgtgtagtgtatatatgtggaatgtgtggggggcagcatttgtgtgcatgtatgctgtgtgtatgtgtggtgtgtgtgatgtgtatgtgtgtgtgtggtgtgttatgtgtgtatgttgcatgtatgtgtgatatgtatgggtatgtggtgtgtatatggtatgtgtatgtgttgtatgtggtatgtgtggggaggttgtgtgtggcatgtgtgtggtgtatgtgttatgtatggtgtttggtatatgtggtgtgggtatgtggtgtgtatgtggtatgtgtgatgtgcatggtgtgtggtgtgtggtgtgtgtatgggatagtgtagtgtgtgtatgtggtacgtgattgggaggtggcatgtgtatgtgtgtgtatggtgtgtatgtagtatgtgagagggtgtatgtgtatggtatatgtgggatgcatgtgtgtatgcgtgcagcccctggatgtgagggctggatcaggcatgtgaggggccccctctcagaaagcacagaactaggcatgagaagggaaggtggtggccgtccatcagtccagtatcttcacagcacttgttacctagaaataggatcatcatttgcatcatgtctgtatcaaagttcgtcacactcctccgtgccacagagattgtgccaagattgaggccccaaaaagcggagagagtaggtgaaaagcttaacctgcctcacaattttatcagggcccaggcacaaggactgagagttcatgtgggagcaataacaccagtggtcactctcccgagggagacccactcagtccgccattgaatcactgactcaggactgtgccagatggtgtaaaaaaggctactcttgtcctcatgcscagcctgggagggtgcaacatggagatgcaatgcccactcttctgatcttgactctcacctcctttgtaccctgcagatatgtggaacctgcctctggacagccgctacgtcaccttaactgggaccatcacacgagggaagaaaaagggtcagatggtggacatccatgtcacattgacagagaaagagctgcaggaactgaccaaacctaaagagtcatcaagggaaacgacgcctgaaggaagaatggcctgccagatgggagctgaccgtgggccccatgtggtcctctggacgctgatctgcctgcctgtggttttcatcctttcttttgttgtctctttctactacggcactatcacctggtacaacatcttyctcgtgtataatgaggaaaggaccttctggcacaagatctcgtattgcccttgcctcgttctcttytatccagtgctcatcatggccatggcttcttccctyggcctctacgctgctgtggtccagctctcgtggtcctgggaagcatggtggcaagctgcccgggacatggagaaaggcttctgtggctggctctgcagcaagctgggtctggaggactgttctccctacagcattgtggagttgcttgaatccgacaatatctcaagcactctctccaacaaggaccccatccaagaagtagaaacctccacggtctaaactcccaacaacttactccctcctctggccccagtagcctatatatcatcttaaaattccagcagattatttctttaaattaccccctactctccgcagttcttctgggaaatcagagtccatactgatcagttttaccatcttgagggttccaggagggcatggagcagacaagcaattgtgccaaagcagttcacccaatggacaaactctttttgattccctgccctaaaatcaccatttatttaggacaatggaactctgctgtgtgtcgttttgggagcctggaagtgttactggtgcctggaactgaggggagtatgtgactaaatgtgtcagggagaataaagaacctcggggtaaccaaatccaccaagataatagacagggatggagtgagacatttaggaagctggactaccacagtgtagcagaaggtaaagatttgtgtgtatcatttagatttagatttagctgcatagaattaaaaccctaaaatatcagtggcttaaacaagatagaagtgtatttctttcttgtgcagaagaagtctggaggcagaccatcctgggaccctgtgaagtaatccaggtcccaggcttcttctatttctctaccattagtaggatgtgacccttctcacccttatccccaacatcccagtgctgattacatcttcagccatcacatccatgtttctgataaaatagaggaaagggcagagaagcacacacccttcctgttcaaggagacttcccagaagtcccactcgattcttcttatatctcattggcaagacctcagtcacatgatgtcatgagcaaaagaggctggaaatgtagttgtttggctgggtagctatattctcagctaaatactgggttcacgctaattggcaagaaaaaggaagaatggttatttgggttttgttttgttttgttttgtttcgctttagagacggagtctcactctgttgccgaggctggagtgcagtggcactatctcggctcactgcaaccttcgcctcctgggttcaagcaattcttgtgccttggcctccccagtagctgggattacaggtgcgtgccaccatacccggctaatttttgtattttttttttagtagagatggggtttcaccatgtgcccaggctggtcttgaactcctgacctcaggtgatccgcctgcctcggcctcccaaaatgctgggattgtaggcaagaatggttatcttggtaggcaagtcagaatctttgcctcacaatgatcatttaaatacattcagaacccccaaactgctaatatggttttatttatttatttattcattcatttgtttattcatttatttatttaggcctgaatcttacacagagaatttatatatagatattagctacatatactttgaatatgctatacatcgatattagcacctcacgtactttgcaattaagcttctgtaatgtcatgtgatttgtttttggaaaggaatagtggacaggagagtacaatttataatagtagcataactctttgtcctggtggtggaggtgggacgaggtggtgatatttaacctagattaaagaccaggaagggaggaattgcatctgccaaagtttcctccaacagcgatcagtagccctaagtacaaagaagccagatttagccttctgttgtttggcaaaacctcactcagagctttactccctcagacctttctgagtttaaccacagacatgatctttgctgtgctgagaaacttgtgtctacctggcctgtagggagtgtaaactagattaatacagattaacagactctgaacttaaaaaaaaaaatcactcctaagggtgtccttctaatttcaaaatatcaactcctaagaggtcagcagaatttggagatttgggtccttataagaatagctggtgctcttttcttgttcatgtctcaaaacaaagctgttgagagaactgctgcgatgaatcaaaccagaggagtttgtcatgctccccacagagagcccaggacatttgcctgatgtatggtgctgagctccaccttcagaggaactctctcttttttttttttttaaataactattattagcttgacaagaaaaaaaaagtgcccaacagttttagtgttaatcttggtgctctatggtgcattagcagagatatgaacaattaaatgaagacaaagaaaataaaaataaagtctgattaacttttgctcattttgtctttgaggctcttcaaaattgctttgaatgctatggtttgcagaaaaagggtgagcatgatggctgtcctatatgtatgtaatgattttaatatgaatccttgtgtctggactctttccatgcttcactaattttggggaattctatttaggtggactgttttcacaaaccacactagaaacttgcaaccacatttgtcccatttttctggggttggggaaaccaatgggaaaagccaaaaagttgtgattaggacacaggtaaagtggctgtggtgccatggaagagtgtgggatgatgatgagatcatacccaagagatacctagataaagttgacatggccttcatcctagttgggctcatcatctagtggaagaaataggcttgtaaattaaaaccatttcaaaggggttctatagaggtatgtaaaagcctagactagaggaaggaaaaacagaaccaaacagaaccaaagcatctcatttttgctctcagcaaacaccacagagaccatcagaggagaaactggagagttcaataccatatttgaacaattcttttggctcatagttgcctaatcatcgtggtgaatatcaaggaagatgactatattttccagttgcttagcagccataatgtgctgagctggataaaccatgtctggcccatagggtgacactgatgtgtttccaagtcatcttgtctattgacattaggtagcacccttcatttcacttcacatccaagaagaataaaacccatgattttctataaaacaagattctaaatcttaagaataaccaatttcagatgatgtgaaagtttcattctgccattttggaatggccacccagagcttaatttgtgcagtgttgaaaaatattagtggacatcttactactcacatctgtttgggatataaacttttttttttgagatggagtttcgctcttgtcgcccaagctggagtgcaatggtgcaatctccgctcactgtaacctccgcttcctgggttcaagtgattctccagcagctgggattacagatgcgccaccaccatgcctggctaatttttgtatttttagtagagatgaggtttcaccatgttggccaggatggtctcgatctcttgacctcaggtgatccacccgcctcagcctcccaaagtgctgggattacaggcatgagccaccaagcccagccaggacataaacttttatttcatatctgtactctgttaatattctacttattttctcagttacccatataaccattgtaacagctctctgtcagaacacaaagcctgtatattttaatttttatagtggtcacgaagtcattactcatagttcacgttcaaggtaataccaaatgcaaacatattccagcaacttaaattataattacaaaataaaatttttatttgcctttattaactacctgaaggggaacacatggtctacattgtagcaatagttcaaaaaaatctctgctgtttcagttatctattgctgctgtaacatctaaaacacaatggcttaaaataacagcttggtgtgcacctatggtcccagcccctcgggaggctgaggtggaaggatggcttgagcccgggaggtggaggttgcaatgagctaagatagcgctactacactccagcctgggtgacagagtgagatcctctctcaaaacaaaagcaaaaccaaataaaccccaccaaaatagtcactcaattcctttgctcacagttttgcaatttgtgcagagcttggtggagactactagtctgctcaatgtttctagtgctgagatagcttcctaaggaggatcttctccctagacagcctcacttgcgtggctgccaagttggtgctgggtgacatccaggttactgttggggctgttggtgctcagtgcttgtattagtccacttgggctaccataacagacttgggctgtcataacagataataccatagactaggtagcttaaatgacagaaattagttttctcacagttctagaggctggagggatctcttcttgggttgcaagtggctgtcttctcactctgtgttcacatgatctctttgtgtgagtggggagagagggagagagggagagatggggagggagggagggggagagagagagagagcgagcgagctctctagcgtccctttgtctcttgtttcttttcacagaagcactaattccatcaggagggccaccctcatgactttacctaaatctgatcacctcccaaaggcctcatctccaaatatcatcacattgggggttagaatctcaacatatgaattttggggagacacactcagtccataatagggctccttcatgtggctatgttgggctttcacagcatggcagtcttcatacatggtatctgggttcaccagggtgcaaaagacaaatctgccaggtattctaaaggcttcagcccagaactacctactgttctgtaaatgcctacacattttactggttatagcaggtcatgaggcctgtccagattcacggggaaggaactacataagggtgtgaatgctgagaggcatggctcacacgcatcaccaaaatgacattttgccattccccctttcctatcccatttatttccctcatatgccacagtggcttttacacatttctctctaactcccccttctgtcccccaacacacataccatcaccaccactagtcatagcccatcaacctcctgtccccctttattcccaattctgtatcatttaaatccaaaaggaccttgcactgacagaaacagaacgaacaaagccagaatccttttgttgtggaggaggaagggagtagccatatatgctgtcacatcattaataatgtttatcccttgacccttgattaatgaaggccctttgccaggggaagcaatgcttaaagtccatatcccttttcagcgtcacagatgcctagctgcacagaggtggctggttctaaagacttctataaaaacagctgagatgcaaacaagcacagctactagaacctcttttatttcttccaagaaacagacctgtactgaagggtgtatggaagacagagagtggggacagggagaaggagaagaagggggaggaggaggagcaggaggaagaggaaggggaaaagcaagagggagggagggaaggaggaagggagagagagagagaaaggaagaggaaaaatagagaccatatacaagataaaaacatggacataaagcatgcaaatttccttcactgtattcagtctccagtaattctctttaccagtcttattaaaaatattttttaggctgagcgcggtggatcacatctgtaatcccagcactttgggaggctgaggtgggcggatcacctgaggtcaggagttcgagaccagcctggccaacatggcaaaatcccgtctctactaaaaatacaaaaattagccggcacagtggtgggtgcctataatcccagctacttggtaggctgacgcaggaaaatcgcttgagcctggtggcgggtgggagcggcggaggtttgtagtgagccgagatcgtgccactgcactccagcctgggcgcagagtgagactgttctcaaaaaaaaagagggtatcagggtacattatctccacatgctgataagttgttacataagtcccaccaattcacaatttaatatcatatactctacccactcaaattttcagtctttcaaagcacattaacaaagttatcaggaaaatgggactagcacaaccaaagatgttacagactgcacacaattttgacacggatagcaacgtgaccaaggagtggttttcttcaggaaacaattctactaaaaaaacccatgaaaataaaagtaatttaaaattttcaagacacattaaatgcatgactgtggctctatattgccatttagtatgcgctgtactgtaggaaataaaataccctctccctagggaatgttaaactgacttcgaagacagtgaaagcctcccattattcactatttcagtgtttcctggttgtaccaaacaacaaacaagtgaattatttcaccttttaaaagctacactttaaaaatgggataaagtgggattccctccttcctaaaaatgtttcagccaggcacaggctcacgcctgtaatcccagtactttgggaggtcaaggtgggcggattacctgaggtcgggagttcgagaccagcctgaccaagatggagaaaccccatctctactaaaaatacaaaattagctgggtgtggtggcacatgcctgtaat
